United States Patent Application Publication US 2004/0214272 A1 - sequence listing, part 53

SEQ ID NO: 275888 - protein, 505 aa, Zea mays
  Clone ID: MRT4577_183197C.1.pep
MEDKVLIAVGTVAVVAVLSKLKSAVTKPKLNLPPGPWTLPLIGSIHHIVSNPLPYRAMRELAHKHGPLMMLWLGEVPTLVVSSPEAAQAITKTHDVSFADRHINSTVDILTFNGMDMVFGSYGEQWRQLRKLSVLELLSAARVQSFQRIREEEVARFMRSLAASASAGATVDLSKMISSFINDTFVRESIGSRCKYQDEYLAALDTAIRVAAELSVGNIFPSSRLLQSLSTARRKAIASRDEMARILGQIIRETKESMDQGDKTSNESMISVLLRLQKDAGLPIELTDNVVMALMFDLFGAGSDTSSTTLTWCMTELVRYPATMAKAQAEVREAFKGKTTITEDDLSTANLRYLKLVVKEALRLHCPVPLLLPRKCREACQVMGYDIPKGTCVFVNVWAICRDPRYWEDAEEFKPERFENSNLDYKGTYYEYLPFGSGRRMCPGANLGVANLELALASLLYHFDWKLPSGQEPKDVDVWEAAGLVAKKNIGLVLHPVSHIAPVNA

SEQ ID NO: 275889 - protein, 46 aa, Zea mays
  Clone ID: MRT4577_183198C.1.pep
GMLFNTQDPYPRDDRGRAHGAELVHIAEAMTTADLISLHIRLTPAT

SEQ ID NO: 275890 - protein, 131 aa, Zea mays
  unsure (1)..(131): unsure at all Xaa locations
  Clone ID: MRT4577_183199C.1.pep
LTSVFEGTAAEEPPEAAATDDTQNRRQDDRARRHGQAPSANRAAPPDATTXAGHYSGTDDLNTLCGGANVSIRYDRRVXTHGSNAGLKIAIDLLGPINAKNTKITYADLAQVAGVDAVVVTGGPSVEFIPG

SEQ ID NO: 275891 - protein, 44 aa, Zea mays
  Clone ID: MRT4577_18319C.1.pep
DLKPRLRLVWQHHFLKDSYFSRENELIFLKNRNPLRKWGSQTSP

SEQ ID NO: 275892 - protein, 81 aa, Zea mays
  Clone ID: MRT4577_1831C.1.pep
NPPLKKGLAKFDLVFSCPFCTPGSIVKSRFHFKIFFGKAFCKFCQENFSPLFNAPPAPFNIYSEWFYKCEGVTLFKGPINA

SEQ ID NO: 275893 - protein, 53 aa, Zea mays
  Clone ID: MRT4577_183200C.1.pep
YLQRNSILAFITINEPLELSVTSVYVAHKILRIRTCYHLTSILVATDRRKYKR

SEQ ID NO: 275894 - protein, 116 aa, Zea mays
  unsure (1)..(116): unsure at all Xaa locations
  Clone ID: MRT4577_183201C.1.pep
PLVRYAFVPRVRPRVRPRVRSYKQCWIIAMVDLAQEEQVGWVPVATLDAIAKSVKVAPXIKVYEGATSYTMINRTKVXKYDLLVCGTTTXMIGSTREIXDVVXEHLVVKRNEATRD

SEQ ID NO: 275895 - protein, 131 aa, Zea mays
  unsure (1)..(131): unsure at all Xaa locations
  Clone ID: MRT4577_183202C.1.pep
MEGPRGWLMGLTWCFSNELVWNTFNYYVENVFSXHXNILDSKGITDRETGRFCCLNFMSFSFENFMLDALDNLNITDLHGRYITVNQAQSRYGGGGGGGYCGGRGRGGCCGGRRDCGYGCGGGYGGLRGGG

SEQ ID NO: 275896 - protein, 158 aa, Zea mays
  Clone ID: MRT4577_183203C.1.pep
CFFFPPVSFRLPFRKVGTPPGGGPFFSGPTQAAGPAFLFFLLLIAFFFFLDSSFLFSCPLFFFFPFLFFFFLRPRWWLFLYCGAAGPGRVVVLGGARLRVGCFWARGCSSLVPFFFFPPPPGPLLCFPFPPPPPAWLGRWPRAVLVVVPSTLDYCPPN

SEQ ID NO: 275897 - protein, 97 aa, Zea mays
  Clone ID: MRT4577_183204C.1.pep
RTQAYNSHNSYKKVRGGPFRGPWFSTFFTGLTFFFLGLLKLNSRPRFSHRRNRKNLGITHLIHLVSNPLCARYVLWKKPLTDPFSKIAPTLTGKCTP

SEQ ID NO: 275898 - protein, 48 aa, Zea mays
  Clone ID: MRT4577_183205C.1.pep
MDTETEFVPSSPADCSFYFLNATSSANSLAGAVVAPSQSWARLQPLRP

SEQ ID NO: 275899 - protein, 123 aa, Zea mays
  unsure (1)..(123): unsure at all Xaa locations
  Clone ID: MRT4577_183206C.1.pep
ASLPANYKKXLSIQLRGFASXGKLVKVKASYKLSDAAKDSPKAKPAAPAPKAAAPKPAKDAAKPKKDAAAAKPKKAPAAGTKRKAPEKKVVAKPKKSPAAKAKAKPKTVRSPAAKKTRKAPAA

SEQ ID NO: 275900 - protein, 67 aa, Zea mays
  Clone ID: MRT4577_183207C.1.pep
KKKKKKKKKKKKKKKKKKKKGEFKKKKKKKNKIYKNKKNINMGGARFKGSKFMFPCLRSKIFLMGVT

SEQ ID NO: 275901 - protein, 98 aa, Zea mays
  Clone ID: MRT4577_183208C.1.pep
VPPGVGPVFTLPASMGGVGLFQSTPSVFLFNTPLVSFYMLGAAKINGVQRFFFASRACFSPGFNHLETVVCFKGSHVWPPHPPNAFGLEKLPPWGEPL

SEQ ID NO: 275902 - protein, 58 aa, Zea mays
  Clone ID: MRT4577_183209C.1.pep
MPINMIALGSHHEVYHPGALKAEIAEFIYTLIFVFGGQGFGLAFNKLTGRVPTTPAGL

SEQ ID NO: 275903 - protein, 69 aa, Zea mays
  unsure (1)..(69): unsure at all Xaa locations
  Clone ID: MRT4577_18320C.1.pep
ASLPISSGVXKLXRPVGFPLTFXLPMAAASEGWARLVQVESELEGAEGGGVMRGRLLNRRLGRLLLSCG

SEQ ID NO: 275904 - protein, 87 aa, Zea mays
  unsure (1)..(87): unsure at all Xaa locations
  Clone ID: MRT4577_183210C.1.pep
MKRTGRKDTHPWRPPQNFSPAXSPNANPGPPPTLSRRSPXPTPPPXGRPPRTPLISPPGAPXSFPSPPPGIPPALPTGACPPPPLPP

SEQ ID NO: 275905 - protein, 75 aa, Zea mays
  Clone ID: MRT4577_183211C.1.pep
LVASTRIPDLYDKVVYVPSDLIHGLHSLTRSGGIGLQVRPPVPRRRGAGVQVGNTGSRCRATSAALSPGARSVRS

SEQ ID NO: 275906 - protein, 206 aa, Zea mays
  Clone ID: MRT4577_183212C.1.pep
MASDDEEACDYFYDDDDDAEEDAAAGLEEDSSLPTPEGRADYWAITQDTVFAAQKQDLSTVMNLLNINQHQARALLIHHRWSMDGIYDSLDMGRERMLRNSGIVLQEVNSIAAAGSMTPWRTVTCKVCFEDFSMDAVSTMDCGHCFCNDCWTEYFHAAVESGKKQIRCMEVKCSAFCDEDLVRFLLVQKYPDMAKNFNRFLLGSYL

SEQ ID NO: 275907 - protein, 90 aa, Zea mays
  unsure (1)..(90): unsure at all Xaa locations
  Clone ID: MRT4577_183213C.1.pep
SLPKDEVVRMVEEADKCGKDDIVQKDPFVTKNQAYSVVYQTEKQLKDLGKXLPVPAKENVVVNLQELNEAVSGGSTHELKDAMSALNQEV

SEQ ID NO: 275908 - protein, 1002 aa, Zea mays
  Clone ID: MRT4577_183214C.1.pep
MEQAPQTHGGGGLLACGVMEDVAVGDLDLMEELFMAAPGFDFSDFSQPGAGGESPGVCFSPLFDICSTTTTATPPPPPPSGDDNRDQPTPPRRGWVFQPRLEVDATVKERLRRALERIASLSQTQPGELLAQVWVPTVIGDRQVLTTCGQPFWLDCRNERLANYRTVSMKYQFSADETARTDLGMPGRVFVGRVPEWTPDVRYFSTEEYPRVHHAQYFDIRGSVALPIFEPRSRVCLGVVELVMTTEKVNYNAEIQNICSALKLCRLLCRYTLNLFDEMPLGKDVITTGHANPRSNQSFHLTLFGDVLVSVTDTSYRAIIPEIVDVLRTVCETHKLPLAQTWIPCICQAKRGSRHTDEKLKYCVSTLDEACYVRDLNVNGFHEACSEHHLFRGEGVVGRAFATNEPCFSEDITASSKIQYPLSHHAKLFSLRAAVAIRLRSISTGSLDYVLEFFLPVDCIEIEEQRAMLNSLSITIQQTCYTLRVVSLKELVDEGSIETSALTPPEYDKSMHENIDEVCSGIGVPARTASLETSEEVSSWIASLVCAQNKGVKEMDGDLPFGFSKQEDEGFSVTAGWHTSPVIEPEGSIFSGFKQHEEYKVKEVTCLRDPSSSNLEKTVEKRRTKMEKTVSLEELRKHFAGSLKEAAKNLGVCPTTLKRICRQHGINRWPSRKIKKVGHSLKKLQMVIDSVHGSEGTVQLSSLYENFTKTTWSERELQGDATYPLSEEKGPLEPSVPDRYCEGRFTSHTSGSNSLSPSCSQSSNSSHGCSSGSKSQQHVSAPQLAVKKEVFMEENQSSTLLKAASHAELQMLPEERLVTLPRSHSQVLLSEQKPVENITGMQMSKPDSLKIKAMYGEERCIFRLQPSWGFEKLKEEILKRFGIAREVYVDLKYLDDESEWVLLTCNADLLECIDVYKSSSTQTVRILVHSSDHSVSSHNHICKSSICKYLHSCCHPVVKCLVSSVCCCLVAVWQNWRESDCWCSLSALGIGLYAVSCIQSLI

SEQ ID NO: 275909 - protein, 150 aa, Zea mays
  Clone ID: MRT4577_183215C.1.pep
ANFTAYFTPGFWASPALSSAFAGRRACYFNTGVMVLDLARWRRAGYTAQIEEWMELQKRVRIYELGSLPPFLLVFAGRIASVDHRWNQHGLGGDNYRGLCRGLHAGAVSLLHWSGKGKPWDRLDAGRPCPLDAVWAKYDLLRPAADIETS

SEQ ID NO: 275910 - protein, 162 aa, Zea mays
  unsure (1)..(162): unsure at all Xaa locations
  Clone ID: MRT4577_183216C.1.pep
RACSKIQYPLSHHAKLFSLRAAVAIRLRSISTGSLDYVLEFFLPVDCIEIEEQRAMLNSLSITIQQTCYTLRVVSLKELVDEGSIETSALTPPEYDKSMHENIDEVCSGIGVPARTASLETSEEVSSWIASLVCAQNKGVKEMDGDLPFGFSXQEDEGFSVT

SEQ ID NO: 275911 - protein, 293 aa, Zea mays
  unsure (1)..(293): unsure at all Xaa locations
  Clone ID: MRT4577_183217C.1.pep
CPTTLKRICRQHGINRWPSRKIKKVGHSLKKLQMVIDSVHGSEGTVQLSSLYENFTKTTWSERELQGDATYPLSEEKGPLEPSVPDRYCEGRFTSHTSGSNSLSPSCSQSSNSSHGCSSGSKSQQHVSAPQLAVKKEVFMEENQSSTLLKAASHAELQMLPEERLVTLPRSHSQVLLSEQKPVENITGMQMSKPDSLKIKAMYGEERCIFRLQPSWGFEKLKEEILKRFGIAREVYVDLKYLDDESEWVLLTCNADLLECIDVYKSSSTQTVRILVHSSXPVSACSFGQTGLS

SEQ ID NO: 275912 - protein, 80 aa, Zea mays
  Clone ID: MRT4577_183218C.1.pep
SRIPGRPTRPEAGKALETLKNWKGEKSRDKVPQSFNPPNLPRTALTVANGLKDLAGFVLEKLGPKNAIFTKAADAMVEWN

SEQ ID NO: 275913 - protein, 60 aa, Zea mays
  Clone ID: MRT4577_183219C.1.pep
SLLRAGIPLSFAHRSPFFFCCVFPDAVAVGCLQTGAGTKAPKKRWLAKKKKEKTKKITII

SEQ ID NO: 275914 - protein, 218 aa, Zea mays
  Clone ID: MRT4577_18321C.1.pep
MAMEDVAGASSSSVAAAASDPTHGWQTVSYPKRNRKQAHQPPRALAPDLALQANGKGSGVFDAVEKRSQERHRALQQQLASRAADLDDARIAAVTGSAYSDDSDSDEATAPRQVGEVKKPKKPKKPKVTVAEAAALIDAENLAAHLVEISSSYENQHDIQLMRFADYFGRAFVAVSASQFAWAKMFKESTVSKMVDIPLCHIPEAVIKTASDWIIPRS

SEQ ID NO: 275915 - protein, 59 aa, Zea mays
  Clone ID: MRT4577_183220C.1.pep
MNHRIAKVRGRLSTLKMDPITTNFYPLITLTPGGLKKTGKLNLAVRLTFTEWPNKFVKF

SEQ ID NO: 275916 - protein, 57 aa, Zea mays
  Clone ID: MRT4577_183221C.1.pep
PIHLYTSTLPPVQPERKTQTNSTQKLKLIGEGSQSTYTVQHPHSHGAREKGANVKNK

SEQ ID NO: 275917 - protein, 42 aa, Zea mays
  Clone ID: MRT4577_183222C.1.pep
GPFHSSNSPSCRITSGSRREEWCYRIPRESRRLLRKGYTRRR

SEQ ID NO: 275918 - protein, 151 aa, Zea mays
  Clone ID: MRT4577_183223C.1.pep
SQGGEGKIAAAAGWPFPSSILCPESILGSWRAELEILEACAPPSAVSSAAPFLAIAGRVEGSAAGEVGEEYLTRVFRFLELWATGGAAITRRSSITIADPWVTADGNSSASLAGNRSCLAFALTFSLRSTYLIRVLSVWATIRESSAMAPP

SEQ ID NO: 275919 - protein, 86 aa, Zea mays
  Clone ID: MRT4577_183224C.1.pep
SIFFFFFCVLFFIFFFFKTSHHVLKLLGPSFFTASYREISQTLGLGGGVPTINYLPPFIRASHGALHRDGPPKGGGPRINPHKPPP

SEQ ID NO: 275920 - protein, 214 aa, Zea mays
  unsure (1)..(214): unsure at all Xaa locations
  Clone ID: MRT4577_183225C.1.pep
MARRPQPMPNLVPTLLLLLLVVAAAVVRADDDEKCSNPCGNPCGEPCVYASPPPPPVYSPPPPPPTPEYYPPTTPTPTTPYCPPPPLGGGGGYEPSPGYTPSTPYTPGYNPTPSGSGWYAPPYTPPSAGTLYPQDPGFXPTPRRGAPRPSSPSPRRWPAPASACCDRPTGRIGGRESRTYGTVRYRRPAPVVVVVVKSTADCMLGLVPRAPCWC

SEQ ID NO: 275921 - protein, 213 aa, Zea mays
  unsure (1)..(213): unsure at all Xaa locations
  Clone ID: MRT4577_183226C.1.pep
FLYASPPPPPVYSPPPPPPTPEYYPPTTPTPTTPYCPPPPLGGGGGYEPSPGYTPSTPYTPGYNPTPSGSGWYAPPYTPSSYNSPPSPPGTLYPQDPGFRPXPRPPRPSPSSPLPPPPPRRWPAPASACCDRPTDRSDRRPRIAHVRYGTDDLRPWWWSSSSRPQSTDCMLGLVPLRVGVNNKIRGRIKLGLGKIFFSSSSTHCVVSFFLFCV

SEQ ID NO: 275922 - protein, 109 aa, Zea mays
  Clone ID: MRT4577_183227C.1.pep
ASAVQRAVQEMVEDPLGCWPGWEFFRMAGDPTVRPERLMNVSGSPGFRAYEVADFGWGRPRRTEPIRMNHDGQLALVRGRDGDGVQASVSMLRRKHVDAFKSEFLKLLG

SEQ ID NO: 275923 - protein, 101 aa, Zea mays
  Clone ID: MRT4577_183228C.1.pep
HEQAIVQFLDQCKVKRSLNKHGVAGPWWPGSAILIVKGGSARPSSIMTSAYVHGTFDSIVSLSCYAASTDCVRSGSPYPAYQCRALQYSAVLVKLVVGPEP

SEQ ID NO: 275924 - protein, 117 aa, Zea mays
  unsure (1)..(117): unsure at all Xaa locations
  Clone ID: MRT4577_183229C.1.pep
PALVCNFIHSTPIPLDPDNPYPIAPRANGKPAEKNLSFYDKRKILPHVRSPSPXKLLPASKSSCNDGXMKNGKNNANNSVETYKIYIFKXVLNHVHPDIGISSKAISIINSFIIDIF

SEQ ID NO: 275925 - protein, 159 aa, Zea mays
  unsure (1)..(159): unsure at all Xaa locations
  Clone ID: MRT4577_18322C.1.pep
MADYVYGPGRNHLFVPGRGNIPDPVIRAMNRQNEDYRSPAIPALTKVLLEDVKRIFKTTTGTPFLIPTTGTGAWESALTNTLSPGDRIVSFLIGQFSLLWIDQQQRLGFDVDVVESDWGHXADLDALERKLRDDTLHTIKAVAIVHNETXTGXVTNDLG

SEQ ID NO: 275926 - protein, 107 aa, Zea mays
  Clone ID: MRT4577_183230C.1.pep
WAGGPLHARDLYPLFVANWGRRNGRRDNSRQPSHVEYTNDDAVGYVESVKSDVTRYHHTSVFTVMERDRRLAHSRRALITILLLHDKTHVGSDNNTKSWHQGYIRWD

SEQ ID NO: 275927 - protein, 225 aa, Zea mays
  unsure (1)..(225): unsure at all Xaa locations
  Clone ID: MRT4577_183231C.1.pep
KISKSFWCPMMEKMDKRLASWQGRFLSXGGRLTLLNSCLSNVPLYMLSIYPARKSIIRKLDLYRKRLLWQGGSQARKIHLVNWNSVCTPKNQGGLGVLNLEYMNDALLTKWLWNIENSNDLWQKIITKKYIKGKPLISVKQRQNDSQFWKKLLSLREVFFKYCKVVVGNGCKTSFWKNTWIGDCPLAVKFPVLFDLAFDKDISVNKVLTSNFDVCSLHPRKKNDG

SEQ ID NO: 275928 - protein, 70 aa, Zea mays
  Clone ID: MRT4577_183232C.1.pep
TGPPLLKKKNFSSPHFKNIFFFFYHPNLIQVPAFYHCLNYKTLGVPQFITFPTIPLFPILNYSQYTPPFP

SEQ ID NO: 275929 - protein, 61 aa, Zea mays
  unsure (1)..(61): unsure at all Xaa locations
  Clone ID: MRT4577_183233C.1.pep
LKSCHTKCMYDKIKVNAIDVXKYHIGSPDPNFRDAQLPESHRIWLKVTITYWNSMHYAENV

SEQ ID NO: 275930 - protein, 60 aa, Zea mays
  Clone ID: MRT4577_183234C.1.pep
SSRLLGFLACLLLLYWDIFFMWFFVYFLVLCIKVSFLCSDELFLCSHSFYLFFSSDTQSI

SEQ ID NO: 275931 - protein, 212 aa, Zea mays
  Clone ID: MRT4577_183235C.1.pep
LVGVAPKSVRSSVHHCSLKLSEQASRYKMKRGRRNEKGKKLAGKAAARALVWLLLPVLVFVVLNSDHMPQVPLQATTLYLVGHAPPPSPASSDQTPGEAVDAPPSPTSRHETPGKVVGAPPSPTTSDQTPSVAVDAPPSVASRDEAPGDAIGANKSQGDVARRRDTDVAAPRSKSICDFSSERMDVCAMQGDVRMHGKSATRVRGLSVRRQL

SEQ ID NO: 275932 - protein, 43 aa, Zea mays
  Clone ID: MRT4577_183236C.1.pep
FTRPPTRSGTRQKTCLHNSSSTILWRLSQVELSYTKPIYLIIP

SEQ ID NO: 275933 - protein, 95 aa, Zea mays
  Clone ID: MRT4577_183237C.1.pep
LTLLVFVLWGLRAAGVGGLGRRLPVNIWTWAGAGAGVGQSWGSRLEKQGPLQTQPWETQHGPPSPHHRTRQWLKTRTDAQKGVPWPLPASQTRAG

SEQ ID NO: 275934 - protein, 489 aa, Zea mays
  Clone ID: MRT4577_183238C.1.pep
MSSDSDLFVDAHDLWTKVKLKIFKSICTTSAPSIAGSTNLSKGEEQERWTPNDGSTSPTGSSPTSYTCLVANDESGDESDDEEEYEDEESTSSQGTFSCFASTDNNDRENETDDVEEEEIRHFYTHLNKEDKALLVKLLRRIKEQSETLLRLEETLIKTNDSLEKMTKEHEELKCSHDDLVQQYDSVLIEQRNNDDDLSCVAQLKMENAMLERQVELLNLEKLALGEKYDMLSYSHNKLVDDHIMLDIAHEVVITSLNLCEPHSCTCAHLDNISPCANPCCSKESQCLNEHQATGSKEKLLINKERNKKAKQLRRRRRAQDIYKHVVNKLEEEGTAARVKLCEKEAPKNKKRRGKRRCFKCNESSHLIASCPYKDKDEGMRRCFGCNDKDHMITSCPLMKNQRRTPSKMTLTKEKDKQQVSCQVERHFCYMCGERGHLSKSQGGKGKMSKKWKNQDLGTSISQVFGILSSTRQGQDKGSGTSVKELPRD

SEQ ID NO: 275935 - protein, 64 aa, Zea mays
  unsure (1)..(64): unsure at all Xaa locations
  Clone ID: MRT4577_183239C.1.pep
HACFLARACYGVLRYVMESGAKGCXVIVSGKLRAQRAKSMKFKDGYMISSGQPVNEYIDSAVRH

SEQ ID NO: 275936 - protein, 87 aa, Zea mays
  Clone ID: MRT4577_18323C.1.pep
GRKTPGVDWTFSFLARMGDKRNYPPGGFQSNDENLKLYMLKKGGARAPGLNSYPKWLQFPRKKRGPLLTRGQRGGGGFPPATPKQFP

SEQ ID NO: 275937 - protein, 126 aa, Zea mays
  unsure (1)..(126): unsure at all Xaa locations
  Clone ID: MRT4577_183240C.1.pep
KSNPLLKTSDGGALRYPEPLIKGDDPLKIGLGAPKNMGFPKFXVDHMVMVAGGRNPQGVGVLQNRGKPQGRFFCLEPFAKARFLPFGGPENLKKNSNLGGPKRGGLLFLKKGRVYHRANQWVFVLI

SEQ ID NO: 275938 - protein, 63 aa, Zea mays
  Clone ID: MRT4577_183241C.1.pep
GFFLLLKISSSKADIFTTKYKKKIKFESISLSYTRSYFCPEIPIYVCTNFIFKSIFLNAIING

SEQ ID NO: 275939 - protein, 57 aa, Zea mays
  Clone ID: MRT4577_183242C.1.pep
VALTYYNPPKKNPPAIFLKLGGYCPRAYKLDTCTSSQNANTHQPSIPEHNSRKATQA

SEQ ID NO: 275940 - protein, 50 aa, Zea mays
  unsure (1)..(50): unsure at all Xaa locations
  Clone ID: MRT4577_183243C.1.pep
MGNCQAAEAAAVIIQHPGGMGGGLYWXTSAAEVMRNNPGHYGALVILQGC

SEQ ID NO: 275941 - protein, 70 aa, Zea mays
  Clone ID: MRT4577_183244C.1.pep
KGGQNFQVFWKRGSCLNHFWAPKFFKKRGVKSFGKPGIHPIYKRWGHPLLPLRRGGEKRVTPLKGVSPFF

SEQ ID NO: 275942 - protein, 128 aa, Zea mays
  unsure (1)..(128): unsure at all Xaa locations
  Clone ID: MRT4577_183245C.1.pep
WDPRAGRNEIGRSTARICLRSLGCTTETPNAAGSSTCWHRNQKKPVCKKPXHDSPVANAPEGQNPSRTRSASRGGTASRVQGPLTLRPRKNATKTVATYNDHTFKELKQAHPDIGLTLQAMYIMNRRD

SEQ ID NO: 275943 - protein, 128 aa, Zea mays
  Clone ID: MRT4577_183246C.1.pep
MGNCVQISSGGVGVGGSRSCAAAVEAGCQQPQRRRSTAGGDEEEAIIDQAMTPSSILKVKMVLTKGELGWLVAQLKAGDRRLADVLREMARKREGRAAADGWRPSLESIVECPAETAPAPDATSDNSD

SEQ ID NO: 275944 - protein, 70 aa, Zea mays
  Clone ID: MRT4577_183247C.1.pep
MSDWGPVVIGLVLFVLLSPGLLVQLPGRHHLVEFGNLKTSAVSIVVHSIIYFALITLFVIVIGVHITTGD

SEQ ID NO: 275945 - protein, 74 aa, Zea mays
  Clone ID: MRT4577_183248C.1.pep
KARHACRSRAGIYWRDDDVFLLGGRPNGLSPNDQDKDTDPILLHKRQPKGNYLTPGVHRLVCATTINRRCIHRS

SEQ ID NO: 275946 - protein, 101 aa, Zea mays
  Clone ID: MRT4577_183249C.1.pep
EINTPIIPHICIHDTHRYVHESKQPPYNLHACSLYISKDRMPCLSALTSRPSLAPIPHHDIFVRIYLWVLLLPSRPTKKSAGITATRTNRDSGQCAGSLVQ

SEQ ID NO: 275947 - protein, 43 aa, Zea mays
  Clone ID: MRT4577_18324C.1.pep
RGTMGPYQVLNGVNFSGLLRFGQGLEGFEPKVNLCLPWNGLHG

SEQ ID NO: 275948 - protein, 70 aa, Zea mays
  unsure (1)..(70): unsure at all Xaa locations
  Clone ID: MRT4577_183250C.1.pep
PYSNNEKKTRRSPLKVYRAPQNTXXKPKNRTNXPPPXPQXLLPHYFLRSLPTLPTKLKALRHLHSSPPHD

SEQ ID NO: 275949 - protein, 245 aa, Zea mays
  unsure (1)..(245): unsure at all Xaa locations
  Clone ID: MRT4577_183251C.1.pep
MRSTAVLLVRTCVVLVCLAALARAPAKVHAAAGTGDGLLAIPTNASLSHCPSWCGDVQISYPFGIGPGCFRQGFELSCDQTAPSPRLFFVSGNSSIQVTSLDVGNSLVWVSAVGFNVTMSAGVDTYTSWKAPPGVISYGSNNLYTVGCGXTCXLFGDNMIDPIGYCTSICTDNRETMERANTPYSACEGIGCCSIPMRGDQGFTLKLGRLNRPSPXXGEALSSVKIIVSQGYKSFTDDVYPKLGD

SEQ ID NO: 275950 - protein, 45 aa, Zea mays
  Clone ID: MRT4577_183252C.1.pep
KCNHSELNLILVQSRIQALSRYNKRFEKLPPSWKYESTTESSLVA

SEQ ID NO: 275951 - protein, 62 aa, Zea mays
  Clone ID: MRT4577_183253C.1.pep
VVHDIVFARKRMNGSTIGAWNSCSRPSQKRQYMAISYFLRHTIGTFLLAVKVTPRFKACGIP

SEQ ID NO: 275952 - protein, 75 aa, Zea mays
  Clone ID: MRT4577_183254C.1.pep
IICYAPVLLSSGDVDVVSPLRGSRTNTWPPLSLDVPMSVSFYTHDRHAHLRTKDHDCRGIVNPHRASHDDSIYSL

SEQ ID NO: 275953 - protein, 78 aa, Zea mays
  Clone ID: MRT4577_183255C.1.pep
HTHSSGRFTAILPLRLDTPLQWKQWWHFSQLALTNPLGCYQQPIMGGARRLNSSMSYGSTLRFLAGRKGIPKNKKALF

SEQ ID NO: 275954 - protein, 47 aa, Zea mays
  Clone ID: MRT4577_183256C.1.pep
YIKDSSRGLDRTLARLLCRRRGSPERVQGRNARGAPVREGGGARSEL

SEQ ID NO: 275955 - protein, 73 aa, Zea mays
  Clone ID: MRT4577_183257C.1.pep
VVSDPLSRGPDPHQLAVAHHRSTITLRGRTPTLQRLPPPAPTHRGRLRRYCLRPASPAHHRLDRDSCTVRTIF

SEQ ID NO: 275956 - protein, 86 aa, Zea mays
  Clone ID: MRT4577_183258C.1.pep
LQNSQPNNLLYILNYIFFTTKKNPLGLISNFNHKNPTTPKFKKHNKTKTPQLIVVKMALLTVTPRTQCPKAKICGPFKPLMLTKTD

SEQ ID NO: 275957 - protein, 116 aa, Zea mays
  unsure (1)..(116): unsure at all Xaa locations
  Clone ID: MRT4577_183259C.1.pep
CVLRVASQPRSESTPRSLAEPGSPPLAASAHLVKTLXGETITLEXGSSDTIDNVRLXIQDKEGXPPDQQRFILAAAARDGRXLADYNIQNESTLHLVLRLRGGMQIYDKTLTGKTI

SEQ ID NO: 275958 - protein, 65 aa, Zea mays
  unsure (1)..(65): unsure at all Xaa locations
  Clone ID: MRT4577_183260C.1.pep
RSPLTPPRSLLSGHAAPWWLLTPPRSLLAASLAAHAXPLPARXSRRPAPCSWDGSAPIRXSTPSY

SEQ ID NO: 275959 - protein, 38 aa, Zea mays
  Clone ID: MRT4577_183261C.1.pep
SVCIMLFIIGHPERLSPVMTYKKNGVRFSLDLSVTRGS

SEQ ID NO: 275960 - protein, 82 aa, Zea mays
  Clone ID: MRT4577_183262C.1.pep
PKSKYLSNVSTISQYFLPKYPFITSTSNSSPLTTPSLTPITLPTFSNITLFTLHINNIYFIFIPSKHLFFFKKNSIFFFFNP

SEQ ID NO: 275961 - protein, 96 aa, Zea mays
  Clone ID: MRT4577_183263C.1.pep
GKKGASRPKGGKGGEAKRFSKTGGFHPASQLIRNPTSGKGKGRPPHHGKGDTGPAGEGPPPGNPQRGETGQESFRFFFFFFFFFFFFFFFFFFFFF

SEQ ID NO: 275962 - protein, 405 aa, Zea mays
  unsure (1)..(405): unsure at all Xaa locations
  Clone ID: MRT4577_183264C.1.pep
MADEVELAADQHVRYIVTVEKKKDSFESLVMEHIRLNGAYWGLTTLDLLHKLHAVDAAEVVDWIMSCYHPESGGFGGNVGHDPHVLYTLSAVQVLCLFDRLDVLDVDKVADCILFSQILNWVCAVGVCKIDIYQSPGEQSQFCNFGFVVKLTELGIQFLXSYXITPDVAGLQNKDGSFSGDIWGEVDTRFSYIALCTLSLLHRLHKIDVQKAVDFVVSCKNLDGGFGAMPGGESHAGQIFCCVGALAITGSLHHIDRDLLGWWLCERQCKDGGLNGRLXELADVXYSVTSHAWSAFFSTCFHEPAMDLIEPYQILKVCYSWWVLSSLVMIDRVHWIDKEKLTKFILNCQDKENGGISDRPDNAVDIYHTYFGIAGLSLMEYPGVKPLDPAYALPLHVVNRIFLKK

SEQ ID NO: 275963 - protein, 79 aa, Zea mays
  Clone ID: MRT4577_183265C.1.pep
VIYNDTPMALILLTYNNKTTGRAIYIIHTYHHDPTHVHTLYLVRYFILNGHIFATSNNEKTCHYLTLIIINTYTCFHLL

SEQ ID NO: 275964 - protein, 131 aa, Zea mays
  Clone ID: MRT4577_183266C.1.pep
LSTLCFLRACLPLQTHLIPASLLLGLIYGSWRHGPHRLTAMFWCCAYRLHEQVSSSERLMLDHLPFTSDNMQDLLIAQAPATSMYRTMTTYRTKDSCPYFQMDGAAHPDEGGHLIITCYWMPDVTRYIFGQ

SEQ ID NO: 275965 - protein, 252 aa, Zea mays
  Clone ID: MRT4577_183267C.1.pep
PRVRPESGGFGGNVGHDPHVLYTLSAVQVLCLFDRLDVLDVDKVADYVAGLQNKDGSFSGDIWGEVDTRFSYIALCTLSLLHRLHKIDVQKAVDFVVSCKNLDGGFGAMPGGESHAGQIFCCVGALAITGSLHHIDRDLLGWWLCERQCKDGGLNGRPEKLADVCYSWWVLSSLVMIDRVHWIDKEKLTKFILNCQDKENGGISDRPDNAVDIYHTYFGIAGLSLMEYPGVKPLDPAYALPLDVVNRIFLKK

SEQ ID NO: 275966 - protein, 52 aa, Zea mays
  Clone ID: MRT4577_183268C.1.pep
MADEVELAADQHVRYIVTVEKKKDSFESLVMEHIRLNGAYWGLTTLDLLTSS

SEQ ID NO: 275967 - protein, 70 aa, Zea mays
  Clone ID: MRT4577_183269C.1.pep
QVLVRTLLIHVDRQDKENGGISDRPDNAVDIYHTYFGIAGLSLMEYPGVKPLDPAYALLLDVVNRIFLKK

SEQ ID NO: 275968 - protein, 52 aa, Zea mays
  Clone ID: MRT4577_18326C.1.pep
LYQTRKELTLTISSRLTPTHGVHPPGGVALPNKYMGKLNTTIRDSTLSRTEL

SEQ ID NO: 275969 - protein, 89 aa, Zea mays
  unsure (1)..(89): unsure at all Xaa locations
  Clone ID: MRT4577_183270C.1.pep
SVTRKPTIPSGGFLFLLTSPTCKDDLGAYTSFSSAPSSKYINASWWVNHIVTLARLIRISAEGPRVNVXSSAVSSAPTADVAESHAPAA

SEQ ID NO: 275970 - protein, 101 aa, Zea mays
  unsure (1)..(101): unsure at all Xaa locations
  Clone ID: MRT4577_183271C.1.pep
MGETLFFPLLKHPPLPTGFNSXGSPKDRPSERFSKLTGKRNAHCNAPLSAAXGRLXRVTPTVASSLAPALWPVPFAFFPTFAAFPRDSLSGGLNRGLPLRA

SEQ ID NO: 275971 - protein, 109 aa, Zea mays
  unsure (1)..(109): unsure at all Xaa locations
  Clone ID: MRT4577_183272C.1.pep
PPPAPPPPPPPPXPPRPPPPPPPPXPPXXPPPPPPPPPPXPPPXPXXPPPPPPXPAPPPPPXPPPPPXXPPXXXXXGGQPXPPXPQPXRPMAVVNNPQRLSCEAERPEI

SEQ ID NO: 275972 - protein, 112 aa, Zea mays
  Clone ID: MRT4577_183273C.1.pep
SVTHPTQPQPAPLDHHSSSSSDFLETGHHRRREKPYRGHVISEHEEESTVEEVVPLTENPPVENNFYFDIYGEEAATPTTQGKPQCIYLSLYFKVLSSLNVALGNKDCVINY

SEQ ID NO: 275973 - protein, 78 aa, Zea mays
  unsure (1)..(78): unsure at all Xaa locations
  Clone ID: MRT4577_183274C.1.pep
LPTRCLTAGFSHSPRALCATGDYSXTRGSSPAGAWWSRETVADVTVSNRGIGHALAARLAEHGLTVVLTVLHCERMEA

SEQ ID NO: 275974 - protein, 75 aa, Zea mays
  unsure (1)..(75): unsure at all Xaa locations
  Clone ID: MRT4577_183275C.1.pep
KLKRAGCLAYLGRRRYEGPSQKRTTLHLCIPHPSGLAYLIYLSFSRTSWSISLDVXASHPYSPRTWSTDCSYLLD

SEQ ID NO: 275975 - protein, 57 aa, Zea mays
  Clone ID: MRT4577_183276C.1.pep
VWQHRMLFILPTMAAKIVSLLMLLELLRTMLLQVTHFPAFASQASHMLFYLPSDLFT

SEQ ID NO: 275976 - protein, 120 aa, Zea mays
  unsure (1)..(120): unsure at all Xaa locations
  Clone ID: MRT4577_183277C.1.pep
RAVASCPPLLPVERRDRXRCPGLEDPKLLRINEEVPPAAAAGADPRRRTDGAGCRGRPSPPAPGTGGKEEELVLLHRRLHQSDHVQLQQQWSPSLTNSFLGMDPYIDDHLSLFDSTLCLN

SEQ ID NO: 275977 - protein, 71 aa, Zea mays
  Clone ID: MRT4577_183278C.1.pep
APVKGQFGPPNGPSKGPQRRAPVQKTPSEFSLKRGKVFIFNFFFFYFFFFYFFFFFFFFFFFFFFFFLKIM

SEQ ID NO: 275978 - protein, 177 aa, Zea mays
  unsure (1)..(177): unsure at all Xaa locations
  Clone ID: MRT4577_183279C.1.pep
GGGDHPVNMNIVCEVCGDIGYRQLLLCCGDCKRYAVHQYCLDKVVFDATLLEWFCYECLQRRGEVTCVASLEQVSSESPLSHAHFGPLVHQRTTKRVESVTGPYSPSDDCEELFSYPGIESIPSVQEISVDPIKTSSISEHDTIEAAASSERFTECQKASSCREXITVKMAMAPSSY

SEQ ID NO: 275979 - protein, 47 aa, Zea mays
  Clone ID: MRT4577_18327C.1.pep
SCLIRVRNNVLPLCLKRGRRQRSAIPKGGLGSPVPWLCYHHHQFFCF

SEQ ID NO: 275980 - protein, 134 aa, Zea mays
  Clone ID: MRT4577_183280C.1.pep
MDGAKPVAAGKQDLEEALLRIVQQHHHQSLCQRQQTERAKKDALKSAVRVADLLVDTVDGGVRELFVNEKRIELEARALLGTIARYRRQTDEWLAATSEINSALKEIGDIENWMKIMDFDCKSINAAIRNIHQS

SEQ ID NO: 275981 - protein, 117 aa, Zea mays
  Clone ID: MRT4577_183281C.1.pep
LVNIAYGCIDTFTIEVHDLHPVLDVSDFRFVVVGRGTGGGAAARYGAAPLPGPASRPPLAWLRPSRKSEISSRWMVSSAGGAAEGRGAAPQRWPPSRLSPDLAVWEANPRVRKRWVD

SEQ ID NO: 275982 - protein, 117 aa, Zea mays
  Clone ID: MRT4577_183282C.1.pep
QHPHQSLCQRQQTERAKKDALKSAVRVAVLLVDTVDGGVRELFVNEKRIELEARALLGTIARYRRQTDEWLAATSEINSALKLSNSFIPSRFISPYARDPKASQRRSSPLARLRWRL

SEQ ID NO: 275983 - protein, 176 aa, Zea mays
  unsure (1)..(176): unsure at all Xaa locations
  Clone ID: MRT4577_183283C.1.pep
NESKPFFSNXKRGGGGRPANXAXEGNSXRXXTSPHGRRAQXXXXPAKXXXKPQXNEAXXXGKTCTEGDPFFFXXAXXAPXTHPNFCXXTRGGPQXHXXRGXERXRXEQHHNRXKHGRSRQGGXXAXSXXGXDKXATXXQEXXSXKGXEXSRQEXTXXRKXXKPXNTGRAXXTKPKG

SEQ ID NO: 275984 - protein, 169 aa, Zea mays
  unsure (1)..(169): unsure at all Xaa locations
  Clone ID: MRT4577_183284C.1.pep
MDGAKPVAAGKQDLEEALLRIVQQHHHQSLCQRQQTERAKKDALKSAVRVADLLVDTVDGGVRELFVNEKRIELEARALLGTIARYRRQTDEWLAATSEINSALKLINSFIPSRFISPVPNTVEFADWIGRTKQKKIRVXEIGDIENWMKIMDFDCKSINAAIRNIHQS

SEQ ID NO: 275985 - protein, 41 aa, Zea mays
  Clone ID: MRT4577_183285C.1.pep
AFSDALFIIQHYVLLPVQCVEYGNASTSERVRPLIRPSDKT

SEQ ID NO: 275986 - protein, 123 aa, Zea mays
  Clone ID: MRT4577_183286C.1.pep
KKDRTTGKICKYQMAFKKKEQRKRYLSWLKKTTRNDCLSGASWSQNYQERITADELIAVPFADVVRQFENEIQGPREGVVGGELLGSPVEEEKATAAALHYLPPGEDVVLVRDAGQEEIQAAD

SEQ ID NO: 275987 - protein, 83 aa, Zea mays
  Clone ID: MRT4577_183287C.1.pep
VLSLNPDFVFKCGGGAQRSFLAFGLEQLCNGPFLTCPLLPLKGTLLPSQLKNPRPKKKKKKKKKKKKKKKKKKKKKKKKKKKK

SEQ ID NO: 275988 - protein, 59 aa, Zea mays
  unsure (1)..(59): unsure at all Xaa locations
  Clone ID: MRT4577_183288C.1.pep
GVFSFCCQFVRPGSTQPADWVRPGLCSSSVRLCLPSPLLLPLILVGQRDAWVGGVXFRP

SEQ ID NO: 275989 - protein, 54 aa, Zea mays
  Clone ID: MRT4577_183289C.1.pep
IGIISNTIMSVNICPQLLVHLLKMCNWDSARKSDHISFGCRIGLIRKQIIPLHI

SEQ ID NO: 275990 - protein, 162 aa, Zea mays
  Clone ID: MRT4577_18328C.1.pep
GPSGSGKSTLLDSLSGGWQRNVVLTGKVLLNGKKRRLDNGIVAYVTQENVLLGTLTVRETVTYSALLRLPSSTRKAEVRRIVDETLDEMGLRECADRHIGTWHLRGISGGEKKRLSIALEILTRPRLLFLDEPTSGLDSAAAFSVVQTLRQLAVDGGRRLED

SEQ ID NO: 275991 - protein, 47 aa, Zea mays
  Clone ID: MRT4577_183290C.1.pep
LWVRGSPNSPLRELVGATLIFPGGEPPQARAFEKMFQLIYYNNYNAP

SEQ ID NO: 275992 - protein, 68 aa, Zea mays
  Clone ID: MRT4577_183291C.1.pep
LPHSGYRAGLLRCSAAAGHADFFTHLVRLIKDNANSDVENLFSGFSKTRENLSVVDELLTYCNLSDTD

SEQ ID NO: 275993 - protein, 161 aa, Zea mays
  Clone ID: MRT4577_183292C.1.pep
LTRGFDAVMHFAAVAYVGESTLEPLRYYHNITSNTLLILEAMASHGVQTLIYSSTCATYGEPDKMPITEATPQFPINPYGKAKKMAEDIIIDFSKSKGADMAVMILRYFNVIGSDPEGRLGEAPRPELREHGRISGACFDAALGVITGLKVKGTDSHRITS

SEQ ID NO: 275994 - protein, 139 aa, Zea mays
  unsure (1)..(139): unsure at all Xaa locations
  Clone ID: MRT4577_183293C.1.pep
MEVAPRPSHSHGSTNGYVRRCRDPFLQFELGLVNRVRFRNQFLAKRILDLALDPLTTIQREHVGAVNTIDIEEAEGRYLISGGGDGNVHVYDLDDSEREERRVIKSMVTTQGSQGHKGXISRVRWYPFDNGMFTTSSFD

SEQ ID NO: 275995 - protein, 164 aa, Zea mays
  unsure (1)..(164): unsure at all Xaa locations
  Clone ID: MRT4577_183294C.1.pep
MAAEAPVRATAAARSARRPAAAAAVVSASRLLLGYGPFLAPRFAAERAAVAGPAAGLCARPRKPRLSVVAMAGSDRQVPLHDYRNIGIMAHIDAGKTTTTERVLYYTGRNYKIGEVHEGTATMDWMEQDLERGITITSAATTAFWNXPRIHIIDTPGHXVDFTL

SEQ ID NO: 275996 - protein, 33 aa, Zea mays
  Clone ID: MRT4577_183295C.1.pep
LIGLGVLFIVKSSPTEDGNWGVSYILFMTQKIF

SEQ ID NO: 275997 - protein, 153 aa, Zea mays
  unsure (1)..(153): unsure at all Xaa locations
  Clone ID: MRT4577_183296C.1.pep
FGSSSGQLVPLGYHQAAERLRGDAARFTFPDNSXSRAPVDPGVDAKLXAICATIAGGWQSCKNSKGTSTGMPCNACTMEGAPASTRHRSSDEGSSCRFVSNYXMASSSPTPVVAPPVGAMGQLAFTPASCDKTKCFLLRMSTSYKIDWDALLS

SEQ ID NO: 275998 - protein, 207 aa, Zea mays
  Clone ID: MRT4577_183297C.1.pep
KKPPSPFSVACREGTIRVRVGHGDFLPRLPGHLFGSGQKGKVAHCLLAPRAVAKTKELVQRVPVDPVVALPPKVVVVVEPVKRQAEEFEPMLLLLPREGLLFSGAGGAPLNVDRGVGKHVVVAYGPGGGLIGLGVVLFFDFEGPPMRDGQEGKDQEEEPGGGLQSNHGCGLGKPTRLLGLPPQFFFFFFFFFFFFFFFFFFFFFLIF

SEQ ID NO: 275999 - protein, 240 aa, Zea mays
  Clone ID: MRT4577_183298C.1.pep
SNREMGKPVPSLLMLLLSRGRVPLNSPTRWLCIKPGLAFQSSGRQVLWCRLGCWIWGYLRSSSLLRHEDVLSVSKITVYRNAMNINRGKEKGGAAYRRRGRSGEGWGRLGETLAVTSRYGSASEVAGIARSTRAGGCPRRRRVYRPNHGELVQSEGMVSFTGYRSDRVRKESKDGGLVYPVHALRRGVLEGRAFERSRVLLPLLSKVKKTYRIFSCDFLKFNAKKAKNDLNGKPYLNLVY

SEQ ID NO: 276000 - protein, 105 aa, Zea mays
  Clone ID: MRT4577_183299C.1.pep
RESDVNAVAGCRSARSDGLHLMDYHEPAVGRERSLFECQHTDLIVVEWGEDKRRPDDRFLEWWLARLGQLSPRRQHQPRPLRSSQRRLTPQRRRSVLKMSTYVFY

SEQ ID NO: 276001 - protein, 46 aa, Zea mays
  Clone ID: MRT4577_18329C.1.pep
LHLLRTIYCLSSTDSSFSDTANVHLIKMFRETSPLLSHTHIIASAS

SEQ ID NO: 276002 - protein, 69 aa, Zea mays
  unsure (1)..(69): unsure at all Xaa locations
  Clone ID: MRT4577_1832C.1.pep
AKKNPVAYGEQQKRAPNPLALANVAAYQEQQHPQQLMPTLRRXGVVNPAVYLQLRSSSPPAVGXAPTYL

SEQ ID NO: 276003 - protein, 484 aa, Zea mays
  Clone ID: MRT4577_183300C.1.pep
MGKPVPSLLMLLLSRGRVPLDSPTRWQGGRPSYPSNHLLQRTCKNYATSKAEYTNTQLDLPGALRPHTHQPSPSIPCQQRGAHRLGVQCLTDPDWPSCSDRTCTHHNRNGRPRLRSREEGNLLPGSIRLCIKPGLAFQSSGRQVLWCRLGCWIWGYLLSSSLLRHEDVLSVSKITVYRNAMNINRGKEKGGAAYRRRGRSGEGWGRLGETLAVTSRYGSASEVAGIARSMRAGGCPRRRRVYRPNYGELAQSEGTVSITGSRNDCVHKESKDGGVAYPVHVLRRGYSGRQTFTSPPTNGLRTSSGERSLLHLHHGVTQTSRPIGVGRRGLVKRSMPLDHQSLAPEGHPAKANKHWMTRDHHHARFDCGYNVIIDIPGLAKFMAIPHYSYMILKMSGPQGIITMRADFQGAAECFRVAIQAALTTKPPTTSSVHANSKPEEDLTIPANKAQVVTSMRPTEETKRINLGFTDERKTAIISSSLDDK

SEQ ID NO: 276004 - protein, 131 aa, Zea mays
  Clone ID: MRT4577_183301C.1.pep
MDHHVKKATIPDSLTVKKQTEASSKALSHCGNDRKIGRYSSRKYDDWRSKRTPDHEESFPPEKQVEVAYEETKVIIPSKKITHNEQSGACRENRKNSCVEETKNVEYNYEQQTAAGMRFREGEDSDMSISP

SEQ ID NO: 276005 - protein, 54 aa, Zea mays
  Clone ID: MRT4577_183302C.1.pep
CKQGILICALLGLIYAVTIVPVLGGSYVVHIKRQLFPPYNSFIPYHFLCVVLTC

SEQ ID NO: 276006 - protein, 35 aa, Zea mays
  Clone ID: MRT4577_183303C.1.pep
ISISRIECLESVHRFLGFYRTSKVYHSKLPMSLYW

SEQ ID NO: 276007 - protein, 74 aa, Zea mays
  Clone ID: MRT4577_183304C.1.pep
VGGHRGGEERVMISCPRMISGRMNSLWMSSLRRRRKLRKRLKSFSSVRGRGMLVLWGGVWPCLCENLVVWVVRF

SEQ ID NO: 276008 - protein, 496 aa, Zea mays
  Clone ID: MRT4577_183305C.1.pep
MEQDALETKARSDPEKERMEEQINLAEDAKPVPRHLTFTPPSSPELYEASDNDSYDSDRSTRMADNNTNTPFRPPAASPNTGNQIFPPPMWDPQMWQAQGFDPTQGSTFSNPSFSHMINPTWSQGPNDPSACTFRTPWNPYFGMTNPGGPPTQTSFGQPQLVPPIPCPPVSTHVPNQTDPITFESKAEHSVQEVNSPTKPSDTPGTFRRTKEQNFKPDEDLLLCKTWLEISSDPVISTGQRKEGLWARIEKRYNELRGEFPLRLNRALSSRWDKIRAETGKFAGFYARVLWENQSGLTDNDKTSKAATLYATSQKKPFHFMHCWTRLKNEPKWDAMVHGSPWRGNAGTEPVRSLTPTGSVNEVHTDEGGSKGKRPLGRDSTKASRKKSMSSASQSTDYLSRIHDIQIARLKQSEEKTELKQQNIEFMKEVELKKLEVKSKEIEVQEKKLMMEDRKQKVEELNKLFAMDMDALPEELRVVYMAMRKGLIDFFINNPI

SEQ ID NO: 276009 - protein, 44 aa, Zea mays
  Clone ID: MRT4577_183306C.1.pep
KSLFYYELSLHLKISMLLFVLGSVSKNYMTICTLSNFLYSIMAG

SEQ ID NO: 276010 - protein, 239 aa, Zea mays
  unsure (1)..(239): unsure at all Xaa locations
  Clone ID: MRT4577_183307C.1.pep
PAPVAMAEITPVATCAFLLVFCVCCHLPPPAASLFFNYSTFSSQDQKDFRIEGDASFSVGWIDVSANKFAGIGNSAGRVSYNAQPMLLWDKATGQVASFTTRFSFAIGIPNINNKGKGMTFFLAGYPSVLPYDSYGFDLGLTNQSTSASATGDNRFVAVEFDTFNDTQVSDPDATYDHXGIDXNSVRSVVTKSLPSFSLMGNMTALIRYDNVFQPSVLDAMGSAMGEAGITALGSRLTS

SEQ ID NO: 276011 - protein, 56 aa, Zea mays
  Clone ID: MRT4577_183308C.1.pep
HDDPHLPPGEEWAEALPERESHGHPRSPSFSPALGGSARSARRNWGSEARIWYPGP

SEQ ID NO: 276012 - protein, 116 aa, Zea mays
  unsure (1)..(116): unsure at all Xaa locations
  Clone ID: MRT4577_183309C.1.pep
VKYMACCLIYFGDAAPKDGNAAVSTIKTKRTIQFVDWCPTGFKCGINYQPTSVVPGGDLAKVQRAARMIFNYTNVVEVFFRIYHKFYLMYAKRAFVHXYVSDGMEEGEFSFAREDL

SEQ ID NO: 276013 - protein, 64 aa, Zea mays
  Clone ID: MRT4577_18330C.1.pep
GGSPKKMVPLPPFLRAIIHIGVLWANKLFLRRFPPFPFHFPPNLLEITVGGPHVTKKKKNRYTK

SEQ ID NO: 276014 - protein, 43 aa, Zea mays
  Clone ID: MRT4577_183310C.1.pep
SNSSCGAGYRTDDKTQLTEEPVYQEQWDSVGQPMLRMPKNSVM

SEQ ID NO: 276015 - protein, 78 aa, Zea mays
  unsure (1)..(78): unsure at all Xaa locations
  Clone ID: MRT4577_183311C.1.pep
VKVSPEKDICQVVLVASPAKNXMRVQEFRDRAGVMLTRKVGISVSMRPANPIGYFKNVPLPVCDALLKQLDXDDDDDQ

SEQ ID NO: 276016 - protein, 145 aa, Zea mays
  unsure (1)..(145): unsure at all Xaa locations
  Clone ID: MRT4577_183312C.1.pep
ALQATEEDISLLLQAHSHIGTKNVEKKRTPYVWKRRQDGVNVINVGKTWEKIVFAARVIAAIENPNDVCVISARPYGHRAVLKFAANTGAQAIAGRFTSGNFTNYITKSFKEPRXIVVTDPRVDHQTIREASYVNIPVIAICDTD

SEQ ID NO: 276017 - protein, 39 aa, Zea mays
  Clone ID: MRT4577_183313C.1.pep
MVFFFFKKKKKKKKKKKKKKKKKKKKKKKKKKKKKKKAA

SEQ ID NO: 276018 - protein, 88 aa, Zea mays
  Clone ID: MRT4577_183314C.1.pep
VPSLLRYLVTNPMHHSSLPIVHHSSQIPVFPQISQQHRREASHCGQPISEHEEETMVEKEVVSQAENSPAENNFYFDIYRVDPEPPAT

SEQ ID NO: 276019 - protein, 94 aa, Zea mays
  Clone ID: MRT4577_183315C.1.pep
AVSIEAIRHGWSILQLPLAKCSTDLMLCLGPLWTAGSAAHGDPSVKQEAQPIWRWYRDHPTALRRRRRSIYAAQSSAMTSRLLSWLLHDGYSGR

SEQ ID NO: 276020 - protein, 110 aa, Zea mays
  Clone ID: MRT4577_183316C.1.pep
APPKLQPYGTGIPKRFHSVKPWENPAYSPCRPFPLKPLSEYRKKQERTPFAKFDQPCCRILSPLDPPFNPTLSGGFAKVKPTISLTFFPPFFAFFSFFSRQFLKICPPFS

SEQ ID NO: 276021 - protein, 695 aa, Zea mays
  unsure (1)..(695): unsure at all Xaa locations
  Clone ID: MRT4577_183317C.1.pep
RISRLKSVFGSDTEXPWDQIXGLILKDDKDIFEDWMEEAFVRRMKDIVHSEFDILGSSVNVKESIHAIGANADPKDAGDFLAYLRKSSKGGGFWFSESKIKKGGVLAHLKPIADENDFRSCLTSYFGPEVSRIRSAIDSKCKNILEDLLSFVESHNSTTRLKELVPYLQEKCYRTISGVLKELEAELRKLSALLGTKKEGNDIPAASIIAERSLFIGRLLFALRYYSSHVPLILGSPREWVEEAGGAAFARLSSPTPRHSRASFDSLVPFTSRRRTFDSPKSPGRQFSDSPRRQTIAAAVSLFGADDRSNPRLDELNKTMQSLCIMAHNVWITWVSTELSHILSYDISKDDSLSSSTPLRGWEVTVIKQDETTEGPLEMQIALPSMPSLYIISFLYQACLEIHKVGGHILDRIILHNFAWELLQKVVNIYEKFLSCVESGNSTVSEKGILQILLDLRFVGDVLSGGKSSSTNSPEMQTKQDFLPSAVTKTSFRRKQSQLQADSAVIEPINKLVNRLSQRLDPIDWATYEPYLWENEKQSYKRYVVLFGFLVQLNHKYTSTVQKLPTKSNTDSNIMRCSQVPRFKYLPISAPAISSRSHKSSLQSLSSESTSKNPWKSYSNGDGSTTPDFDDNASLVGAAPLLKSFVTQVGSKFGENTSRWGSMLSDGQVGKLSDILPGPAAGFFSSFTSGARYDS

SEQ ID NO: 276022 - protein, 171 aa, Zea mays
  Clone ID: MRT4577_183318C.1.pep
FPLVRTTATTTSAVSSPPAVLSVGHALRERRRFTEDDVAAYAAVSGDRNPVHLDDAVARELSGFQRGRVVHGMLVASLFPSVIAASFPGAVYASQTLKFAAPVYVGDEVVARVKALNIRMIGATNCSTTSRYLVKFATKCFMDKEEGLVAIEGEAMAVLPTLELSSQSTSN

SEQ ID NO: 276023 - protein, 397 aa, Zea mays
  unsure (1)..(397): unsure at all Xaa locations
  Clone ID: MRT4577_183319C.1.pep
EDLLSFVESHNSTTRLKELVPYLQXXKCYKTISGVLKELEAELRKLSALLGTKKEGNDIPAASIIAERSLFIGRLLFALRYHSSHVPLILGSPREWVKEVGGAAFARLSSPTARHLRASFTPRRHTFDSPKSPGRQFSDSPRRQTIAAAVSLFGANDRSNPRLDELNKTLQSLCIMAHNVWITWVSTELSHILSYDLNKDDSLSSATPLRXRILIAIVVWFGCIXGWEVTVIKQEETTEGSLEMQIALPSMPSLYIISFLYQACLEIHKVGGHILDRIILHNFAWELLQKVINIYENFLSSVESGNSPVSEKGILQILLDLRXFIGDVLSGGTSSSTNTTEMQIKQDSLPSTITKTSFRRKQSQLXADSAVIEPINKLVNRLSQILDPIDWGTYEPL

SEQ ID NO: 276024 - protein, 196 aa, Zea mays
  unsure (1)..(196): unsure at all Xaa locations
  Clone ID: MRT4577_18331C.1.pep
PNKNKSRGKHSCFKCSKTGHFIAQCPDNENDQXRKAWEGEKKNYRKAKGEAHLGKEWDSDCYSSNSDDEGLAALAFDKSSFFPNERHTCLMAKKKKVCIRDTPKYTSSSXEESSDDEVDYTNLFKGLDRTKVDKINELIDALNEKDRLLEKQEDIFYEEHDKFISVQKSLALXIKRNEMLCFELSTYHESISSLKN

SEQ ID NO: 276025 - protein, 116 aa, Zea mays
  Clone ID: MRT4577_183320C.1.pep
QARRHAELAEQELASAKRMRRQAQVELSRAHALREHAVRQVNATLLQITCLGCRHKFRARPQLLDAALGAPEVTCSYMSSVVTEGGDAEADDEPPLDGRDGMLQRRRHAMAMDVIL

SEQ ID NO: 276026 - protein, 100 aa, Zea mays
  Clone ID: MRT4577_183321C.1.pep
PTHPKVSKLLPPLSPIPLLLNLTGHFKHLRRLLIINTTSTSITYFPSPPSTNLSTMPSPPTSISSTPTTSHTSTHIPLSTSTFIPTTSRTTFSTLSRTLT

SEQ ID NO: 276027 - protein, 95 aa, Zea mays
  Clone ID: MRT4577_183322C.1.pep
PAGAVAGASLSFWARASCSGFLWPSSFWVVSRVPGTLRLRLRVAGGSSASKALLGNLRARPPMAVQWRLPVCWSSAQISWRVGRTSLALPLTSVV

SEQ ID NO: 276028 - protein, 128 aa, Zea mays
  unsure (1)..(128): unsure at all Xaa locations
  Clone ID: MRT4577_183323C.1.pep
RRXRGRLGRXXTPAPSAXSAPRHRAMKHQHLPAGXPGTAGGEGEIFFFXAGAXEEGGRRAAAPPPPFHYTRGHFPGALDRLGRTYSTSLPQLRTRHVRCRGCPCFPWWGGRARWSGPRGGGAVWWXLV

SEQ ID NO: 276029 - protein, 156 aa, Zea mays
  Clone ID: MRT4577_183324C.1.pep
MERKGGCCLAPRYAATAAAQQAGAAWQMGRIMLKFRPIAPKPAAMAPAPAPASAPVTGSAAGAGRGKRKAACGGGGRRGRKPKKAAKVAMVTAAPAATAAAQDVGDCREHCDKEKSSSSPSSSSSGTSSVDSSPPPRPQQRQLATLPLMPVTAAGG

SEQ ID NO: 276030 - protein, 79 aa, Zea mays
  Clone ID: MRT4577_183325C.1.pep
RLAMVTFISISTGAMSFSSKTSLLFTCCTDISSPLMFSAVCFSIFLCRVCVTHVIKSVFALSYCPHPVTSHLPLCKMIL

SEQ ID NO: 276031 - protein, 157 aa, Zea mays
  Clone ID: MRT4577_183326C.1.pep
GSLKKGRSAQGVGRGAPVFLPPVLGSLPAGVFGLPGNPPRGPKKGGFFPGPGFLPLPKEGGLGKFLAGVPFAPGGVLPHIPLGFPPKKGAEKGAKGPQRAPRSPQRGGGVSLFLTHFPLCLGAVWLGLVWGGPPMFLSPPPFGRVFLGPPGPFLVFC

SEQ ID NO: 276032 - protein, 75 aa, Zea mays
  Clone ID: MRT4577_183327C.1.pep
SFFLLLYSTLLHHIITTKPFIYSIFSNLQFILPPFTSSTYFNFSPPSHTLLFPLFLTIHILYYIKTTYYIQHLYS

SEQ ID NO: 276033 - protein, 184 aa, Zea mays
  unsure (1)..(184): unsure at all Xaa locations
  Clone ID: MRT4577_183328C.1.pep
CGRGRCAPGISVAALALLAVAAAAGAAAGDPDPDDLERAFPIVEPDHRHTKLRLSEQGLEAIRRIETPIAVVGVIGPYRSGKSFLLNQLLSLSCDKGFGVGHMRDTKTKGIWIWGTPVEMDVDGSKVSVLYLDTEGFESVXKSNVYDDRIFALATVLSSVLIYNLPETXREADISRLSFAVEIA

SEQ ID NO: 276034 - protein, 94 aa, Zea mays
  Clone ID: MRT4577_183329C.1.pep
HGPELGLRDLRNRIDGVHRPLGEFCDCHQDHLDVVRLAEQVLLSRCRVLCALSDFCDVSSFFHGALWSLLVCIHVRFSSLRHHGILHSRTGPLQ

SEQ ID NO: 276035 - protein, 188 aa, Zea mays
  unsure (1)..(188): unsure at all Xaa locations
  Clone ID: MRT4577_18332C.1.pep
IRHEGPLSSLHGASTQHFASIQHLSTGILLCQRELRRARCPLQLCHPQESEDDGSPSRGAFIMLPPFGNPLWVPEDMDDQQQHAPPPTPMELLTVPAQGHEEQNLLALASAAAAAGAGCVFSSPAMLDDDWYFDPVAAAAATGAQGHLLLAPXXAGARPRRRLADVLPLQRWRRRDVRRPWVRHWPRH

SEQ ID NO: 276036 - protein, 85 aa, Zea mays
  unsure (1)..(85): unsure at all Xaa locations
  Clone ID: MRT4577_183330C.1.pep
RVCXGCRVARFLLLLRGGRLPVAPVVVALSCGARGSPVCVXSCSWGRAAPALRWPRPGSSCLSGPCLCFKTXGLGRPLSGFRAYV

SEQ ID NO: 276037 - protein, 516 aa, Zea mays
  unsure (1)..(516): unsure at all Xaa locations
  Clone ID: MRT4577_183331C.1.pep
MDRLTVMAPPLLVLLLLLLSRCSAAAPRRGGGWWEEGEGEWRPSEEEEKGKGKGRGLFLLHRVEKVVESEGGGGGRPAVAAGVLRLXEGLMHIGFITMEPKTLFVPQYLDSSITLFVQRGEAKVGYIHKDELVERKLKMGDVLHIDAGSTFYMVNPGKGQRLQIICSVDASDSLGFGPPYQAFFLGGAGDPASVIAGFGPKTLTRAFNATYDELARILLPRTGGPIVYYTADAEXRAVPPKRSAGRSTGTTVCWTGERDARALARGCRVAGETEXECGGSDDARVATWWWTKLVNRVVGGXLAAASPRRRTGRARXGGAPEPYNLYDSEPGFRNAYGWTVSVDKHQYEPLKHPDIGVYLVNLTAGSMLAPHVNPRATEYGVVLGGEGTVQVVFPNGSLAMSEVVRPGDVFWIPRYFPFCQVAARAGPFEFFGFTTSARRNRPQFLVGASSVLRTMLGPEIAAAFGAREKEFSKLVRAQREALIMPSSPGKEEEEHGKKGREKEESLPMVVEQAAAE

SEQ ID NO: 276038 - protein, 89 aa, Zea mays
  Clone ID: MRT4577_183332C.1.pep
VRNMVTTAATASWYERPRSKRTSTPAPATSTSAWRASSPGRGDPPCGRHLGGFVLACLPYVCLWLTGCSRSSYLAILPARTHLLYELRP

SEQ ID NO: 276039 - protein, 52 aa, Zea mays
  Clone ID: MRT4577_183333C.1.pep
SPRGHPSNLRRWHMSQTRELNNGDLVSVKGHNTSFRNTEETCAPQVKGSVRQ

SEQ ID NO: 276040 - protein, 71 aa, Zea mays
  Clone ID: MRT4577_183334C.1.pep
RNRGSHFILAQFLLYNLNTNDAQRDDNPAPSTNKPAPVKFIFSRARWLRRRIDSIIWICDHIMSLLGPILG

SEQ ID NO: 276041 - protein, 115 aa, Zea mays
  Clone ID: MRT4577_183335C.1.pep
SADSGDQKSQSTQHVAKGLLRRSADRGAPSGIEVGGPWLGCLPPGGGRSRCRSRWYFPACPSHRRSRGRRSTCEASAGRRAPPDRRRSNIHATEAMGGPLVVSNGEGAWFVPESV

SEQ ID NO: 276042 - protein, 142 aa, Zea mays
  unsure (1)..(142): unsure at all Xaa locations
  Clone ID: MRT4577_183336C.1.pep
MNQLLDTNPETRITVAQIMXESRWFKKGFRPVRFYVEDDQVHSLADSEAEALEELGPSDSEPSPPPPPPPPPPPPQKEDDGDDSGWESDSSVASCPATLSSEERRRPVGSLPRPVSLNAFDIISFSRGFNLSGLFEERGNEV

SEQ ID NO: 276043 - protein, 88 aa, Zea mays
  Clone ID: MRT4577_183337C.1.pep
TVKSVFHFVCCFKISFRARGIWGGPPFFWGQNLGAPFEGPFWDNPPVVPSLGWPKKKKKKKKKKKKKKKKKKKKKKKKKKKKKPGGRY

SEQ ID NO: 276044 - protein, 101 aa, Zea mays
  unsure (1)..(101): unsure at all Xaa locations
  Clone ID: MRT4577_183338C.1.pep
KGGQKKGTTGGPTPNPKGERALTRGQKPTGPPTFKRKKKPXPKPGGAQKXPLNPRPRRGXPQKKPLGQTGKPQPXVGGGTTLGPNGVNPTGGXPPEGGPQK

SEQ ID NO: 276045 - protein, 46 aa, Zea mays
  Clone ID: MRT4577_183339C.1.pep
DGLLIQTTNNIVSTPWLAGRRNRKCFFFFAFPLLHFIFPTVMIFVC

SEQ ID NO: 276046 - protein, 45 aa, Zea mays
  Clone ID: MRT4577_18333C.1.pep
WLTHLDRADQLLLPNKRIQLVLGHLLLLTMACQELKLCVTGSINA

SEQ ID NO: 276047 - protein, 80 aa, Zea mays
  unsure (1)..(80): unsure at all Xaa locations
  Clone ID: MRT4577_183340C.1.pep
MAPPSSCYPLHPHQHPPPKNIHHQFQSLPASIPAPPXXALSKSLDLQVTVTFRNHFXNPNLRLRNLRAYIATYLNLSSQS

SEQ ID NO: 276048 - protein, 237 aa, Zea mays
  Clone ID: MRT4577_183341C.1.pep
MSMASRPPLRRRRRLPLVPLLVLLCLSPACAAGRVPVSVYYEALCPFCSAFVVNDLSRVFRDGISSIAELRLVPFGNGRVSADGTVTCQHGEDECQLNAIEACVIRIWPDAEQHFPFIQCVEHLALTRKWDAWPSCFHETGLAYQPAIDCYISGYGRQLVLQYAAETNALQPPHRFVPWVVVNGKPLGDDYMNFEAYICSAYDGNLPKACKGKHLAIAQETKASRGDKVCPASKTIS

SEQ ID NO: 276049 - protein, 396 aa, Zea mays
  Clone ID: MRT4577_183342C.1.pep
MGAGAEVMHQVVPLLEPPLHRCVVKSVDVMEEVVAVAPGQVQPATSPKALLEVAVEVPDLELKRSSNAGSSVSAEQLQFVPIIRSGSFADIGPRRFMEDEHIRIDDLSGHLGSLLMVSAPSAFYGVFDGHGGSDAAAYMKTHAMRLFFEDADFPQASQEDKIFAESVEDSVRRAFLRADLALADDSVINRSSGTTALTALVLGRQLLVANAGDCRAVLCRKGTAVEVSKDHRPTYDAERQRVIECGGYIEDGYLNGVLSVTRALGDWDMKLPQGSPSPLIAEPEIHWTTLTEDDEFLIIGCDGIWDVMSSQHAVSTVRKGLRRHDDPGRSAQELAMEAKRLETFDNLTVIVVCFVPDLAGGSATPSEQVPAGRIRCRKSLSPEALCKLRRWLESDQ

SEQ ID NO: 276050 - protein, 143 aa, Zea mays
  Clone ID: MRT4577_183343C.1.pep
CHGKKPPPLMALEGPPTPLPIPSAPLLSLPSLYKCQSRHGALSSLPELAPSLSLSLLAHAIAGARPRHRRSFVDHATPAGAARRHAPALLHSADPPSNSPPSHEQAQEVDCEVDEPNMVEDDPQETFEQEGDAEDIDGDFDEY

SEQ ID NO: 276051 - protein, 155 aa, Zea mays
  Clone ID: MRT4577_183344C.1.pep
MEKTELIQKAKLAEQAERYDDMATCMKAVTEQGAELSNEERNLLSVAYKNVVGGRRSAWRVISSIEQKTDTSDKKLQLIKDYREKVESELRSICTTVLELVDKCLIANATNPESKVFYLKMKGDYLRYLAEGACGDDRKRTMENWRGAYQEAFGV

SEQ ID NO: 276052 - protein, 57 aa, Zea mays
  Clone ID: MRT4577_183345C.1.pep
KRSLSLLTSLITNNNKTGTERFYFTWILNQTLPYLTTKPKFFPKKKSIFSAPTHNFY

SEQ ID NO: 276053 - protein, 170 aa, Zea mays
  unsure (1)..(170): unsure at all Xaa locations
  Clone ID: MRT4577_183346C.1.pep
FQGVWKGPRFPSNKPPLALFSKLXNFPKALNFRIRKKGPPPVFFQGGKPGGNGVLPFSPPIFWVPPSCPFVQMKQTRGGFFWAPKLLEKGLRPGLKDVVWAWHGNFFPPKLGELPMSPVDFVNPSPPFFLAPPFSFLDWGGNEPLGFVFLTQNCLGAELLCSLFKIVPVL

SEQ ID NO: 276054 - protein, 532 aa, Zea mays
  Clone ID: MRT4577_183347C.1.pep
MMLLGFISLLLAATSSFISGICIDSKYYNSRFSPCTKEEVQESINAEHAIAHARKHLLEVILHHSPRRNLKTSYHNHEGCREGYESFVSHEGLEQLHRFIFVMAVTHVTYSCLTMLLAILKIHKWRKWEDEAFRDNHESFSQIAYESATRRQPALTKSYSFRSWSQNNVVMWLVCFIAQFGQSVVRADYLILRKGFIMTHNLPPTYDFHNYMIRSMEEEFEKIVGVSGLLWGFVVAFMLFNVDGSNLYFWIAILPVTLVLLVGAKLQHVIATLTAEGAKMSTYGPRIQPRDDLFWFKKPEFLLWLIHFVLFQNAFELASFFWFWWQFGYDSCFIKNHLLVYCRLILGFAGQFLCSYSTLPVYALVTQMGSKYKAALIPRRIRETIHGWGKATRKKRRRRRGDDSTVRTETSTVCSLTDDDEDFEDDHHHHHHGPSYETPRAGGRPPYLKIETHRQSGSGHDGPRPGGTPCFHPSGSGSGHAMLLRQASVSAPSSPSYRGGNNVTRSASMPGIAALRTTGSGTPTRVSHEEPT

SEQ ID NO: 276055 - protein, 25 aa, Zea mays
  Clone ID: MRT4577_183349C.1.pep
RSATPASNTVRPIYTYRLQWQQANI

SEQ ID NO: 276056 - protein, 39 aa, Zea mays
  Clone ID: MRT4577_18334C.1.pep
GQMLGSPNGANIKVITSACERGISVKAPKMAYQRDYPMK

SEQ ID NO: 276057 - protein, 156 aa, Zea mays
  Clone ID: MRT4577_183350C.1.pep
MLLLLCRVDVMCGILVGLGCSHWAQAKRARILVWSGRVKHRGPDWWCLYHDDGNFLAQQRLADCSPLSGDQLLFNEDRTDVVVVNGEIYNHKNVRKQFAGTHDYRRCSDCGVIMPLHDNYSENFENMMDRPFVFVLYHIRDRTNGVESDAIVDEPL

SEQ ID NO: 276058 - protein, 45 aa, Zea mays
  Clone ID: MRT4577_183351C.1.pep
ENKLLPQDSKRQVTILIVHHSNYPLLHQCIRKRITKDLSLVKANL

SEQ ID NO: 276059 - protein, 507 aa, Zea mays
  Clone ID: MRT4577_183352C.1.pep
MKGLLLGVFLSTEGPQDEEITYEQLACVPKLQQAHEKHQRITTSAHGGYEDLFFITFVRELSSPKGFDTSEDEGPRGALPLAIRPQEERPHGGRVRRGAGHVPYGQGPHGNGFDSYFSSGQQFPSCGDRFPSRSGMSGLPKLKFEKDLVCHPCRHSKMVAASHSPVTKAKDETFTHARDLILRLQNEFPKNAIRAIHSDNATEFKNTHFETFCVALGLEHQFSSLYVPQQNGIIERKNSTLVEMARTMLDEHRAPRCFVLKQENLDKFDSRSSDGVFQGYALHSRAYRVLNLETNRIMETCVVTFDETAPCTSPVFEPIGPDQMGHTIFVEEEHDDDDWGFKMGLADKTLFLLKHDSDTLLVEIYVDDIIFSGSSHALVSKFLDLMSREFEMSMIGDLNFFLGLQIKQTQDVTFLHQGKYTKDILKKFDMGEAKPLSTPMSTTMALDADEDGKLVDQKEYMSMIGSLLYLIATRPVIHFADLESLEALNVSWNGLLALVLSVNEWTV

SEQ ID NO: 276060 - protein, 52 aa, Zea mays
  Clone ID: MRT4577_183353C.1.pep
APAPALMVIVWRAKGLAVKGSNKSSAQAAARPATGHGPAALILGRCPVSACS

SEQ ID NO: 276061 - protein, 161 aa, Zea mays
  Clone ID: MRT4577_183354C.1.pep
GGFPMWRTRAASVRTEGSSSRRTRPGTARGARASRPPSAHARTGSRWETITRRGGSAPAADVATPGLATDMSRGRRSGVGDGRATSSTAARSRRLWQEIEGIAPSSSCLSVDVAEVEAATMAHEEARREAPRRDESVGFDRRSGVGDDRKLLGIRTARGVS

SEQ ID NO: 276062 - protein, 71 aa, Zea mays
  Clone ID: MRT4577_183355C.1.pep
QTFGLSLCWQLRRMWGRGLLHASNMITLFFPFRLAVQGMFHEHQLKLITEAILVMMRVPQGLDLHGLHCHH

SEQ ID NO: 276063 - protein, 138 aa, Zea mays
  unsure (1)..(138): unsure at all Xaa locations
  Clone ID: MRT4577_183356C.1.pep
MGGRETNDPNEPLKGKGKYRGKRRSGKKKKKKPRARTPPRGKNGKKKDKGGGLGAHIKGPQFPKKGGKKKYRGGXKKREKEKTGEKKKKGEEKKNPFCRGGKKEKSXTRGAFQKRFTPKRKRGPPVKEKKNRGGGGGN

SEQ ID NO: 276064 - protein, 65 aa, Zea mays
  Clone ID: MRT4577_183357C.1.pep
LMLHICLLDYAFVQRPFSVLCATWAVAQLCIKLHHIWIERSRSSWHRFCGPPHPIKWAPAANQTK

SEQ ID NO: 276065 - protein, 54 aa, Zea mays
  Clone ID: MRT4577_183358C.1.pep
LLTQPHVRVHAHFHTIFLPIGNFATGFLVLLSLIAGVVGIACAMVGYNHLRFWN

SEQ ID NO: 276066 - protein, 74 aa, Zea mays
  Clone ID: MRT4577_183359C.1.pep
HTYWHFSSFLDEQHNEGTVITLKAKPNKYTANDIALKIHSSSTNLYCLYAPHADLTDAIQRRSCEAFVPLLTHP

SEQ ID NO: 276067 - protein, 98 aa, Zea mays
  Clone ID: MRT4577_18335C.1.pep
MAISISHRHDNMARANHTVRTSTQCNAPYKQVATNAQRKSAPTTCDDKKPHTYRPSTVALREIRKYQKSTELLILKLPFQRLDHEIAHDFKTDLQVQS

SEQ ID NO: 276068 - protein, 1260 aa, Zea mays
  unsure (1)..(1260): unsure at all Xaa locations
  Clone ID: MRT4577_183360C.1.pep
AAAVVLAVNGKRYEAAGVDPSTTLLEFLRTHTPVRGPKLGCGEGGCGACVVLVSKYDPATDEVTEFSASSAXCSVTTSEGIGNTKDGYHPVQQRLSGFHASQCGFCTPGMCMSIFSALVKADKAANRPAPPAGFSKLTSSEAEKAVSGNLCRCTGYRPIVDACKSFAADVDLEDLGLNCFWXGDEPAXVSKTGSGVYKDQDLYDKYIDIKGIPELSVINRSGKGIELGSVVSISKAIEVLSDGNLVFKKIAGHLNKVASPFVRNTATIGGNIVMAQRLPFASDIATILLAAGSTVXASKRLCFTLDXCDSRTLLLSIXIPEWGXNDVTFETFRAAPRPLGNAVSYVNSAFLARTSLDAASKDHLIEDICLAFGAYGADHAIRARKVEDYLKGKTVSSSVILEAVRLLKGSIKPSEGSTHPEYRISLAVSFLFTFLSSLANSLNESAKVXGNGTNEHSPEKHLKLDSNDLPIRSRQEIFFTDEYKPVGKPIKKAGAEIQASGEAVYVDDIPAPKDCLYGAFIYSTHPHAHVKAINFKSSLASQKVITVITAKDIPSGGQNIGSTFPMMGDEALFADPVTEFAGQNIGVVIAETQKYAYMAAKQAIIEYSTENLQPPILTIEDAIQRNSYFQVPPFVAPKPVGDYNKGMAEADQKILSAEVKLESQYYFYMETQVALAIPDEDNCITIYSSTQIPEVTQNVVAKCLGIPFHNVRLITRRVGGGFGGKAMKAIHVACACAVAAFKLRRPVRMYLDRKTDMIMAGGRHPMKVKYSVGFKSDGKITALHIDLGINAGISPDVSPMLPPAIIGALKKYNWGNLAFDTKVCKTNVSSKSAMRGPGDVQGSFIAEAIIEHVASALSVDTNTIRRKNLHDFESLVVFFEDAAGEASTYSLVTMFDKLASSPEYQRRAAMVEHFNRSNKWKKRGISCVPVTYEVNLRPTPGKVSIMNDGSIAVEVGGVEIGQGLWTKVKQMTAFGLGQLCPDGGESLLDKVRVIQADTLSMIQGGITGGSTTSETSCEAVRQSCVALVERLKPIKENLEAKSGTVEWSALIAQASMASVNLSAHAYWTPDPTFTSYLNYGAGISEVEIDVLTGATTILRSDLVYDCGQSLNPAVDLGQVEGAFIQGVGFFTNEEYTTNSEGLVIHDGTWTYKIPTVDTIPKQLNVELINSARDQKRVLSSKASGEPPLLLAASVHCAMREAIRAARKEFSVCTGPANSAITFEMDVPATMPIVKELCGLDVVERYLESMSTAGPTTTAKA

SEQ ID NO: 276069 - protein, 80 aa, Zea mays
  Clone ID: MRT4577_183361C.1.pep
ARPRVVDKSEADDGIRTGTAVYEEYATNSDGLVIHDGTWTYKIPTVDTIPKQFNVELINSARDQKRVLSSKGEPGPEKTS

SEQ ID NO: 276070 - protein, 56 aa, Zea mays
  Clone ID: MRT4577_183362C.1.pep
TPKKRAKVIQRTVNFVCPGTWLCDLTLERYEVREKKVSKKRPRGLKAMHDMDSDSE

SEQ ID NO: 276071 - protein, 122 aa, Zea mays
  Clone ID: MRT4577_183363C.1.pep
SDGLVIHDGTWTYKIPTVDTIPKQFNVELINSARDQKRVLSSKASGEPPLLLASSVHCAMREAIRAARKEFSVCTGPANSAITFQMDVPATMPVVKELCGLDVVERYLESVSAASPTNTAKA

SEQ ID NO: 276072 - protein, 104 aa, Zea mays
  Clone ID: MRT4577_183364C.1.pep
KTPNFFCKNLGGVLLLFWGLFFNFRWPRKKGNNWGGGLPKNWGGGFKKILGLGQKEILGIQPSFFFQGKILKKNGVVLPGKKFFLDRWGNTYQVKFIKTLLPPP

SEQ ID NO: 276073 - protein, 186 aa, Zea mays
  unsure (1)..(186): unsure at all Xaa locations
  Clone ID: MRT4577_183365C.1.pep
QVRVIQADTLSMIQGGVTGGSTTSEXSCEAVRKSCVALVERLKPIKENLEAKTGTVEWSALIAQXDKLCKFQFSHCHAKNNISLFKTLPPSFESLTNDKQXVVIKGGDPTVLRNTVFVSTSIGHVILLITXASMASVNLSAHAYWTPDPTFTSYLNYGAGTSEVEIDVLTGATTILRSDLVXDCGQ

SEQ ID NO: 276074 - protein, 91 aa, Zea mays
  unsure (1)..(91): unsure at all Xaa locations
  Clone ID: MRT4577_183366C.1.pep
SEPITETNDDITPLLFAVIVGSSFPCLKILIQAGANPNMRAGGATPLHVAVGSASIEVIRLLXSIEVIRLLLEAGADPNTCSDVSCIFHVN

SEQ ID NO: 276075 - protein, 340 aa, Zea mays
  unsure (1)..(340): unsure at all Xaa locations
  Clone ID: MRT4577_183367C.1.pep
AGHLNKVASPFVRNTATIGGNIVMAQRLPFASDIATILLAAGSTVTIQVASKRLCFTLEEFLQQPPCDSRTLLLSIFIPEXGSNDVTFETFRAAPRPLGNAVSYVNSAFLARTSLDAASKDHLIEDICLAFGAYGADHAIRARKVEDYLKGKTVSSSVILEAVRLLKGSIKPSEGSTHPEYRISLAVSFLFTFLSSLANNESTKVNGPNGSCSNGATNGALEHSPEKHLKFDSNDLPIQSRQEIFLTDEYKPVGKPIKKAGAEIQASGEAVYVDDIPAPKDCLYGAFIYSTHPHAHVKAINXKSSLASXEVITVITXKDIPSGGQNIGSTFPMMGDEALF

SEQ ID NO: 276076 - protein, 84 aa, Zea mays
  unsure (1)..(84): unsure at all Xaa locations
  Clone ID: MRT4577_183368C.1.pep
KQLFVLLKKLAASGXFTRVKSSWKLLATDSKPKAAKPKAPKAAPKPKLSAKAKAKTAANPKAVLPKPKANANVKPVASADLFPK

SEQ ID NO: 276077 - protein, 607 aa, Zea mays
  unsure (1)..(607): unsure at all Xaa locations
  Clone ID: MRT4577_183369C.1.pep
TLALCFNHVNYYVDLPKEMXNHSLIEVALLMLSDLTGTVGVRVLGKLTFFSGAGRRTTSGALAGRKTSGAIEGDITLSGYPKKQETFARISGYCEQTDIHSPNVTVFESITYSAWLRLSSDIDDGTKKMFXVEEVMTLVELDVLRDALVGLPGVSGLSTEQRKRLTIAXVELVANPSITRMDELGIRLDARAAAIVMRTVRNTVNTGRTVVCTIHQPSIDIFESFDELLLLKRGGQVIYAGELGRHSHKLVEYFEAIPGVPKITEGYNPATWVLEVSSPLSEARLNMNFAEIYASSVLYRKNQEVIKELSIPRSDNQDLSFPTKYSQNFYGQCAANFWKQYRSYWKNPPYNAMRYLMTCLFGLVFGTVFWQKGKNIDSQQDLYNLLGATYAATFFLGASNCITVQPVVSIERAVFYREKAAGMYSPLSYAFAQTCVEVIYTILQGILYTVIIYAMIGYDWKADKFFYFLFFITASFNYFTLFGMMLVACTPSALLANILITFALPLWNLFAGFLIVRPAIPIWWRWYYWANPVSWTIYGVVASQFGENEGELSVPGGTPVVVKQFLKDNLGIQHDLLGYVVLVHFAYVIVFFFVFGYSIKFFNFQKR

SEQ ID NO: 276078 - protein, 318 aa, Zea mays
  Clone ID: MRT4577_18336C.1.pep
MGKASKDKRDIYYRKAKEEGWRARSAFKLLQIDQEFNIFHGVKHVVDLCAAPGSWSQVLSRNLYVPAKQSSDCKEGDLPLIVAIDLQPMAPIEGVIQVQGDITNARTADVVIRHFDGCKADLVVCDGAPDVTGLHDMDEFVQSQLILAALAIVTHVLKVGGKFVAKIFRGKDTSLLYCQLKLFFSQVTFAKPKSSRNSSIEAFAVCENYSPPEGFKEEDLYHLLEKVGTPSGAGDLDCRSGWLEGPNKVYIPFLACGDLSGYDSDRSYPLPSSTDGGSYRSLDPVQPPIAPPYKTALQMKKASSHGAGADAIKPSADS

SEQ ID NO: 276079 - protein, 30 aa, Zea mays
  Clone ID: MRT4577_183370C.1.pep
PVRLKCPFSCVKLAWYCLSYLNTVFIKFLN

SEQ ID NO: 276080 - protein, 40 aa, Zea mays
  Clone ID: MRT4577_183371C.1.pep
LAEKQKDQRQQVQRDQTQQQTSSSSTSFMLREAAPTTNVR

SEQ ID NO: 276081 - protein, 62 aa, Zea mays
  Clone ID: MRT4577_183372C.1.pep
RSADHNGGQTPTPTRPRGVHLLNKVNLEPYEHVPEDYQYTRTGLWVGDCFIYNNSLQPVYNC

SEQ ID NO: 276082 - protein, 104 aa, Zea mays
  unsure (1)..(104): unsure at all Xaa locations
  Clone ID: MRT4577_183373C.1.pep
TRVRSRLCPRIRIRVRAGASYVVTAAANVPANQKACCHAVNGPGYASPLEDMDNGTMEKLVYVTXVYNGTGFNKPNYLTTANLYPSCPTYSYLIHRLTVTHICD

SEQ ID NO: 276083 - protein, 120 aa, Zea mays
  Clone ID: MRT4577_183374C.1.pep
IAEYHFYYRCFVCGLDYHSVHNSFHNYFKTYGYDIMLNIIIHRYTHMCFGSFFTTFSMQDAMQNIIDGVNGKELISRNITDYQAHSRGGRGGGYGGGHGGGRYGGGYRRDGRRDYGGGYG

SEQ ID NO: 276084 - protein, 76 aa, Zea mays
  Clone ID: MRT4577_183375C.1.pep
LAFTFQRREKGDGGGVLSMTVKGALPRLRAETIHAVTGMNRTCIQPSLWSRQLAGETWGGDLPRGSSRHFYLYGQS

SEQ ID NO: 276085 - protein, 154 aa, Zea mays
  Clone ID: MRT4577_183376C.1.pep
MKGSKVHEHEADVPASDLWAIYGSLRAAELLPELLPHVLAKVELVSGDGGVGTILQLIFPPGIPGLQSYKEKFIKVDNENYIKEAEAIDGDILKLGFEAYMIRFEIIPKGANSSVIRSTIEYVIADAHPELEAMVSTATLAETAQKFSEFAKAK

SEQ ID NO: 276086 - protein, 116 aa, Zea mays
  unsure (1)..(116): unsure at all Xaa locations
  Clone ID: MRT4577_183377C.1.pep
GRXXKLKKKKKKKKKKKKKKKKKKKKKKKKKKRAPRLKDDRSTQQLKGRGTRNEGEQGPRARGRRPRLRPLGDLRLPPRRGTPAGAAPARARQGGARQRRRRCWYHLAANISSRGV

SEQ ID NO: 276087 - protein, 136 aa, Zea mays
  Clone ID: MRT4577_183378C.1.pep
EESREVLLEAWTSTMHIIISFLSEMQRQLNRQDFGSFDRIKEEYFLAIARVTAMKLLSSASSIGFQVSPPTDKPCENSYGGAARRGLSKMVDVVMVYQALDHGLPTILSLLSGETKELVVAEAEGLIKRLSEAFAK

SEQ ID NO: 276088 - protein, 72 aa, Zea mays
  Clone ID: MRT4577_183379C.1.pep
FLIFKSFWLIGLIIIHINISYGHNNCSKHILLNPLLRRIRRGSHNKIIIMVILVLASVCKGYCFYSIIIGPF

SEQ ID NO: 276089 - protein, 34 aa, Zea mays
  Clone ID: MRT4577_18337C.1.pep
PCSNLVRRHLTNRSSISVPGLRSSTRDGFGAQWL

SEQ ID NO: 276090 - protein, 107 aa, Zea mays
  unsure (1)..(107): unsure at all Xaa locations
  Clone ID: MRT4577_183380C.1.pep
TKTVYEEELTVEERNLLSGAYKNVIGARRASWRIGNSIEQKEESLKNXYPVDLIKEYSGXIEAXLSNICDELLKLLDSHLEPYCNAAESNVFYLKMKGDYHTSLTEF

SEQ ID NO: 276091 - protein, 39 aa, Zea mays
  Clone ID: MRT4577_183381C.1.pep
TFTRCKSLREKVKGTQAPSAVLPHESHFTNRGDLSPGPW

SEQ ID NO: 276092 - protein, 91 aa, Zea mays
  unsure (1)..(91): unsure at all Xaa locations
  Clone ID: MRT4577_183382C.1.pep
SLVNLQLLAPSTPHIVFQDWWANLESKVPVVPHKGIDSLVVXWWLWKQGSGCVFEGASPSTNQIIQNIKDDAHRWCLAGAGGCMPFGLSVG

SEQ ID NO: 276093 - protein, 176 aa, Zea mays
  Clone ID: MRT4577_183383C.1.pep
LPQSGLRVNAEKLVVLFADTESRSCYILRLPSIIQNFRVLCQSSVGPSMQSESFQTVRDYQVQSVSLIEIAHGTGDPLSYPPLMALLHDIFNLERWTNFQVLKRSLNGPRLMLVRLLIPRPRIYILFFELCMMCENVRDRISPRKSSVNHDFLLLLILLAIGISGTLAGNGQKLTE

SEQ ID NO: 276094 - protein, 76 aa, Zea mays
  unsure (1)..(76): unsure at all Xaa locations
  Clone ID: MRT4577_183384C.1.pep
ALTHLLGENTANQSPYKQHEIQIHYLKRRTKSXTSESMCRSEQRTTKTILLLQLSMASKAMQLIRGARQWRLERAP

SEQ ID NO: 276095 - protein, 71 aa, Zea mays
  Clone ID: MRT4577_183385C.1.pep
QRTIGSGREKNSPPTHSRRPLSNKKKIQFIACKTIHHIIIYYLSWPATKRQTIHASENAPPPFPGFVQRWA

SEQ ID NO: 276096 - protein, 91 aa, Zea mays
  Clone ID: MRT4577_183386C.1.pep
AATAPPTRGHRSVTNAGASLAFFQAFDLGRPPQQESALRSPSPGSTSAPLPSPKKKRHGAPDAARLPKKKAWGFFTERWPPMHTSVSRWPL

SEQ ID NO: 276097 - protein, 67 aa, Zea mays
  Clone ID: MRT4577_183387C.1.pep
IGATNGALRMGRAACARRLLATATALRRPYRTFHPSLIGCLFPGLFSMHGRRRARPGEGQGGLHDHM

SEQ ID NO: 276098 - protein, 186 aa, Zea mays
  unsure (1)..(186): unsure at all Xaa locations
  Clone ID: MRT4577_183388C.1.pep
GFSFPELRPFACRVWFLFPXXXXXPPPPPPPPPPPPPPPPPPPPPPPPPXPPLSPPPPXGGFLRFALSLWGRCYAWLLGGPVPPSLPSPXLCLRRAFFPRPPPXPPPALPFLPLSAPLPPSPPLPPPPXLPPPPRPXSXPAPPLPTRAPSAPPAPXPSPPPXPRARPPPPVPPPPPPPPPPPPPPP

SEQ ID NO: 276099 - protein, 322 aa, Zea mays
  unsure (1)..(322): unsure at all Xaa locations
  Clone ID: MRT4577_183389C.1.pep
MGRQPCCDKVGLKKGPWTAEEDQKLVSFILGNRQCCWRAVPKLAGLLRCGKSCRLRWTNYLRPDLKRGLLSDAEEKLVIDLHAQLGNRWSKIASHMPGRTDNEIKNHWNTHIKKKLRKMGXIDPLTHKPLPPPDPHPPKDHQSPPHTATGGSPEAPPSPSPKPPQEKTAVPVMTPASQQEAGDDDVPLLSNYYPGFCTDEVPMMDPDEIMVPLDDGRTAPPTSTIFSTTTTTSYSAASDSVSSSLSRDEDPLFPLMDLEFPDIAFQMGLLDDMVASWDDSLAQQPLSPSPVYDDDYANQLQIRSGVAFDQEPGNKIVLFSSY

SEQ ID NO: 276100 - protein, 43 aa, Zea mays
  Clone ID: MRT4577_18338C.1.pep
QPYVFTSHSCSTITNGSDRIGSYLRRLRGEVSGANGVRVEGTL

SEQ ID NO: 276101 - protein, 115 aa, Zea mays
  Clone ID: MRT4577_183390C.1.pep
AVLLATEERNKDVDDEIVRPGSSINSVNVLDKYSYCTVGKPIDNLSRPILLSSQSADVPGRDLASQISVDSDHTYHGSTEDPVGMSSTTPDSVSSWIVAIVPEANKEHQSCKSSL

SEQ ID NO: 276102 - protein, 171 aa, Zea mays
  unsure (1)..(171): unsure at all Xaa locations
  Clone ID: MRT4577_183391C.1.pep
MGRQPCCDKVGLKKGPWTAEEDQKLVSFILGNRQCCWRAVPKLAGXIYLSMYVHARSIVAAFVMTREACRALPCHAGLLRCGKSCRLRWTNYLRPDLKRGLLSDAEEKLVIDLHAQLGNRWSKIASHMPGRTDNEIKNHWNTXIKKKLRKMGIDPLTHKPLPAPDPHPPKD

SEQ ID NO: 276103 - protein, 71 aa, Zea mays
  Clone ID: MRT4577_183392C.1.pep
LGFFLIFFGVFSFFFFFFVEKNNIFFLYINISKSFAQMNAPPSFGRQITPFNSPDFFPSLWGQCNTTIILA

SEQ ID NO: 276104 - protein, 92 aa, Zea mays
  Clone ID: MRT4577_183393C.1.pep
RGRAFFFFLLTAQTSPAIIVVARGSRLTASCEFMQGLSQHVLSYINALLVLTAHQLDVCLLPTRGQIIYIGRVSLANHQLRIVTDGPLYCHG

SEQ ID NO: 276105 - protein, 49 aa, Zea mays
  Clone ID: MRT4577_183394C.1.pep
CIMPKIPRSCSMMSDKGPLLIKNCGGLLAITFAGHHVDLVKATHVDALQ

SEQ ID NO: 276106 - protein, 231 aa, Zea mays
  unsure (1)..(231): unsure at all Xaa locations
  Clone ID: MRT4577_183395C.1.pep
MAIFGRHRRDSTAGSADSAPTIVPELSKDQVKRATRTRKTWALLTSFFLFITVVFLILVEIGGIKNKKIIRNWYFIRIDVSNIIPASVPNSALINTIAQTLGLHDFYQVGLWRFCEGYKNQGVTFCSPPKTLYWFNPVEILSSELIAGASINLPSDINNILDLIKIASQVMFGFFLASXCLSFVLMFLMPISVFSRWWTLPVXILTFINALLCTAXTVIATAMVIVFRNVI

SEQ ID NO: 276107 - protein, 66 aa, Zea mays
  Clone ID: MRT4577_183396C.1.pep
KKKPFLQGWVTTPANYRVLEQGPPKDGPREIKRIPQTHFWGGDTGKLLDPEFGPQPKKINPKTGTP

SEQ ID NO: 276108 - protein, 99 aa, Zea mays
  Clone ID: MRT4577_183397C.1.pep
PVQICSQLPLFLKGLGYQHLFIFITGPFSCAFLAQFVVYKTLQLFLLALLEVPPVHLEFYASLGPARVLPRKCCLIYYPLCFLFKRFGHCLHRPPLNSP

SEQ ID NO: 276109 - protein, 128 aa, Zea mays
  unsure (1)..(128): unsure at all Xaa locations
  Clone ID: MRT4577_183398C.1.pep
MRYILRIQXGGPCGQQIRLRLWERPXDDNGIDTTCRYTGTSDLQSERGYGYYNDASWGRFVPRTVLMDLEPGTLDSALTGPDRHIVRPDHLENVQSXGHGNKWAMGDYTQDAEVFXSAHDVLRKQAET

SEQ ID NO: 276110 - protein, 85 aa, Zea mays
  unsure (1)..(85): unsure at all Xaa locations
  Clone ID: MRT4577_183399C.1.pep
HASEFLHDVEVLNCMGNTSMVLRLGACAEYGCLVYHYMDHWSINERLLCRGSTPPLAXSXRFRIAAEITTAQLFLAHTKPEPLVH

SEQ ID NO: 276111 - protein, 135 aa, Zea mays
  Clone ID: MRT4577_18339C.1.pep
VDPAFFGLRLAAQGQASFCKRLARNVVAMATGEPTAAPVADNEELTEFVNALKKEWDRIEDKYAGSTLAVAATLAMWSAGGVVSAIDRLPLIPGLMEAVGIGYSGWFAYRNLLFKSDRDAFFAKVREVYEDIIRS

SEQ ID NO: 276112 - protein, 238 aa, Zea mays
  Clone ID: MRT4577_1833C.1.pep
MICAISGEVPEDPVLSTNSGLLFERRLIRRYIEDHGKCPVTKEELAMDDLVTVMTNKIPKPRPLQAASVPGLLGMFQNEWDALMLSNFALEQQLHTARQELSHALYQHDAACRVIARLKKERDESRTLLAQAERQIPISAAGPAPVAAVTNGKRALEDEVGPDGKKIRPGINPVIIDELTECNSVLSAQRKKRQVPPSLAPIDALERYTQISSHPLHKNNKPGILSIDIPHSKDIIAT

SEQ ID NO: 276113 - protein, 51 aa, Zea mays
  Clone ID: MRT4577_183400C.1.pep
MPSQKSFRTKQKLAKAQKQNRPIPQWIRLRTGNTIRYNAKRRHWRKTRLGI

SEQ ID NO: 276114 - protein, 579 aa, Zea mays
  unsure (1)..(579): unsure at all Xaa locations
  Clone ID: MRT4577_183401C.1.pep
AGSFACGVDDGARAVLAAGAVGHITRLLAHPDEKVVDACARALRMIYQSRLAPKFDVNSGENVDFVLSLLDSENENVTELAAAIVSHSCESGAEQLSLCSAGVPQKLVSLFGCSMNLRDACLGSIIAVIQNNQDVASRFASTDHGKGFRSVVGLIHDRSPRTRLLACLCLIALGHASPDHFQDNQIKTKLIMVLLELIEEPGHVGDEAPLALTTLIKDSFELQRQALTTNAVEKLSNHLLANPLGTRRAVTILLALSELCSKLEESRSQLMSVEVSTLLLEALKHDWADIRVAACSCLRSXTLSTLSSLICDSEHFVQXKPWHQLLNDSSTSVHVVALGAMCNIAINLTPRKSVLLNSGVVSHLVHLSKSMDPILRLKSVWALRNIMFLLSPKDKDFIVKELTLSTLSSLICDSEHFVQEQTLALVRNLVDGYVDSANFVIGEDGIIMNAIARQLNNASAPGVFVQGMYVLANIAAGNELNKEAVMNVLLPHRADRIKPLFAVNFLQSKDKQLRVATLWCLLNLIYPKCEASSGRAVRLQNAGVIQQVKNMINDHCLDCKLRARMVLQHCVNNADDCFM

SEQ ID NO: 276115 - protein, 61 aa, Zea mays
  Clone ID: MRT4577_183402C.1.pep
SFMTTYPGNNHNQTPYGIEFEKVNVEQHANFNRDIRRCGLAHIMLRKRSEHLKPDYLEQEI

SEQ ID NO: 276116 - protein, 353 aa, Zea mays
  Clone ID: MRT4577_183403C.1.pep
LTTNAVEKLSSHLLANPLGTRRAVTILLALSGRLLKLEESRSQMMSVEVSTLLLDALKHDWADIRVAACSCLKNISRSPKVLSGGRLSCDTVIGPLVQLLNDSCTSVQVAALGAICNIAINLTPRKSVLLNSGVVSHLVHLSKSMDPILRLKSVWALRNIMFLLSPKDKDFIVKELTLSTLSSLICDSEHFVQEQTLALVRNLVDGYVDSANFVIGEDGIIMNAIARQLNNASAPGVFVQGMYVLANIAAGNELNKEAVMNVLLPHRADRIKPLFAVNFLQSKDKQLRVATLWCLLNLIYPKCEASSGRAVRLQSAGVILQVKRMINDPCLDCKLRVRMVLDHCLDNADDCFM

SEQ ID NO: 276117 - protein, 107 aa, Zea mays
  unsure (1)..(107): unsure at all Xaa locations
  Clone ID: MRT4577_183404C.1.pep
GEVVALDRSHNKVMDILKLASEMDLSCIKAYKLDALKSVRKTDEARSLGMADNHSEAIETPTEDPCHATLGGKSTSVDEDSSTTTVVFSDNKNLNSXRYISKAELRK

SEQ ID NO: 276118 - protein, 98 aa, Zea mays
  Clone ID: MRT4577_183405C.1.pep
KKKAKKKVQTPKISIFQGANQVPPAKGILSKAMSIMNPFINDIFEKRAVEAPKIARSNKKPPITSRGIQNSGALVLPGELPKPPVSKGPKAVSKFSSF

SEQ ID NO: 276119 - protein, 99 aa, Zea mays
  unsure (1)..(99): unsure at all Xaa locations
  Clone ID: MRT4577_183406C.1.pep
MSGFAKGAKGLVKVGAKRLRKXVRDIIQGIRKPAIRSLARRDGVKCISGLIYXETLGVLKIFLXNVTCDAVSYTEXHARRKTVTTMDVVYDNKQQEQQP

SEQ ID NO: 276120 - protein, 85 aa, Zea mays
  unsure (1)..(85): unsure at all Xaa locations
  Clone ID: MRT4577_183407C.1.pep
KRGNWKNPGFPKLNPFEKNPLFPSWGKSKKAPPNPLSKNLPTLNGKGNPPFSAXLKPRGVXVTPRVTFTFAXALRPRSFGFFPFF

SEQ ID NO: 276121 - protein, 39 aa, Zea mays
  Clone ID: MRT4577_183408C.1.pep
GACDHAYSHASGQRKIVFMKNTKLTNDAHCTTSVPRQLA

SEQ ID NO: 276122 - protein, 75 aa, Zea mays
  Clone ID: MRT4577_183409C.1.pep
LPYSMVGRRRFHHRGCLHALDVQTPCAMMFRPSSVELSACRRRAVAVVGANTSWRSSSASTPPSAFLLPHSMLAN

SEQ ID NO: 276123 - protein, 85 aa, Zea mays
  Clone ID: MRT4577_18340C.1.pep
PDPRDFFFTGSKENLQRGGGNPRCGVSITPTTYTRDQLNSVRNEPESNHPLLSPCNNQICYKHEPVKTSQDKTIIETSEHAVTCK

SEQ ID NO: 276124 - protein, 64 aa, Zea mays
  unsure (1)..(64): unsure at all Xaa locations
  Clone ID: MRT4577_183410C.1.pep
EEYSLVTLSESLHKIKRTEVPLSYYTGVLGMPGFTAYCGFTHVARPKKGDXVYVSAELTHIHSD

SEQ ID NO: 276125 - protein, 43 aa, Zea mays
  Clone ID: MRT4577_183411C.1.pep
GLDVKLNLAGRRFGPRTLPPSRRLTEVRVGDWRGFRRFARTRG

SEQ ID NO: 276126 - protein, 221 aa, Zea mays
  Clone ID: MRT4577_183412C.1.pep
TVLHNKVSCTVHLHPIYCFRSEYDTIGTSIKAAAVYLGTALVKLVCLATLLKVPENDSFDPYQELMKVFIGFIDVAGLYFALTQLTHRNISQNHKFQAVGLGWAFADSVLHRLAPLWIGARGLEFTWEYIFQGLEANANLVMTLSLAALGSLMWLRKNKPRTLVPIIYACALLLATMPSITSYLRRSLEWQTPKVVGFELFSSLVMAFISWQLFSACQRPM

SEQ ID NO: 276127 - protein, 227 aa, Zea mays
  unsure (1)..(227): unsure at all Xaa locations
  Clone ID: MRT4577_183413C.1.pep
MTVFHFLNCAFLTFGPHVVYYSATPLSEYDTIGTSVKAAAVYLGTALVKLVCLATLLKVPENDSFDPCQELLKVVIGFIDAVGLYFALTQLTHRNISQNHKFQAVGLGWAFAASVLHRLAPLWIGARGLEFTWEYILQGLEANANLVMTLSLAALGSLMWLRKNKPRTLVPIVYACALLLATMPSITGYLRRSLEWQTPKVVGFELISSLGMAXISWQLFSACQRPT

SEQ ID NO: 276128 - protein, 62 aa, Zea mays
  unsure (1)..(62): unsure at all Xaa locations
  Clone ID: MRT4577_183414C.1.pep
DSTASRPTAVRPTASRQLSCILIXIXXAEQSQXAPKVMXXFLTLQXGRNXXGDTYGXXSXMN

SEQ ID NO: 276129 - protein, 227 aa, Zea mays
  Clone ID: MRT4577_183415C.1.pep
MTVFHFLNCAFLTFGPHVVYYSATPLSEYDTIGTSIKAAAVYLGTALVKLVCLATLLKVPENDSFDPYQELMKVFIGFIDVAGLYFALTQLTHRNISQNHKFQAVGLGWAFADSVLHRLAPLWIGARGLEFTWEYIFQGLEANANLVMTLSLAALGSLMWLRKNKPRTLVPIIYACALLLATMPSITSYLRRSLEWQTPKVVGFELFSSLVMAFISWQLFSACQRPM

SEQ ID NO: 276130 - protein, 393 aa, Zea mays
  Clone ID: MRT4577_183416C.1.pep
MPPKAKKDAAPSERPILGRFSSHLKIGIVGLPNVGKSTFFNIVTKLAIPAENFPFCTIEPNEARVNVPDERFDWLCKLYKPKSEVPAYLEVTDIAGLIRGAHAGDGLGNAFLSHIRAVDGIFHVLRAFEDAEITHVDDTVDPVRDMETISEELRLKDIEFMKKKLEDLDKSMKRSNDKQLKIEHELCERVIGHLEEGKDVRLGDWKAADIEILNTFQLLSAKPVVYLVNMSEKDFQRKKNKFLPKIHAWVQEHGGETILPFSCAFEQKLVDMPEDEAAKYCAENQITSMIPKIIKTGFAAIHLIYFFTAGPDEVKCWQIRRQTKAPQAAGAIHTDFERGFICAEVMKFEDLKELGSESAVKAAGKYKQEGKTYVVQDGDIIFFKFNVSGGGKK

SEQ ID NO: 276131 - protein, 142 aa, Zea mays
  unsure (1)..(142): unsure at all Xaa locations
  Clone ID: MRT4577_183417C.1.pep
FPRKFLTPMAPPGFKRGSLFPSGRPLPTLSPPIIPPKNPPKKLEKGFSKPKNPQKRGAKFSPKNPPPFWPLSGLPKGPLWAPDRPNPCPWPPPWDFTPKFSPVWPPLGAFSPLTPFLKGVFLGVKKKVKNRPQNGLFFFXXP

SEQ ID NO: 276132 - protein, 192 aa, Zea mays
  unsure (1)..(192): unsure at all Xaa locations
  Clone ID: MRT4577_183418C.1.pep
MLRRLRHLHFVTSIIPILRRRLDAGYPDHLSGDELLSDSFTYTELQNXVLRQVKEKRITQGTVDANIGDIPFAXSVXEHHPIYDTTVKVVDIATHISPTQQPPFDKNSFVSYIREYIMNLTAELGPXKRDEIXKGRLVXATMFLLXSKLYDLPCFDDDTMKDDAARAFAYYDDGDSTCTFLYFSHGLMDIKR

SEQ ID NO: 276133 - protein, 40 aa, Zea mays
  unsure (1)..(40): unsure at all Xaa locations
  Clone ID: MRT4577_183419C.1.pep
PFGLDQCPGSSVKLPITIQQPMIFPQHVWRCRLLPRADXG

SEQ ID NO: 276134 - protein, 50 aa, Zea mays
  Clone ID: MRT4577_18341C.1.pep
FPSVILNESDARSSYHFQQAKAHLSRLRHPDGLRTRARTRARIGIAYRSR

SEQ ID NO: 276135 - protein, 61 aa, Zea mays
  Clone ID: MRT4577_183420C.1.pep
LPLVRFLEKMSTVEQPFSSRLHPLISSLVSVSMLCAIIYETMDQLFVMQLLILNIYILLIC

SEQ ID NO: 276136 - protein, 45 aa, Zea mays
  Clone ID: MRT4577_183421C.1.pep
HSRIKNHLVPGHGCGSSGFGSDEKSDRSASHPGVIVAPTDTSHST

SEQ ID NO: 276137 - protein, 222 aa, Zea mays
  unsure (1)..(222): unsure at all Xaa locations
  Clone ID: MRT4577_183422C.1.pep
RCSTLLPYTLLRNNYQNRERGTISTSSTPVPTSSLLILPTFVLLTWQPPRSPSADAASPSTFTQGQHPFYPPNKARMAEPDYGAASWAHVTTGPGHQGAELAAPLLSAHAPFQQQLPPLYGGVYLPMSDHQTPQSRNVPDGPAGNPLHDRSPYPPAGIRYPYYQPHMFPYQFTGHPRPPPSFWNGVDMCIPDQLFSNPSNTMQGHLPWQTIXMPHXNKPLAP

SEQ ID NO: 276138 - protein, 93 aa, Zea mays
  Clone ID: MRT4577_183423C.1.pep
CESDQTLGSQGYKWHPPGLYGVGIFEGKTVPLGEQLCPCPGRAHMLLSICKPGSLSGTGLNMSGPNTGGVGKVVVNCVDWDTLVVCLGLGSWM

SEQ ID NO: 276139 - protein, 124 aa, Zea mays
  Clone ID: MRT4577_183424C.1.pep
FEVETDACATGIGAVLMQHHKPIAYLSKSLSSKNQLLSIYEKEFLALLLAVTKWRQYLQHTEFIIRTDHKALSFLEDQVLHSEWQKKAMTKLMGLQFRVVYREGKENVAADALSRVGHAMAMHS

SEQ ID NO: 276140 - protein, 121 aa, Zea mays
  unsure (1)..(121): unsure at all Xaa locations
  Clone ID: MRT4577_183425C.1.pep
GKKKKKKKKKKKKKKKKKKKKEKKKKKKKKKKKKKKKKKKKKKNKKELXKEKRHSGGPFGGPRGGSLFFPLDLFWFGFLHILCLGACFYPGCWGTPGLPPNCAGVSNCCFHAGGGDPGGRP

SEQ ID NO: 276141 - protein, 48 aa, Zea mays
  Clone ID: MRT4577_183426C.1.pep
VVEHLQDSISVETGLLHHMVVTSPATVSDPRRVVMSSPLRAAQVIGTW

SEQ ID NO: 276142 - protein, 43 aa, Zea mays
  Clone ID: MRT4577_183427C.1.pep
SNRTRHYLITLTGRHLITVDRMIQKRHGLGKFICKVHPQQELK

SEQ ID NO: 276143 - protein, 63 aa, Zea mays
  Clone ID: MRT4577_183428C.1.pep
SVSEVVWILVVSCPRVNKKFQSASSMWEFVSKFVEFNFLRRRVGGSPSCDAKSRVQDVEYYTL

SEQ ID NO: 276144 - protein, 133 aa, Zea mays
  unsure (1)..(133): unsure at all Xaa locations
  Clone ID: MRT4577_183429C.1.pep
DPPSARRALATAEVPAQALKDSTFVKAXKKXARNIEPPTTPLSLMHSCPPTRVTILTKFYRKFVLYYKCEIANKYVYMTIVPSTTGQMGVLTRHVDTIAXLXPVVLSLHXGNDVRMYFISSEFAFVHSYYIAY

SEQ ID NO: 276145 - protein, 112 aa, Zea mays
  Clone ID: MRT4577_18342C.1.pep
QPPKRFLEPRFQGFDDSPPEQLVRDPLSPVKEPLQGKNLSGSNCPVAFVGRKDDGPVNPFKVFGPARVQELFAPMEMEVPNQAPPLEAAAASSPIQEEGERGSDYPSAPMDI

SEQ ID NO: 276146 - protein, 75 aa, Zea mays
  unsure (1)..(75): unsure at all Xaa locations
  Clone ID: MRT4577_183430C.1.pep
FXFFFFFFFFFVFFLVFLGKTKHDKFFLEAIPFCKDTFFRGIIQTTGGVKGLFCYFCLKHQTGSKPSKLMPFQDN

SEQ ID NO: 276147 - protein, 112 aa, Zea mays
  unsure (1)..(112): unsure at all Xaa locations
  Clone ID: MRT4577_183431C.1.pep
VVYAWQAIVRSCLALRSAYAAPPFGAASAGQEGLIAVYIGSVVCDHACFTMSLFVLFAFPCLYHIGAHNEHQKQICARLDLVLRIYYFIPPRYRCVRLRNSREYLFXIASAA

SEQ ID NO: 276148 - protein, 135 aa, Zea mays
  unsure (1)..(135): unsure at all Xaa locations
  Clone ID: MRT4577_183432C.1.pep
LFFNRRFTSVSARFHHQLEQLMNKLNTTTFHIIRCIKLNEMQKPDIFNAGFVCSNLETXGMCTALRLMQQGFPTRCIFEDLYERYAQLMPAVISRLKPYTFCEAELVALDLNGGKDFQMGLTKVFFRAGKLQFLG

SEQ ID NO: 276149 - protein, 82 aa, Zea mays
  unsure (1)..(82): unsure at all Xaa locations
  Clone ID: MRT4577_183433C.1.pep
LKLKSFNFMAHQLRPETIFFFILXSICLGFVMRXAVPAPXCMAVPQGDFLHPISHAGVVRSLGVASLCVYPKASQPWTGIAF

SEQ ID NO: 276150 - protein, 77 aa, Zea mays
  Clone ID: MRT4577_183434C.1.pep
MLVDQDLLSGDELLSDSFTYKELANGVLWEVEGKRVTHGSDDVHIGANPFAKGGEDESIYDTDLNVADIEDTFRLQE

SEQ ID NO: 276151 - protein, 139 aa, Zea mays
  Clone ID: MRT4577_183435C.1.pep
RARPVFYSADALHAHARARARNEPDIRQGEGPTARGERYRLSATLLCAVHAYTTRAGRRHQDLTAGRTPNGACRAIDATHERSRVLDYPLPSYTGALDPHDTNGLRHNTTLYFLAGIGLMVICKDYYNVGDRLPGVPYY

SEQ ID NO: 276152 - protein, 92 aa, Zea mays
  Clone ID: MRT4577_183436C.1.pep
FLYCPDIDVGGGVIFMNGKVAWISFTLPTYEPCLDDVAKQRKSRNLYFSTDVEKHVPDADIIFVSANTPTKTRCLEAVKGADLTYCESASCM

SEQ ID NO: 276153 - protein, 95 aa, Zea mays
  Clone ID: MRT4577_183437C.1.pep
MKKVGPAKKATLGRELSRFPESHFQTISDTFHMMAESAPEAFELTEWSHILKLCDQLSKHATIPGMLFSGDSPDVETLKKNIVSYFNILHAFFFF

SEQ ID NO: 276154 - protein, 96 aa, Zea mays
  unsure (1)..(96): unsure at all Xaa locations
  Clone ID: MRT4577_183438C.1.pep
LVLPAPLSPRRXHXPPPCFMESVRAQGIHAWLXCGYXXAQFSIXSVCCSMXLLIKICFPSLRSVFFFXFWSWERQVAKXCALLCFLVWNNYPPLSP

SEQ ID NO: 276155 - protein, 41 aa, Zea mays
  Clone ID: MRT4577_183439C.1.pep
EIHPTQIRGDKALSHTNRYCYLERSLEMAQILYPGQRFIVI

SEQ ID NO: 276156 - protein, 25 aa, Zea mays
  unsure (1)..(25): unsure at all Xaa locations
  Clone ID: MRT4577_18343C.1.pep
MISLTSTSEVYGDPLEHSXTEAYWG

SEQ ID NO: 276157 - protein, 73 aa, Zea mays
  Clone ID: MRT4577_183440C.1.pep
AVRAVQQLMIMRGSLEVSLKKKKGEKMADDIKRKQTYVRMHTTARLFYRGIQPQFPGHGFTTFCLVEPFINPT

SEQ ID NO: 276158 - protein, 52 aa, Zea mays
  Clone ID: MRT4577_183441C.1.pep
SNRQSSGTCMIYYCSQECTSHVRPWMFLSQFRSVSRRANILHLLLLSLLAFV

SEQ ID NO: 276159 - protein, 109 aa, Zea mays
  unsure (1)..(109): unsure at all Xaa locations
  Clone ID: MRT4577_183442C.1.pep
MPGKNKTISTGKKGGTKKTVDPFSKKDCCDIKAPSVFRVRNIGKTLLSRTQGTRIAPEGLKHTTYEVGLTDLQGDEDQAYTKIRLRAEDDHAXNELXNFWGMNXTTDKL

SEQ ID NO: 276160 - protein, 848 aa, Zea mays
  unsure (1)..(848): unsure at all Xaa locations
  Clone ID: MRT4577_183443C.1.pep
MASAAGSSNVMLAIHEKKTTATDLYRPLRLYIASTYSEREAAAADDDLSVVRDALLAYARALALVEPRFPISPDRAHVHSLTFTWHDAFKGNKKCALASIHLEKASVLFNLGAVYSQIAVAADRSTDVGIKTACGAFQSAAGAFAWLRESGVAAKAVAAGTTTVDITPECAGMLEKLMLAQAQECFFEKVIGGGKPPALCSKVARQVGIFYEEAYAALSAPPLSQHFDKTWVSHVQLKAAQFYADACYRYSLDLHQKEEIAEEIARLKIGMSALADAKKAAKGVAAQLMDSVNKLESNMKTNLERAMKENDRVYLMRVPAAGSLGALSAASLVKPTSLSEVLDASKERLFXSSLVPDGSMKALSKYTEMVDNIIRTQAEKLQQASEITRVRLKEMDLPDSILSLEGNITLPLDLKEDVEAVQISGGPAGLESELQQLRDLSRVNQELLVQTEELLQKEANEDAQFRTQFGSRWTRPQSSTLTKNIQDRLNLFASNLKKAADSDSLIERGVKENYPLMSILDKRPIESALPSISRPIMSLDGNEDAIVGALKQSLRQLESLGAHRAGLEDMLKEMKRKDDILPKLMAGVGSHDDLFKKEIAKYDPICADIADNIVAQEQLLLQIQAQNEQFASVFNIEDYKAARERCYKQIAAAVAKYREFKKNINEGLNFYVTLQEAIGKIKQQCSDFIMTRNIQCREMIEDVQRKLAGFSFSSSSHSSMQRNASVPPDQSSPSPPPHAQAPYASPPGVDSRLGYSQTEPRPAYSQPYPPSYGAPPQQPSYGAPHPGQYQPPAHQPPPGHDYGQPAYPGWRGPYYNAPQPQQSAPYPQPPYNAPGAYPPHQSNYYRPQ

SEQ ID NO: 276161 - protein, 869 aa, Zea mays
  unsure (1)..(869): unsure at all Xaa locations
  Clone ID: MRT4577_183444C.1.pep
MASAAGSSNVMLAINEKKTITTDLYRPLRLYIASTYSEREAAAADDDLSVVCDLRAAVEKPSLPDPSSLEQRRDALLAYARALALVEPRFPISPDRAHVHSLTFTWHDAFKGNKKCALASIHLEKASVLFNLGAVYSQIALAADRSTDVGIRIACGAFQSAAGAFAWLRESGAAAKAVAAGTTTVDITPECAGMLEKLMLAQAQECFFEKVIGGGKPPALCSKVARQVGIFYEEAYAALSAPPLSQHFDKTWVSHVQLKAAQFYADACYRYSLDLHQKEEIAEEIARLKIGMSALADAKKTTKGVAAQLLDSVNKLESNMKTNLERAMKENDRVYLMRVPAAGSLGALPAASLVKPTSLAEVLDASKERLFSSLVPDGSMKALSKYTEMVDNSIRTQAEKLQQASEITRVRLKEMDLPDSILSLEGNITLPMDLKEDVEAVQISGGPAGLESELQQLRDLSRVNQELLVQTEELLQKEANEDAQFRTQFGSRWTRPQSSTLTKNIQDRLNLFASNLKRAADSDSLIERGVKENYSLMSILDKRPIESALPSISRPIMSLDGNEDAIVGALKQSLRQLESLGAQRAGLEDMLKEMKRKDDILPKLMVGVGSHDDLFKKEIAKYDPICADIADNIVAQEQLLLQIQAQNEQFAAVFNIEDYKAARERCYKQIAAAVAKYREFKKNINEGLNFYVTLQEAIGKIKQQCSDFIMTRNIQCREMIEDVQRKLAGFSFSSSSHSSMQRNASVPPDQSSPSPPPHAQAPYASPPGVDSRLGYSQPEPRPAYSQPYPPSYGAPPQQPSYGAPHPGQYQPPAHQPPPGHDYGQPAYPGWRGPYXYNAPQPQQSAPYPQAPYNATGAYPPHQSNYYRPQ

SEQ ID NO: 276162 - protein, 99 aa, Zea mays
  Clone ID: MRT4577_183445C.1.pep
PAALNMDFFPPPPPFFPTTKKNNKKAKNTQHTDQPQLLNIKTFHLQHTFIHCGTRPRHHTQTLNPASINWSNPNTPKNPTIYDSPDHNIGNNIHPHKGS

SEQ ID NO: 276163 - protein, 176 aa, Zea mays
  unsure (1)..(176): unsure at all Xaa locations
  Clone ID: MRT4577_183446C.1.pep
MSKILISINGFGMIXGKITISDDLPIEDVXLFSDNDPFITTDYMTYXLFKYYTVNGQWKHSDICLKDSKKLLFGNKPGTVFVIRNPEDIPSGDXSADYAHRMLPDVFTDXDKAAXHVKGGAKNDGISAPNKDAPMFCVAVNEDKHCSDVSIVSDASCITDXLGRVANVIHDNCGII

SEQ ID NO: 276164 - protein, 99 aa, Zea mays
  unsure (1)..(99): unsure at all Xaa locations
  Clone ID: MRT4577_183447C.1.pep
MSGVGXEVVAAAVLAARTILVWDGMGSLLVPCEARREFGGLRRAFDDVHHQLLTKFSRLPWSVDCECYALGLASPAAGLFTEVVACLEIPGVVAPVPSL

SEQ ID NO: 276165 - protein, 310 aa, Zea mays
  unsure (1)..(310): unsure at all Xaa locations
  Clone ID: MRT4577_183448C.1.pep
MWALRRAGNPLRFRAQKVASAHVCASLEVLLAADAKNVEEHHEADCQKMCCCHKPRSPAFQLSFSSGQFACSRGFSSQPGANSGDKADELEDGFSDLEVPPAAVQNDDGLASEDSSDEDAADEFGLPDVDADAKPEKEHTRRLSDSILLKTLSDSILLKTVLEAPRHQVTSALEKWAKDGNAFDRGELYYVLLNLRKRHWYSKALELVEWVQKSQLFEFVERDYAAHLDLTAKVYGLHKAEQTIEKIPASCRGEIAYRTLLADCVSASNIEKSEQVFNRXKDLGFRVTRFSFDQLLVLYERLDREMIADV

SEQ ID NO: 276166 - protein, 102 aa, Zea mays
  Clone ID: MRT4577_183449C.1.pep
MATSVACAFFFDAEPLGEPGRHALDACALCAKPLSRNSDIFMYKGDTPFCSEDCRYEQMHHDAAYARQAASSRRKQQQSQSQSQRSRGASSVGAKADVSVAS

SEQ ID NO: 276167 - protein, 95 aa, Zea mays
  Clone ID: MRT4577_18344C.1.pep
FPSPFAVDRVPLGLGFVARVCPPDSDVGLLAPCYVQVRFVVSVGVHMVGCTMPVLYLRGWACELAFKLPLPYMVCSCCRAKLLRPAPARAEFRAW

SEQ ID NO: 276168 - protein, 678 aa, Zea mays
  Clone ID: MRT4577_183450C.1.pep
MIALSFVDMSNNSFNASGVPSWFTTLPSLTSLYLENLRVTGQLPQALFSLPAVQTLRLRGNRFNGTLTIGSDYSTQLQLIDLRDNQISQITVGGSQYNKQLILVGNPICSLGTGSSEKYCASPGQSVRAAPPPYSTPMNCSGLPPPCLSDQLVSPGCVCAVPYRGTLFFRSPSFSDLSNGSYWGQRETGIRAKFRSLSVPVDSVALHDPSVNSVNNLQLALEVFPSGKTQFSEQDISDIGFILSNQTYKPPSVFGPYYFLGQPYSFANVVLIPSKSKANNRLPLIVGASVGGAVLVAIVLALVTIVARRKKRPKQNEERSQSFVSWDMKSTSGSSVPQLRGARTFNFDELRKITSNFSEANDIGNGGYGKVYRGTLPSGQLVAVKRCQQGSLQGSLEFRTEIELLSRVHHKNVVSLVGFCLDQAEQILVYEYVPNGTLKESLTGKSGVRLDWRRRLRVLLGAAKGIAYLHELADPPIVHRDIKSSNVLLDERLNAKVSDFGLSKPLGEDGRGQVTTQVKGTMGYLDPEYYMTQQLTDKSDVYSFGVLMLEMATARKPLERGRYIVREMKVALDRTKDLYGLHDLLDPVLGSSPSALAGLEQYVDLALRCVEEAGADRPSMGEVVGEIERVLKMAGGPGPESASNSMSYASRTPRHPYGGDSPFDHSNSGLPSARVEPK

SEQ ID NO: 276169 - protein, 42 aa, Zea mays
  Clone ID: MRT4577_183451C.1.pep
PEFRGGPHPSGFRSGAAVLEVPGLRPRACEVLVFLWGDLNQI

SEQ ID NO: 276170 - protein, 79 aa, Zea mays
  Clone ID: MRT4577_183452C.1.pep
FLGVKHRKTRNQAPRELMNTFRGLEGKETGAHTIASRDPVNLRGPKSRKRIPQLRGQSVQTPKGKNRWKSETRNLQDRT

SEQ ID NO: 276171 - protein, 47 aa, Zea mays
  Clone ID: MRT4577_183453C.1.pep
ASICPHAISICLSHFGMTRYLMVHHYLSLKINLSELDRLYNSFSSKI

SEQ ID NO: 276172 - protein, 48 aa, Zea mays
  Clone ID: MRT4577_183454C.1.pep
LQVEHVLSSEGSDREKLWPNCRVGITRCNSKQLEVLQGCSRILCVSRV

SEQ ID NO: 276173 - protein, 66 aa, Zea mays
  Clone ID: MRT4577_183455C.1.pep
TSPSLIVSSVGKNQLVQRKILGGKAPERKNRPARANERLAIPRHSFKQASGIPCVPGTPFNLSSNN

SEQ ID NO: 276174 - protein, 95 aa, Zea mays
  unsure (1)..(95): unsure at all Xaa locations
  Clone ID: MRT4577_183456C.1.pep
CRMSAIIETYVMDSRIGQFXLPGPQPWSSLHLALPLHSVLRLLSSPLGTQRTTDKTMACGGENRKALSLDRASSLFSLPLSSLHSPFSIVSLCPL

SEQ ID NO: 276175 - protein, 121 aa, Zea mays
  Clone ID: MRT4577_183457C.1.pep
VCRQTWVDVTPRPGALMVNMGSFLQLVTNDRYKSVDHRVPANKSSDTARVSVAAFFNPDEKRTERLYGPIPDPSKPPLYRSVTFPDFIAKFNSIGLDGRVLDHFRLEDDGPTRLAAAAHHV

SEQ ID NO: 276176 - protein, 60 aa, Zea mays
  Clone ID: MRT4577_183458C.1.pep
TYTLKGVYIHPNVVSIVESLKRLILRNGGSISHEVCGTQLWHISFTIKAYTTQCTYIHGE

SEQ ID NO: 276177 - protein, 63 aa, Zea mays
  Clone ID: MRT4577_183459C.1.pep
IRRCVAVPSGVTERWQVRDIRRATSRSHLPVVGCLHGIRVDSVYVDSSYVNASSVNIVSYSVV

SEQ ID NO: 276178 - protein, 78 aa, Zea mays
  Clone ID: MRT4577_18345C.1.pep
GGERGHPSNRETTWFPHYRRVQHRGGLLTVPRERFTHTQGEAPLKKGFYKTRGVTIYPLHMFYVEGGASSKEKRKALL

SEQ ID NO: 276179 - protein, 85 aa, Zea mays
  Clone ID: MRT4577_183460C.1.pep
GSLTSRAYLQRHQLLPFSQLAGVSPVAFFPQPLLLSFYQPAAPPPGPLFHVPLLLPFPHLPLTNPAAFYPQPFIGGALFSVSFEL

SEQ ID NO: 276180 - protein, 94 aa, Zea mays
  Clone ID: MRT4577_183461C.1.pep
GNEVQTIRLGSRAISSVLPQAIWTHATMLKNKSASTLRIWMRLIVRLYGLYVHLTEKTFSPIAHGNANVDRDSKRNYGPEIAITTCECISVASL

SEQ ID NO: 276181 - protein, 140 aa, Zea mays
  unsure (1)..(140): unsure at all Xaa locations
  Clone ID: MRT4577_183462C.1.pep
QDTPKMFNRWTFDDVQVNDISLNDYLAVNATKHAMYLPHXTAGSYSKKRIRKXQCPIDERLTXNSLMMHXRNNSPXVMXAIRIIKHTLEIIHLLTDVNPIQVSVXRCINSGPREDAIAVIGSAVVVRRXACHMSPLRSES

SEQ ID NO: 276182 - protein, 51 aa, Zea mays
  Clone ID: MRT4577_183463C.1.pep
IPGRPRVRFFFFFFFFFFFFFFFLKGNKDIVYAFIWIPNLKKYKKGDRKLI

SEQ ID NO: 276183 - protein, 52 aa, Zea mays
  Clone ID: MRT4577_183464C.1.pep
RCYAMDVNMVRMQLYNMSMDISGSMDDLVVDICISKNNCSCFIQIYDNDAVE

SEQ ID NO: 276184 - protein, 90 aa, Zea mays
  unsure (1)..(90): unsure at all Xaa locations
  Clone ID: MRT4577_183465C.1.pep
TEKQRIFFLVSPFSFLPNWWVETIPARIVYQIKKTFDKREQFRVQSDEKKKALNLTKFKLGFGLXKKKKKKKKKKKKKKPKKKKKKKKKK

SEQ ID NO: 276185 - protein, 249 aa, Zea mays
  Clone ID: MRT4577_183466C.1.pep
MTKKQRREAGAMRRRDRHHHHRRQPRDERCVSCTTFNILAPIYKRMDNENCRESQYRAYWFSRNEKIIDRLLADHSSIICLQEVWLGNDELVDMYQKRLGDANYMLFKLARTNNRGDGLLTAVHRNYFNVLNYRELLFNDIGDRVAQLLHVESAMPFLQNRSTSCVHQQSLIVNTHLLFPHDHSLSIVRLRQVYKILQYIEAYLEEHKLGPLPIILCGDWNGSKRGQVYKFFAPQGFVSSYDTAHHTTA

SEQ ID NO: 276186 - protein, 46 aa, Zea mays
  Clone ID: MRT4577_183467C.1.pep
PKTLYQYIIEHHSSFSNPSYSTIIILFSTHKHTTLQLSFTKHNILL

SEQ ID NO: 276187 - protein, 50 aa, Zea mays
  Clone ID: MRT4577_183468C.1.pep
NDSPSIYAIITGTAPDSTKIIGDSGQDATLNGTGTEKDYNVDYSCSCHIL

SEQ ID NO: 276188 - protein, 219 aa, Zea mays
  unsure (1)..(219): unsure at all Xaa locations
  Clone ID: MRT4577_183469C.1.pep
GEVLLCVCFVQTKKQRREAGAMRRRDRHHHHRRQPRDERCVSCTTFNILAPIYKRMDNENCRESQYRAYWFSRNEKIIDRLLADHSSIICLQEVWLGNDELVDMYQKRLGDANYMLFKLARTNNRGDGXLLFNDIGDRVAQLLHVESAMPFLQNRSTSCVHQQSLIVNTHLLFPHDHSLSIVRLRQVYKILQYIEAYLEEHKLGPLPIILCGDWNGSKR

SEQ ID NO: 276189 - protein, 47 aa, Zea mays
  Clone ID: MRT4577_18346C.1.pep
FSSHPTSLPTCTGLRRTPQHPGQSQNHYLISCCHDHPHADYDASDTV

SEQ ID NO: 276190 - protein, 466 aa, Zea mays
  Clone ID: MRT4577_183470C.1.pep
GEVLLCVCFVQTKKQRREAGAMRRRDRHHHHRRQPRDERCVSCTTFNILAPIYKRMDNENCRESQYRAYWFSRNEKIIDRLLADHSSIICLQEVWLGNDELVDMYQKRLGDANYMLFKLARTNNRGDGLLTAVHRNYFNVLNYRELLFNDIGDRVAQLLHVESAMPFLQNRSTSCVHQQSLIVNTHLLFPHDHSLSIVRLRQVYKILQYIEAYLEEHKLGPLPIILCGDWNGSKRGQVYKFLRSQGFVSSYDTAHQYSDSEEDAHKWVSHRNHRGNICGVDFIWLLNPDKCRKPLKTSWNEAVFGIIKYFLQVAFLSEENAFALLKADSLYDHITYSSFYQALCQLGMVHPDRLKSEEIEELWSEADRDGDGVINYKEFQCIWSPNCCSQEEDTEIDITDESLDTFEANNEAFGFTVKEAVLFPPEVEKGMWPENYSLSDHAPLTVVFSPIRMPCSPRNRGGALAI

SEQ ID NO: 276191 - protein, 196 aa, Zea mays
  unsure (1)..(196): unsure at all Xaa locations
  Clone ID: MRT4577_183471C.1.pep
RWRCTAAATAASPRSAPRSANXDAPVRGHPVAGPXRWTPRANWRWWPRRXERLRRRLREATXRASTSSSPSPQRPTAAAAGRRRTPPSRLRLRPRPRRCCSPPVCNSSSSTAVPGTRSSRVGTARRQSRTWLPTPPPRGARTHTTASMTPTAADGSGTERPAESRAADGAFEVRVLSDRRRAEQRMELLRCVVCQW

SEQ ID NO: 276192 - protein, 986 aa, Zea mays
  Clone ID: MRT4577_183472C.1.pep
MPPLTSSLLSRSTTGGSSTRAAAAVAAISRPAAPSSSSPPARSTPRPRSSPASPFASGLASRLFGGHRAVARSASSAAAVFERRFASAATRNSYDEILTGLGRPGGGEEFGKYYSLPALSDPRIDRLPYSIRILLESAIRNCDDFQVTGKDVEKILDWERSAPKQVEIPFKPARVLLQDFTGVPAVVDLACMRDAMSKLGSDPNKINPLVPVDLVIDHSVQVDVARSANAAQANMELEFHRNKERFGFLKWGSSAFRNMLVVPPGSGIVHQVNLEYLARVVFNNGGILYPDSVVGTDSHTTMVDGLGVAGWGVGGIEAEAAMLGQPMSMVLPGVVGFKLSGKLRNGVTATDLVLTVTQMLRKHGVVGKFVEFCGQGMSELSLADRATIANMSPEYGATMGFFPVDGKTLDYLKLTGRSDDTVAMVESYLRANKMFVDHSQVDAERVYSSYLELNLEEVEPCLSGPKRPHDRVTLKNMKSDWLSCLDSDVGFKGFAVPKESQGKVAEFSFHGTPAKIKHGDVVIAAITSCTNTSNPNVMLGAALVAKKACELGLEVKPWIKTSLAPGSGVVKKYLDKSGLQKYLDQLGFNIVGYGCTTCIGNSGELDESVSAAITENDIVAAAVLSGNRNFEGRVHPLTRANYLASPPLVVAYALAGTVNIDFEKEPIGISKDGKEVYFRDVWPSTEEIAEVVKSSVLPDMFKSTYESITQGNPMWNELPVSTSTLYPWDPSSTYIHEPPYFKDMTMTPPGPRPVKDAYCLLNFGDSITTDHISPAGNIHPDSAAATYLKERGVERKDFNSYGSRRGNDEIMARGTFANIRLVNKFLKGEVGPKTIHVPSGDKLSVFDAAMKYKNEGHDTIILAGAEYGSGSSRDWAAKGPMLQGVKAVIAKSFERIHRSNLAGMGIIPLCFKAGEDADTLGLTGHERYTVHLPTNVSEIKPGQDVTVTTDNGKSFTCTLRFDTEVELAYYDHGGILPYVIRKIAEQ

SEQ ID NO: 276193 - protein, 205 aa, Zea mays
  Clone ID: MRT4577_183473C.1.pep
MGRGDGEGGMAPRGGVVGSGAMLGLDMHLAAQQMHPAAAAFQHQQDHHHDGFQLQQPPPPPSFSPYSNTSSSRVVVSAATVGHDEDTVGNGCCGKGGVVVQQQQQQQMAAAGCPWTRMKWTDDMVRLLISVVYSVGDDWEGAAMPGGAGGGKASRAGSSGHGHGHAGAAQQQKKGKWKSVSHAIMDKGFVVFAQQCEDKFNDLNK

SEQ ID NO: 276194 - protein, 48 aa, Zea mays
  Clone ID: MRT4577_183474C.1.pep
FSTVRTPGCASPRGTNRGAPTSSCSWSWPWLPARTTGGQAGSRRGSRL

SEQ ID NO: 276195 - protein, 61 aa, Zea mays
  unsure (1)..(61): unsure at all Xaa locations
  Clone ID: MRT4577_183475C.1.pep
VVXXQLLXTXLHCXWLSXQXXXXVFPFXXLXRTLLSXGVXXGXXMATEXRERPTQNXQKRP

SEQ ID NO: 276196 - protein, 64 aa, Zea mays
  Clone ID: MRT4577_183476C.1.pep
HPPPLFKKGTFFYHLLQKAPFFLGEIYHTLILRQRVVPKVFLRPQNPKTFGPFFIPPLKQVFKA

SEQ ID NO: 276197 - protein, 74 aa, Zea mays
  Clone ID: MRT4577_183477C.1.pep
SYTNTHNQKTIQKTSQLFKKLAIVLVKSKHKNTSRECEADALSYNPTHHIANSTAIPNTNRVTDTKLTTTTAAE

SEQ ID NO: 276198 - protein, 81 aa, Zea mays
  unsure (1)..(81): unsure at all Xaa locations
  Clone ID: MRT4577_183478C.1.pep
MATKVFXSLRMLLALSACVAYATIYTQCLQAPIXSFIISYLASMIASVCENPSLQPYRLQQAIAACNIPLSTLFQQSSVLS

SEQ ID NO: 276199 - protein, 191 aa, Zea mays
  Clone ID: MRT4577_183479C.1.pep
TDKVRKRDVVVKLSGATAGASVRVVQLDSAFPIGSCINGTVIQDPAFVDFFTSHMDWAVFENELKWYWTEAERGQLNYADADRLLDFCDRAGKPVRGHCIFWAVDGEVQQWVKDIGRDDPDQLMAAVRDRLGGLLGRYAGRFPHYDVNNEMLHGRFFRDRLGDGVAALMFREAARLDPAAALFVNDYNVEC

SEQ ID NO: 276200 - protein, 46 aa, Zea mays
  unsure (1)..(46): unsure at all Xaa locations
  Clone ID: MRT4577_18347C.1.pep
SAKNLIRKMLCPCPSERLKAHEVLRHPWICENGVATDQALDPXVLS

SEQ ID NO: 276201 - protein, 84 aa, Zea mays
  Clone ID: MRT4577_183480C.1.pep
RGGGWRLSGCCSQQGYENGPAACRRCCLRGACEGGGLGGGRLQVRHYERISSIDSGKNPLHQTLARGEGGREGEAAAAAASPRR

SEQ ID NO: 276202 - protein, 112 aa, Zea mays
  unsure (1)..(112): unsure at all Xaa locations
  Clone ID: MRT4577_183481C.1.pep
TSLLFILIVGIFASSWVGTSVXWGGEWFIKKMPFVRHIYSASKHVSTAVSPQLITTAFIEASIFSHPRVVEYAFGFITSTIVLXTDKGDEEYCSGYVPXNHLYIGDIILVNS

SEQ ID NO: 276203 - protein, 93 aa, Zea mays
  Clone ID: MRT4577_183482C.1.pep
MDKSMLGDLDGLPEEDKMRMAAMIDQLQIRDSLRMYNSLVERCFTDCVDTFRRKNLDKQEESCVRRCAEKFLKHSMRVGMRFAELNQGVATPD

SEQ ID NO: 276204 - protein, 93 aa, Zea mays; identical to SEQ ID NO: 276203
  Clone ID: MRT4577_183483C.1.pep

SEQ ID NO: 276205 - protein, 81 aa, Zea mays
  Clone ID: MRT4577_183484C.1.pep
ILILTTYYIKNKTRPKWGEHNLTSLPSSGQGEPLCPCQSPPLYLLYSKGQRLQMIQDPRMIIEFSPTPPLDHHSPMPARVS

SEQ ID NO: 276206 - protein, 90 aa, Zea mays
  Clone ID: MRT4577_183485C.1.pep
RPPRGCHCDALRWRWAASRLSRRGERPEEAVVRRLSWSLSCQNSRSYPSMAVFCFSRGGRRREAELSRAIETVEELHPSDKCARCRRLYG

SEQ ID NO: 276207 - protein, 112 aa, Zea mays
  unsure (1)..(112): unsure at all Xaa locations
  Clone ID: MRT4577_183486C.1.pep
MGDLVVGLAKSVVXEGVLTKAQSAIEEESKLRQSAQRDLVFITGEFEMMHSFLNVANEERGQNNVVRTWXVRQVRDLAXDVEDCIWILLFTWDNRXPLVAPLHTIMYASIGT

SEQ ID NO: 276208 - protein, 207 aa, Zea mays
  Clone ID: MRT4577_183487C.1.pep
QLKEIAVGLERSGHRFLWVVRAPLPTEGMDPERLFDPRADFDLCALLPAGLLERTRARGVVVKLWAPQVNVLNHRATGAVVTHCGWNSVMEAVTAGVPMLCWPMYAEQKMNSVVMVEEAGIGVDLVGWQQGLVNAEEVERKVKMVMEFKEGEQLRARVTAHRDAAAVAWKDGGSSRAAFGLFLSDVDNHVHKAKTWSSANGRDGKLG

SEQ ID NO: 276209 - protein, 89 aa, Zea mays
  Clone ID: MRT4577_183488C.1.pep
NELQLEQSRAANQEQRANELEQIMDSVKSKIGELEDESLSRACHQQNKIKDLQKEQKTLQVKCQHYKKKRTEQEETIASLQMEVCRLKR

SEQ ID NO: 276210 - protein, 188 aa, Zea mays
  unsure (1)..(188): unsure at all Xaa locations
  Clone ID: MRT4577_183489C.1.pep
MRDPQNAKDPDAIKVLHAGSECEEMLGYLPRDLAKVLAPLVDKHYVECEGSVVGLHEQQFGNVPIQITIQKCKSDNQRNNDPNCCQSLWENFVSTVKRENFRRPHSARYQTNFNLMIAXVMVNHAHVFSDIEKSFLASFKSLSDDGQRLFIRIYTRKGPWFRKGSISYQEISDLEHAVMELELAGYID

SEQ ID NO: 276211 - protein, 176 aa, Zea mays
  Clone ID: MRT4577_18348C.1.pep
QPPYSSSQQQYQQQQHEVAHSFYGQGNTVLLPVADHNAQHQQPQPVQLHSQGPSCPPQPGKPSHCSAAPYAVQGNGQTYSSAYKNPSNCPATAAVVALLPQPPAIACMAYHPLGPQVVHNHPFGNTMVETSRSSVVGYPRDQFEMLPAITAAQPVLPVDKLNAGSNVTSSPREWSA

SEQ ID NO: 276212 - protein, 118 aa, Zea mays
  Clone ID: MRT4577_183490C.1.pep
KKKKMINRGSCFKPGGFFGREQKPVVFWEQPPRETNPSLFPYQKERGPTLVSWGNTEPRWFRNILMPFTMGPPRARNRSPPPGQKRPCRPQLLLKPRPTKKGPGQGPPCPGCCTGNPG

SEQ ID NO: 276213 - protein, 95 aa, Zea mays
  unsure (1)..(95): unsure at all Xaa locations
  Clone ID: MRT4577_183491C.1.pep
SGRTARRAGTRAAPVRNPTYXGRQTPPPXPVRDGAGSMFTATGSTIAQGMPFRTGSALTHRIVDAVXSPXTFFHDTVAGEAADADPAPSKMNVDA

SEQ ID NO: 276214 - protein, 204 aa, Zea mays
  Clone ID: MRT4577_183492C.1.pep
MAAAAGDGGSVPPKTPIAESPPASRPHVTRNAMPWEKCVAGVQLALKDPKVVFLREQIEKAGCTVWPTLFRAAICRSGGNYASGMGVVVCCNHMRRQDEITQVIIHELVHAYDDCVVKNIDWKNCADHACSEIRANHLSGDCHYKRELMKGFLKIKGHEPECVKRRALLSVKVNPHCSEKDAEAAVEKVWDMCYNDPRPFDKAL

SEQ ID NO: 276215 - protein, 76 aa, Zea mays
  Clone ID: MRT4577_183493C.1.pep
RNGRHGFRTLSGRGAPPRCFCCLASGGEPPWRAALPCGRWSSALGPCFSYPGGTGSGPSGSCCTAVGTLRSAAGTA

SEQ ID NO: 276216 - protein, 71 aa, Zea mays
  Clone ID: MRT4577_183494C.1.pep
VHRGAVGSRGARSRASGSASAWQCARPCPPDPLYLPMSSACILLLLFCWVYLCMEERPILFSPRPGKGSLA

SEQ ID NO: 276217 - protein, 67 aa, Zea mays
  Clone ID: MRT4577_183495C.1.pep
CNESIGAGSNKKPFCFAIQLPCMAQNHVHYLKTKIKIQLPCMGQNHTSSQCFAAQPEANYYKNLTFF

SEQ ID NO: 276218 - protein, 136 aa, Zea mays
  Clone ID: MRT4577_183496C.1.pep
LAPIHDLSLSLLSPDLEQIWHALSSPAMSSPSRSFFVCRRARRPAWASFSPPEPREPLRLSSRRTFPAVDTRFRPSIVYHGARLSSAGQESTWQVALVSMVPGRRSRRPLSSSAEGDSGRLPQVHGWHGLLSSSAV

SEQ ID NO: 276219 - protein, 168 aa, Zea mays
  Clone ID: MRT4577_183497C.1.pep
MANGSNWLGFSLSPHTAMEVPSASEPASTHHAPPPPSSSTTISSSSTNNTISSNFLFSPMASPYPGYYCVGGAYGDGTSAAGVYYSHLPAMPNKSDDGTLCNMEGMVPSSPPKLEDFLGGGNGGGQETATYYSHQQQGQEEGASRDYRQYHYQHQQLVPYNFQPLTEA

SEQ ID NO: 276220 - protein, 40 aa, Zea mays
  Clone ID: MRT4577_183498C.1.pep
QHETNYYVMMLVHIGLYYNIWKYSHYYRDRDSFCKRAICP

SEQ ID NO: 276221 - protein, 94 aa, Zea mays
  Clone ID: MRT4577_183499C.1.pep
PSTPSQLPVGRTPVPSSASRDPPPGRTPLRPLPLHRCQGGLQSRPPTPPVASFPERIMLLCVALADSGRTSRRRDVANPAHAARRTDHAGLASS

SEQ ID NO: 276222 - protein, 79 aa, Zea mays
  Clone ID: MRT4577_18349C.1.pep
RRAGRSKPPAGSSRPISVARERVAARGFSLGAVVIPAGSGVGFKILGGTYRLGLGPRDKPTAREPHLLAGRKPRPCSDG

SEQ ID NO: 276223 - protein, 318 aa, Zea mays
  Clone ID: MRT4577_1834C.1.pep
MASISEPAAREKPIVVRVKRKPSQNRPDAFWLEINERPAKKAAIDFSRLSISEPSSSSASVKASEEPRVKKILVQHIETVHHSEAVEDVLQSLLLVDSNSKETKSKTKEWNDRIKQDKKPEQLRSAARQRHEDMGRNARFAQIWKSRKGEKADAGDSLREICHLYDAVQVDPDDEKHPAEPRITSFEEGAVLCNFLPLIREYLPSTAEEIEADIISLAQSEDSEVYDIYTVKEVDDTMEATSAASYPRLQVDDGEDECYEDCPYDTDDSNAEDNPLFDYPDESSEDEDDGRNDEDPFGDKEGSDSDYEKEEVEVEEDE

SEQ ID NO: 276224 - protein, 96 aa, Zea mays
  unsure (1)..(96): unsure at all Xaa locations
  Clone ID: MRT4577_183500C.1.pep
MNPLLHTGHTSHLGGPNNESLPRXHLPTYSAHSNKRRCKLIFTTRSVRRGRQNGVQMLSPXSEIPQRDWVRCDFTFEAGTSRYQTEGGWNEHGRGE

SEQ ID NO: 276225 - protein, 114 aa, Zea mays
  unsure (1)..(114): unsure at all Xaa locations
  Clone ID: MRT4577_183501C.1.pep
ARAGAIAPCEVTVPAQNTGLGPEKTSFFQALGITTKISRGTIEILSDVQLIKTGDKVGASEXTLLNMLNISPFSFGLVIQQVFDLGSIYNPEVLDITEETLHSRFLEGVSNVAI

SEQ ID NO: 276226 - protein, 70 aa, Zea mays
  Clone ID: MRT4577_183502C.1.pep
DVQHKGLLSQVSDRVRYECLTVPGAVVVISCIRAVRHQERRFGHALRPGTEALCGWAAVSLWGLPCVARP

SEQ ID NO: 276227 - protein, 73 aa, Zea mays
  Clone ID: MRT4577_183503C.1.pep
PFARSFMFPSLGGTKPTRFFPPVDKVSPKYFWPCTTCSMLGKKLPKQKVKIQDEVGAKKEFTQVFFPQKDGAI

SEQ ID NO: 276228 - protein, 90 aa, Zea mays
  Clone ID: MRT4577_183504C.1.pep
REVGGPIRNALFPRFWDNFSKDQVPEKRKTMFSLPFLGALKRGGVSGLPVALKFFRFPGPLRGFSVLKKMGTKREVGCKAPWWEKMVVEP

SEQ ID NO: 276229 - protein, 88 aa, Zea mays
  Clone ID: MRT4577_183505C.1.pep
MSQNNPSQLLPSELIDRCIGSKIWVIMKGDKELVGTLCGFDVYVNMVLEDVTEYEYTAEGRRITKLDQILLNGNNIAILVPGGSPPDV

SEQ ID NO: 276230 - protein, 352 aa, Zea mays
  unsure (1)..(352): unsure at all Xaa locations
  Clone ID: MRT4577_183506C.1.pep
HSHDGGPAASSGSAQPAASPYCTLLRAALFGPDTPDXSRPRPPRAPPRPPPPSPPRGPRLSAPXTGNIFRFKTEVRRNAKRALFSGDQEEDALFPGIFTTRGAGPRKVPRSPYKVLDAPALQDDFYLNLVDWSSHNVLAVGLGNCVYLWNACSSKVTKLCDLGVDDNVCSVGWAQRGTHLAVGTKQGKVQIWDATRCKRIRTMESHRMRVGALAWSSSLLSSGSRDKSILHHDIRAQEDYVKRGEAIVNGTHRSLSQKTTRPSQTPVYGPAGRRRCSRAPAPRRRTAHRLHRVAPIHPRASASRRDQGGRRGGTQTPGSPPCCPFGAGPCRRMPPVLPPAASRPLQPATPSR

SEQ ID NO: 276231 - protein, 86 aa, Zea mays
  unsure (1)..(86): unsure at all Xaa locations
  Clone ID: MRT4577_183507C.1.pep
MQHRGFLVLTLLALLALTSXVANKKDKVKKGGPGTECADWAWGXCTPSSKDCGVGFRKGTCGAQTQRIRCRVPCNWKKEFGTACKY

SEQ ID NO: 276232 - protein, 88 aa, Zea mays; identical to SEQ ID NO: 276229
  Clone ID: MRT4577_183508C.1.pep

SEQ ID NO: 276233 - protein, 93 aa, Zea mays
  Clone ID: MRT4577_183509C.1.pep
PTDSGVVTSLQNRESYVLVVFEVGHGEGGEHASVIGGGDGARHGKPPELMGRGALNYLEPVPCRRCVGRGVCIRMKPVRWRWRVQRQLCVLDL

SEQ ID NO: 276234 - protein, 598 aa, Zea mays
  unsure (1)..(598): unsure at all Xaa locations
  Clone ID: MRT4577_18350C.1.pep
MPGLPLPQSLNQNIGCEYAYPGSTGQAFRQQLRTALSPDEKLTAEKDLALYCKPVELYNIIQRRAMKNPLFIQRCLLYNIHARRKKRIQITISLSGSTNTELQTHYVFPLYVLLARPTSNLSLEGHSPIYRFSRVCLLTSFSEHGNKDNSEATFIIPDVKSLSTSRACNHDIIFISCGQVGQIIGEDNXWESCGRFFSPNAXGKCSWGKIPTNLLASSLEKCVTLSTGHIVELASKVTMRPSFLEPKFLEQDSCLTFCSHKVDAVGSYKLQLCMSAEEAGARELLLSPYYCNYSYNNVPPSLLPEIIRLRAGNVLFNYKYYNNTMQKTEVTEDFSCPFCLVPCGSFKGLGCHLNSSHDLFHYELWISEECQAVNVSLKADAWKTEFVAEGVDPRHQTFSYCSRFKKRRRXKPQLRNSGMXPHIMESGSHEDAQAGSEDDYVQRENGLSVANTSVDPSQPVHGSNLSPPTVLQFGKSRKLSAERSDPRNRQLLQKRQFFHSPRAQPMPLEQSSQIMKIIMHMWNSFVRKQRVLADGHIPWACEAFSQLHGRQLIQNPALLWGWRFFMIKLWNHNILDARTMNTCNTVLQILQEESTGLK

SEQ ID NO: 276235 - protein, 122 aa, Zea mays
  unsure (1)..(122): unsure at all Xaa locations
  Clone ID: MRT4577_183510C.1.pep
MSDLDIQIPTAFDPFAEANAGDSGAAAGSKDYVHVRIQQRIGRKSLTSVPGLKKEFSFXXILRDLXREFCCGGSVVPDPELGQVVRLWGVQRENVSIFLVPAGLVGEGPVGVSGCLGIRRVP

SEQ ID NO: 276236 - protein, 94 aa, Zea mays
  Clone ID: MRT4577_183511C.1.pep
NDVARKNYLQGYVTCLSKAVRNGANVRGYFVWTLLDNFEWTFGYTVRFGLYHVDYDTQERTPRMSATWYQGFLTAGNTSLVTHEDEAQARRADA

SEQ ID NO: 276237 - protein, 112 aa, Zea mays
  Clone ID: MRT4577_183512C.1.pep
MSDLDIQIPTAFDPFAEANAGDSGAAAGSKDYVHVRIQQRNGRKSLTTVQGLKKEFSYSKILKDLKKEFCCNGTVVQDPELGQVIQLQGDQRKNVSNFLVQVRTIRCNTLCA

SEQ ID NO: 276238 - protein, 205 aa, Zea mays
  Clone ID: MRT4577_183513C.1.pep
MEAAAGLKCAAVTAELVGTAFGLIAKIKQTVETARQNKLECDHLKGRLPTIGDVLHRLPPDPEVERPLAELIDLLQQAYDLIVDCQKRSAASQLFRASKHADRLRAVNARIDSNLSLFPLITYAAIARRLDKQGRSCAACPHKVEDVLVAERKILEILPPRHTDTVVPECSSAVSPQNAEDAFCGAVQDPAGSFPLAAAARCRTA

SEQ ID NO: 276239 - protein, 115 aa, Zea mays
  Clone ID: MRT4577_183514C.1.pep
MSDLDVQIPTAFDPFAEANAGDSGAAAGSKDYVHVRIQQRNGRKSLTTVQGLKKEFSYSKILKDLKKEFCCNGTVVQDPELGQVIQLQGDQRKNVSNFLVQAGIVKKEHIKIHGF

SEQ ID NO: 276240 - protein, 119 aa, Zea mays
  unsure (1)..(119): unsure at all Xaa locations
  Clone ID: MRT4577_183515C.1.pep
MSDLDIQIPTAFDPFAEANAGDSGAAAGSKDYVHVRIQQRNGRKSLTTVQGLKKEFSYSKILKDLKKEFCCNGTVVQDPELGQAARXVIQLQGDQRKNVSNFLVQAGIVKKEHIKIHGF

SEQ ID NO: 276241 - protein, 119 aa, Zea mays; identical to SEQ ID NO: 276240
  unsure (1)..(119): unsure at all Xaa locations
  Clone ID: MRT4577_183516C.1.pep

SEQ ID NO: 276242 - protein, 76 aa, Zea mays
  Clone ID: MRT4577_183517C.1.pep
RNGRKSLTSVQGFKKEFSFSKILKDFKKKFCCNGTVVQDPELGQVIQLQGDQRKNVLNFLVQAGLVKKEPLKIHGF

SEQ ID NO: 276243 - protein, 49 aa, Zea mays
  Clone ID: MRT4577_183518C.1.pep
SGYLDYHFKPHKLIIDSSAVSTSEYMASASSAQIAAAPLRIGYRKPASI

SEQ ID NO: 276244 - protein, 115 aa, Zea mays
  Clone ID: MRT4577_183519C.1.pep
MSDLDIQIPTAFDPFAEANAGDSGAAAGSKDYVHVRIQQRNGRKSLTTVQGLKKEFSYSKILKDLKKEFCCNGTVVQDPELGQVIQLQGDQRKNVSNFLVQAGIVKKEHIKIHGF

SEQ ID NO: 276245 - protein, 269 aa, Zea mays
  unsure (1)..(269): unsure at all Xaa locations
  Clone ID: MRT4577_18351C.1.pep
PLSTSRACNLNIIFISRGQVGQIIGEDSCSGNDVEGSSLQKLEGKCSWGKMPTNLLAPSLEKCVTLSTGDAVDLTSTVTMNPSFLEPKFLEQVCISAEEAGARELLLSPYYCNYSYNNVPPSLLPEIIRLRAGNVLFNYKYYNNTMQKTEVTEDFSCPFCLVPCGSFKGLGCHLNSSHDLFHYELWISEECQAVNVSLKADAWKTEFVAEGVDPRHQTFSYCSRFKKRRRXKPQLRNSGMFTHILWNQDHMKMPRQGLKMTMCKGKMGF

SEQ ID NO: 276246 - protein, 99 aa, Zea mays
  Clone ID: MRT4577_183520C.1.pep
SKRWHLQPWVAAPPQAGFLQREPGCMASNCPSCRKAPPPCISPCQWINLQLPLPKAPTKVPLSQLLSWNQQKKVPPPPCCRYLILNFVHYVPPTVAPGT

SEQ ID NO: 276247 - protein, 115 aa, Zea mays; identical to SEQ ID NO: 276244
  Clone ID: MRT4577_183521C.1.pep

SEQ ID NO: 276248 - protein, 41 aa, Zea mays
  Clone ID: MRT4577_183522C.1.pep
PYPSFQNSPCHLIQPPLTKSLSPEFNNNFFFSSMLNSKTIV

SEQ ID NO: 276249 - protein, 54 aa, Zea mays
  Clone ID: MRT4577_183523C.1.pep
RLEQRMRHLGIYESCMIYHRWTLELLLVKLGLINWCSSDRTNELKHNHCVVLCR

SEQ ID NO: 276250 - protein, 115 aa, Zea mays; identical to SEQ ID NO: 276244
  Clone ID: MRT4577_183524C.1.pep

SEQ ID NO: 276251 - protein, 141 aa, Zea mays
  Clone ID: MRT4577_183525C.1.pep
VSVRRRSPSPPRRHRSPMRPSPRRGRGSPSPRRRSPGPLRRRSPPPRRLRSPPRRPPPPRRYSRSPPRRPLRSRSISPRRGRGPLLRRGRSGSSYSRSPTPPPRKGPRRVSRSRSPRRPPRGRSISSDSRSSSSPSPRRGR

SEQ ID NO: 276252 - protein, 100 aa, Zea mays
  unsure (1)..(100): unsure at all Xaa locations
  Clone ID: MRT4577_183526C.1.pep
PVPPLLPWRPRRGGCGGAASGPSSSRRARPLXXGGCRRRRRRCRGPAPRXVGAGLGPEVPAGAGRGGASAQGWWPHRLLCRGCCRCWAWPPTRVSLPWSG

SEQ ID NO: 276253 - protein, 66 aa, Zea mays
  Clone ID: MRT4577_183527C.1.pep
KKKKKKKKKKKKKKKKKKKKKKKNKKKKYKSYFFSFVPGPLWGFFFGIFRFPLGGLFWGVLLGGPF

SEQ ID NO: 276254 - protein, 146 aa, Zea mays
  unsure (1)..(146): unsure at all Xaa locations
  Clone ID: MRT4577_183528C.1.pep
MADLALAGLRWAASPIVNELLTKASAYLSVDMVREIQRLEATVLPQFELVIQAAQKSPHRGILEGWLRRLKEAYYDAEDLLDEHEYNVLEGKAKSGKSLLLGEHGSSSTATTVMKPFHAALSRARNLLPXNRRLLSKMNELXAILT

SEQ ID NO: 276255 - protein, 70 aa, Zea mays
  Clone ID: MRT4577_183529C.1.pep
ATPPCRFFLRGTKKPLGTFLSLYLTYVVDLLFCFQKCICFSNFKHLTILFHHSTSISFFYTALACVPFST

SEQ ID NO: 276256 - protein, 735 aa, Zea mays
  unsure (1)..(735): unsure at all Xaa locations
  Clone ID: MRT4577_18352C.1.pep
MDEGGRRPMHFKRRVSVRHPLPRFNRDHALAAAIDSTRPDRAPRAQQTLTITSSPSPTPYTGARPLRVVSDSTSSKTTSGLLEFHLNCAGEGRLPTHPRRPQRRRSFPNPQPPAAVSLFRSSGGCYLPGILEMCLQHSRARLSPDEQLAAEKSFALYCKPVELYNIIQRRAIKNPPFVQRSLLYKIQARRKKRIQITVSLSASTNTQAQNIFPLYVLLARPTSNISLEGHSPIYRFSRACLLTNFSEFGNKDKTEATFIIPDVKNLSTSRACNLNIIFISRGQVGQIIGEDSCSGNDVEGSSLQKLEGKCSWGKMPTNLLAPSLEKCVTLSTGNAVDLTSTVTMNPSFLEPKFLEQDSCLTFCSHKVDATGSYQLQVCISAEEAGARELLLSPYYCNYSYNNVPPSLLPEIIRLRAGNVLFNYKYYNNTMQKTEVTEDFSCPFCLVPCGSFKGLGCHLNSSHDLFHYELWISEECQAVNVSLKADAWKTEFVAEGVDPRHQTFSYCSRFKKRRRLETTAEKIRHVHSHIMESGSPEDAQAGSEDDYVQGENGLSVANASVDPSQSLHGSNLSPPTVLQFGKSRKLSAERSDPRNRQLLQKRQFFHSHRGLRXPMPLEQVLSDHDSEDEVDDDIADFEDRRMLDDFVDVTKDEKLIMHMWNSFVRKQRVLADGHIPWACEAFSRCHGQQLVQNPALLWGWRFFMIKLWNHSLLDARAMNACNTILQGYQDGSADPK

SEQ ID NO: 276257 - protein, 87 aa, Zea mays
  Clone ID: MRT4577_183530C.1.pep
HGRCAQTLQSVAPMAYYQEVDYCSEEVRSLSPAGFCRHSFGFQHYVFNEKFEEVDTVLRAGANHHLHHGHHGCHGFLVRRDQVLIGH

SEQ ID NO: 276258 - protein, 73 aa, Zea mays
  Clone ID: MRT4577_183531C.1.pep
RPQYGRKIVVSHVVCSLAFQKSMSVCQIEVHRIYKGTTMICVVATFISRSFSGLRSSHVILILHVISFVMVVH

SEQ ID NO: 276259 - protein, 106 aa, Zea mays
  Clone ID: MRT4577_183532C.1.pep
RIITRRGRDLSKACSATFLCRFKRSLFLFSGPFKVGTSDSYVVFKQLARRKLSLSSITLGISTSTSGRNSITQYSFNWSPNPQGPGTLSFNRFRKPVCGAPGPQPK

SEQ ID NO: 276260 - protein, 103 aa, Zea mays
  Clone ID: MRT4577_183533C.1.pep
MGPHINPFKPRRHPRRKRQRHPWAKPGTGNRFVSRGGNFWPNRVTPNRGITRGTGPRNINRGGGGNGGVNNGGTGNGKGMGPGNREVTGRELLGRHVFQSGQH

SEQ ID NO: 276261 - protein, 116 aa, Zea mays
  Clone ID: MRT4577_183534C.1.pep
AILSISSQGAIFQKWSLSTVNNIGRTQVFDLGSTPSGLSCPSPILGNYQTGWSTDGQCSVRLCGLTDPCESRAQLFHNAPTNGFDGEVCSTVVTSPETAIGACNPAGGQWLKHPWV

SEQ ID NO: 276262 - protein, 50 aa, Zea mays
  Clone ID: MRT4577_183535C.1.pep
VNRCQSFLLAALVSMLGRSRCQMRPHPLVRGWEMSAVKDLESVASRTLIT

SEQ ID NO: 276263 - protein, 108 aa, Zea mays
  Clone ID: MRT4577_183536C.1.pep
GLKSRDRDKRLNRARGQSRRPLRQRIIAVTTMHGGYRTPLYCPLKERLELSVFSFHLHAARIFSALCSHAISSFYSHPAISTFIRLPVLVIYTLILVTLPPPGPPPPP

SEQ ID NO: 276264 - protein, 121 aa, Zea mays
  unsure (1)..(121): unsure at all Xaa locations
  Clone ID: MRT4577_183537C.1.pep
YASHADYKYLPMCDEMDSMSEARIYSSRVICLMFITADQGVMRTPDVTAXLRCIXRTRLDEDMXELAHTVPSTGQYYQEETAPTVTCAACAXGSNRIXIAKLSEGNCYKSEQLEIPQIWAL

SEQ ID NO: 276265 - protein, 98 aa, Zea mays
  unsure (1)..(98): unsure at all Xaa locations
  Clone ID: MRT4577_183538C.1.pep
MDKVLAFSILSASPADLSSTGAGFGGSWARLSWRRGADDQRAPRREQQKQQQEXGQGEARLALPRRRSAREXGGAAAAPPRFAPEFDGIDWFGTIVSR

SEQ ID NO: 276266 - protein, 92 aa, Zea mays
  unsure (1)..(92): unsure at all Xaa locations
  Clone ID: MRT4577_183539C.1.pep
DCSMLVMDDAYFLLAPXFHPSVESLMXVLPPILHLFMLSSSSPVTFIEFIDKYTPIPYFINLMYLLFLFFFTLFFSFFNKCINXHCLNTLFL

SEQ ID NO: 276267 - protein, 82 aa, Zea mays
  Clone ID: MRT4577_18353C.1.pep
MDPGLVCNMTVMGYVPELWGLNYKDDQVNRIIYPEHTVSFAKLSRIKKDDLIETSINVILKQPPFIATANRSVANVRAVSSA

SEQ ID NO: 276268 - protein, 75 aa, Zea mays
  Clone ID: MRT4577_183540C.1.pep
GHSYAHSCTDHWSWARRRGWRVIECILTTTLTLTLIKYESPFTEIERARCDKHHPCFEQHLTRLAYIILLDHYVQ

SEQ ID NO: 276269 - protein, 108 aa, Zea mays
  Clone ID: MRT4577_183541C.1.pep
MAHSPSGSHVAATSVGNEAFTDAVAEDGGDSKLSALLFDVSQQVQDGLQSMLKTSSEIARCDGEIDAELERARDAVAENARALHDERERVQKAALAALDILSGGRCVI

SEQ ID NO: 276270 - protein, 209 aa, Zea mays
  unsure (1)..(209): unsure at all Xaa locations
  Clone ID: MRT4577_183542C.1.pep
HWVPRGRPGFCVTCXQRCHHVNLYQQASWIDYGHQGMYWRHPSHVVRPFTXEDILYLDPPLEYDREAHPXLVLLPSPVALAGVSHTMSFSSAELSCXYELAPQXNNIVLXLLRHLLTRHKXMEALRLPNLSSXKPHFSQCLXGFWLPDLDAHISRPSASHYQVXNXADSPMNSLLEKTCNLLHNFPEYMDVMSQXAKMTDGRHCLDAFS

SEQ ID NO: 276271 - protein, 122 aa, Zea mays
  Clone ID: MRT4577_183543C.1.pep
MAHSPSGSHVAATSVGNEAFTDAVAEDGGDSKLSVLLFGTTTPPAVRFCSLLDVSQQVQDGLQSMLKTSSEIARCDGEIDAELERARDAVAENARALHDERERVQKAALAALDILSGGRCVI

SEQ ID NO: 276272 - protein, 106 aa, Zea mays
  Clone ID: MRT4577_183544C.1.pep
SHSTGQSLWAGSSGEARPIRFQNEKGTPFFFFGFRPAFFFSLFFGFPNLIRRIFQLARGGNPSRILLLCPPSPLVLLIPPYLVPGGKRVKLVPAPRAFCRGVGLGG

SEQ ID NO: 276273 - protein, 87 aa, Zea mays
  Clone ID: MRT4577_183545C.1.pep
NSMCSSHTGTRGSPTRVNGLELIEIEISDDEYGCLVRSLNRDTDTHSFYIVSRTYWKGHDCRRITYRYTLRYAGYYFEASTTADARH

SEQ ID NO: 276274 - protein, 97 aa, Zea mays
  Clone ID: MRT4577_183546C.1.pep
ALGLRSLWPVEARREKYELTRTLHVSWPLRLGWRRLLHIGDVDGQHGLLLIPPAGPRRRASADAWWWWCVNAIRPAVCLFDFPRAIRVSTSASRLAF

SEQ ID NO: 276275 - protein, 119 aa, Zea mays
  Clone ID: MRT4577_183547C.1.pep
MLSSSSAPSDSEGLDEDVLIPGLPTRFTYADLDAATDGFKWQIGSGGFGSVFRGKFPDRSPVAEKRMNGLGTQGRREFLTEIALIGNVHHVNLVKLRGFCAEGTGRKLLVYEYMNRVSL

SEQ ID NO: 276276 - protein, 91 aa, Zea mays
  Clone ID: MRT4577_183548C.1.pep
ENSTRITYSMVSVLHDVLLSTYVCTSYYCDVSWWATVYSVPCMRTPYTCICMRLGRLELGGEAFHLELKLLHGVLGQADGHDGALLPLGVL

SEQ ID NO: 276277 - protein, 91 aa, Zea mays
  Clone ID: MRT4577_183549C.1.pep
PRQMKGPEFAATSSGYTKEVDATLKVLSASMVSFIRNWPVIEGHSPGTLWAQRVLRTHCQVTECLETRGVSDSQGVERLDWTRGSVHRLQG

SEQ ID NO: 276278 - protein, 298 aa, Zea mays
  unsure (1)..(298): unsure at all Xaa locations
  Clone ID: MRT4577_18354C.1.pep
TRPEDFSCPFCYVRCGSFKGLGCHLNSSHDLFHYEFWISEEYQVVNVSLKADAWRTELFAEGVDPRHQTFSYRSRFKKRRRSKNTMEKIRHVHSHIMESGSPEDEAGSEDNFVQGENGTSVANASXSCSIFTWQQSFTXPTVLQFGKTRKLSERSDPRNRQLLQKRQFFHSHXAQPMQLEQVFSDRDSEDEVDDDIADFEDRRMLDDFVDVTKDEKLIMHMWNSFVRKQRVLADGHIPWACEAFSQLHGRQLIQNPALLWGWRFFMIKLWNHNILDARTMNTCNTVLQILQEESTGLK

SEQ ID NO: 276279 - protein, 84 aa, Zea mays
  Clone ID: MRT4577_183550C.1.pep
RAGGTELGHNSLGDVVLPVINQVGVAKPLSLLSAEPVSFFHQLSTWIPGALLARGGGYPFSQLSCWLLSATTTSSSKQLGQLGS

SEQ ID NO: 276280 - protein, 92 aa, Zea mays
  Clone ID: MRT4577_183551C.1.pep
MPTWSLLLVSTTVIQGARCSFLRNSLFQIWQLGHGDYSASRTKVFRMVNTLGVNNEAKQTIQVLQAELNETKERLHTVEELKGQTAHYLYCS

SEQ ID NO: 276281 - protein, 90 aa, Zea mays
  unsure (1)..(90): unsure at all Xaa locations
  Clone ID: MRT4577_183552C.1.pep
FYPPTGTPFPPSAPLFSSSSPPPLFRLLGAPRRFPVAPPHPPPDQKIFKKKKTKNQKKKKIKKKKNXKKKIKKKKKKKKKKKKKKKKKKK

SEQ ID NO: 276282 - protein, 70 aa, Zea mays
  Clone ID: MRT4577_183553C.1.pep
CKPQLGSLVGVTCWAVLYAWYLSYSALLLTLLNWSLGVWSKKKVAVFSRNMRPPSSGVNEGRRLWKLDIT

SEQ ID NO: 276283 - protein, 108 aa, Zea mays
  Clone ID: MRT4577_183554C.1.pep
NSARGTHLHSTPPAQQTWPNWAALTLEAPASGSLLLEDPGHRIGGLVRYSAPGLPGALLGRDTRPQRQDHADHARGLLRCCGQAVPRGLPMREPARRLLNFSSPEGSD

SEQ ID NO: 276284 - protein, 87 aa, Zea mays
  Clone ID: MRT4577_183555C.1.pep
SRRGGASPNKPFFKRTRGKQTFPSRRLIVIENQPTNIASKTDFPTNQQKDGHRASFFFTGGNQKKNGRASPRAPFFFGRTNKLTACL

SEQ ID NO: 276285 - protein, 96 aa, Zea mays
  unsure (1)..(96): unsure at all Xaa locations
  Clone ID: MRT4577_183556C.1.pep
QTNRVYGSHKNIRGKTLKRAQKAIMALRGPMVYQKINLMPQTPENHHPLKKTPKWAMGKSLQQNPHGTLNDQRQEETQGPHLTASDDAKXQPPGLN

SEQ ID NO: 276286 - protein, 327 aa, Zea mays
  unsure (1)..(327): unsure at all Xaa locations
  Clone ID: MRT4577_183557C.1.pep
PPPPTPPPPPPPPPPXXXPPPPXPPPPPXPPPPPPPPPHPPPPTPPPPPXPPPPPPPPPPPPPPPPSPPPTPPPPPPPPPPPPPPPPPPPPPPRPPPPPPPPPPPPDPPPPPPPPPPPPAPPPPPPPPPPAPPPPTPPPPPPPPPPPPXPPPPPPSPPPPPPPPPPPPSPPPPXPPPPTPPPPHPPHPTPPPTPTVPPPPSPRPSSNPPLFSPPPLVPXTPLPXTPPPPCLPXPQSLPPHGLSTGPALPPGQTPGXAAPPSAITPVPVSASVQSPVTNTCQQHPPPSPPPPPPXPPXPPPPPPXXPPPXPXPPXPPPPPPPPPPHPP

SEQ ID NO: 276287 - protein, 111 aa, Zea mays
  Clone ID: MRT4577_183558C.1.pep
VVVFFFFFFFFWEDRKPVLDVLSIYSSYKIRNKALFIFFFRWEFETGLWTRFKSQLKGATGGPKTGYPPDAPAGALGSFSSWPWSSFGNTWISSRCLDEKFSGRVTLKGTF

SEQ ID NO: 276288 - protein, 308 aa, Zea mays
  Clone ID: MRT4577_183559C.1.pep
MAASAGGGAVRALSQKEQDIQMMLAADVHLGTKNCDFQMERYVFKRRTDGIYIINLGKTWDKLQLAARVIVAIENPQDIIVQSARPYGQRAVLKFAQYTGAHAIAGRHTPGTFTNQLQTSFSEPRLLILTDPRTDHQPIKESALGNIPTIAFCDTDSPMRYVDIGIPANNKGRNNIGCLFWLLARMVLQMRGTILSGHKWEVMVDLFFYRDPEEAKEQEEEAAAAPEFAAVTDYQGADQWGGDQWTSDVAAPPVAPTGADWGAAPAPVPTGDGWDQTVAPVPVDGTVPPVVAPTGWESAAQPTAQGWE

SEQ ID NO: 276289 - protein, 621 aa, Zea mays
  Clone ID: MRT4577_18355C.1.pep
VSEPAGSGSGAGAGPVLAFSRIQEPRRRTGAKAKVPFHDPSIPRPQDVYKIRVDNYKPFEHVWLERSEDGTRRVHPLENLPVEQFVDRNVPDREPVKPADLEDTPFTLVQDHKGLTELAKKLKSVTEFAVDLEHNQYRSFQGLTCLMQISTRTEDFIVDTLKLRIYIGLYLQEPFKDPTKRKVMHGADRDIMWLQRDFHIYVCNLFDTGQASRVLQMERNSLEHLLLHFCGVTAKKEYQNADWRSRPLPDEMIKYAREDTHYLLYIYDLMRQRLQRESTFENDLLLEVHKRSNEICLQFYEKELLTDTSYLHIYGLQEHELDARQLAVVAALHEWRDRIARQEDESTGYILPNKALIEIAKQMPTDVGHLKRIVKSKYPYVESNLELIAYTVWNALEYSYAFEGIAEQLKKERLEQVALKSGQTSDEVTPLDADIDRSNFDSSDQSANVNVASGSRAGFMSEAALISSIHLEDKTQTMSSVKTSQTLLGQIRPVNKDVLSNNIHQQAIQDLSLTLKALKGNLASGGESNEQAGINVENFRSSVFPSRQLSGEVKPFYPNPGMHSENVWIQTTQTNETMKLCNTTYYRQLPGHSTESINQRSTGSFQSSVRRQSFPPSSYKK

SEQ ID NO: 276290 - protein, 77 aa, Zea mays
  Clone ID: MRT4577_183560C.1.pep
RFHRKTGGHPEIPEPRESYQLLLAASCYHESAAHADCDIAPGSTRRSTTLRGLRPRAVPDELRSWTAGITSHAVAMG

SEQ ID NO: 276291 - protein, 51 aa, Zea mays
  Clone ID: MRT4577_183561C.1.pep
LRIDLLVKKKKTSYNKKKTKKKKKKKKKKKKKKKKKKKKKKKKKKKKGGAV

SEQ ID NO: 276292 - protein, 125 aa, Zea mays
  Clone ID: MRT4577_183562C.1.pep
MAGNFEEVAKQFVEFYYNTFDSDRKGLAALYRDHSMLTFESASVLGTQAITEKLAGLPFEKVKHQVSTLDAQPSNDQGGVIILITGALLVDEEQRPMNFSQSFQLARDANGQYFVYNDIFKLVFG

SEQ ID NO: 276293 - protein, 123 aa, Zea mays
  unsure (1)..(123): unsure at all Xaa locations
  Clone ID: MRT4577_183563C.1.pep
LSASGEPSVHDGWVKDLQTWSMIARRNSTCGLYPFFPPVSITALSTIVSSSSLXHRCLGXHLGHDALCKLIRSNAIXCNKRTDDLICHACQLGHHTCIPFSMXNSRVLHHFDLIYWIFKKKKK

SEQ ID NO: 276294 - protein, 56 aa, Zea mays
  Clone ID: MRT4577_183564C.1.pep
GTIHSFVIAVVNSFHSHNVIHLNPHRSVSIFRQSVDHFRARPCTLIRQQPSLSCSE

SEQ ID NO: 276295 - protein, 395 aa, Zea mays
  Clone ID: MRT4577_183565C.1.pep
MGENGVQLTLTSTLKSTGKPRINADGLNNGSHTTKEKHEHGGTFQPSKGQKQQLCTTCAKGHTCQSVINRTRQMRALIDSKKPYQAHSVFKHLMDEGHKPSLVTYTILLTALTNQRMFESIPSLLAEVELAGIRPDSIFFNALINAFVEAKRMGEAINTFWKMKHSGCHPTTSTFNTLIKGYGIVGKPEESQRVFDMMGVEGSVRPNLTTYNILVKAWCDHRNLEEAWGVVGKMQAGGFEPDMWTYNTIASAYANNDETWRAEELIVEIQTRVRTSERTWGIIIGGYCREGRLEEALRCVQQMKDAGSVPNVVIFNTLLKGFLDANDMAAVNKILGLMEKFGIKPDIVTYSHQLNTFSSLGHMAKCMHVFDKMIEAGIEPDPQVYSILAKGFVRA

SEQ ID NO: 276296 - protein, 39 aa, Zea mays
  Clone ID: MRT4577_183566C.1.pep
TNGKTETIYNSEQPKILSVGTTCKLGYQIKQLINIVQNE

SEQ ID NO: 276297 - protein, 96 aa, Zea mays
  Clone ID: MRT4577_183567C.1.pep
YHHRFNQSNNSSLPGKHCHHKLLVHPTTSRISTKPDILSFHEVTNKQAQHQPNKSFFLGNNLLHQPNKSFLLGNNLLHLCSNWVLLLHTFYDSHNH

SEQ ID NO: 276298 - protein, 87 aa, Zea mays
  Clone ID: MRT4577_183568C.1.pep
MLAVFCGLVVVVPAVLVAAGLRPPSPGGGAFFFFWRFLAASVPAVSLLLGVLLSLFYSPARPALLRPLSFAALGVVFCLFAGVLVSL

SEQ ID NO: 276299 - protein, 52 aa, Zea mays
  Clone ID: MRT4577_183569C.1.pep
PFQWNECNKEHLIDIPRTQVVSPMVMVQTYMITVFTLYHTITLFYILSLICI

SEQ ID NO: 276300 - protein, 62 aa, Zea mays
  unsure (1)..(62): unsure at all Xaa locations
  Clone ID: MRT4577_18356C.1.pep
SELGELLHMDNVGLARVCSFGGXWYVLXVIDDFSRYSWAFFMKAKDEAFTHARDLILRLLYE

SEQ ID NO: 276301 - protein, 65 aa, Zea mays
  Clone ID: MRT4577_183570C.1.pep
EFRFHFLGIQHRHNNNPNNSKSYMNMFGSHICLRMCNWNSPRHSDLIPFGFRIGLIRKQIIPIHI

SEQ ID NO: 276302 - protein, 68 aa, Zea mays
  Clone ID: MRT4577_183571C.1.pep
LFWKALYPPPTGAVFSLQIKIKISRGAYQYSSCGPCVVCDAKQPLLFVSIPKFKSIKFSLSQKNNVRL

SEQ ID NO: 276303 - protein, 135 aa, Zea mays
  unsure (1)..(135): unsure at all Xaa locations
  Clone ID: MRT4577_183572C.1.pep
MSSEQMGPRQQAVQANGQLAATQQQQQQQAPPQRQRPHKPRDKRAELMRGHPPTFAHLCDPPPPAEWXRXVEXELPIDQRDXREKEKHGPRLLRGAAQXWWESYHATKAHSYRNRWEEVTVFYGPPLPPADGKGE

SEQ ID NO: 276304 - protein, 43 aa, Zea mays
  Clone ID: MRT4577_183573C.1.pep
NPLCQSKCPGLILRGSETVPQGGLEGPSKTPPKGWPPFLPCFH

SEQ ID NO: 276305 - protein, 85 aa, Zea mays
  Clone ID: MRT4577_183574C.1.pep
RNATEARTTPEENTPASRLNNKQEQTAPKEGRHASFEKGRNGNPTTEALEKKMSALEKAKSTAYAAPGMHAAADTLSAHAPAGGH

SEQ ID NO: 276306 - protein, 58 aa, Zea mays
  Clone ID: MRT4577_183575C.1.pep
DPLLQSSSTISLPFVILLLVLSSARDFNIQLLPLLHTFSYLPTTILLSNHLFFLQAYH

SEQ ID NO: 276307 - protein, 475 aa, Zea mays
  Clone ID: MRT4577_183576C.1.pep
MDPKGNVMMINDKEKETLYVDEPKGDKLTYSGSNNKRKDGKKKRRIKKIIYYNSDTSSSSPREDDDEDSSSKKKTVNQNYSFDYSRIPYNSNAHLLSIPLGKPPHFDGEDYSFWSHKMCSHLFSLHPSIWEIMKNGMQFDSSGNHVLINEQIHKNGQATTVLLASLCRDEYNKVSGLDNAKQIWDTLKISHEGNDVTMITKMELVEEARYVDDVANGPLPLYEPRPVALEATSSKETLPNKVAQVEAVGLNEEEMTLVIKHFKTALKGRKKDKSKGKRSFFKCVKFGHFIAQCPDNENDQGQEKKWKKKKNYRKAKGEAHIGKEWDSDCSSSDSDDEGLAAFDKSSIFPNKHHTCLMAKEKKLNNDVANLNAQLKTYKNDYEKLKFAMDAYTIGRHPSIRDGLGFQKGTKNLTSQRASNLIKEKGKAPMASSSNSSHYKRSMPIFILMLRIFLMLLIIIMLFFLPVMILLLIHMS

SEQ ID NO: 276308 - protein, 60 aa, Zea mays
  Clone ID: MRT4577_183577C.1.pep
SSKVASPRRSALMSIMSQTAFREISVSLMQSSILLTELLPILILQSNVECSGYDMPLCFE

SEQ ID NO: 276309 - protein, 145 aa, Zea mays
  unsure (1)..(145): unsure at all Xaa locations
  Clone ID: MRT4577_183578C.1.pep
NVCIRXSKKKKKKKKKKKKKKKKKKKKKKKKKRGGGKKKKKKENTKKKKKKKKNQKKNKKAKTLQQNKKKKPCRNLTKSPFKKYYISPPCLKAKKTAPNRPTQQSAKPKWKMERTLYRPFKRTLNRAYAQLNRTLAPPTPAFSLF

SEQ ID NO: 276310 - protein, 77 aa, Zea mays
  Clone ID: MRT4577_183579C.1.pep
ICMTTNEFMLTALLISACFCQDILCEHFDLEFLTVCLGNSGGELTSFIFLQFNEGMASCILSSFHSPLVNDSKKCSV

SEQ ID NO: 276311 - protein, 62 aa, Zea mays
  Clone ID: MRT4577_18357C.1.pep
LYQPVEFSVGLCIYNNAPPSIAASIQMHNIRSDTSRYHPQLQDSVQNELVHKYLSIYVYLYK

SEQ ID NO: 276312 - protein, 160 aa, Zea mays
  Clone ID: MRT4577_183580C.1.pep
MHPLELFLVVLVTTGAASAVYSHPAAAGTPAARFWEEALPGTPMPEAIADLIQQGIDHSPLVEHFTSSGHTPVMNINYGYGAYAGSSLMNAAVPPGSFFLQSQLRVGTAMTVSSESAATVPPILPRDVAQKVPFSNLADVLAAFHISPSSAEATTVSDTL

SEQ ID NO: 276313 - protein, 79 aa, Zea mays
  Clone ID: MRT4577_183581C.1.pep
LAAPLLRVAISLLISTNCHFRGPDPDRRGGRRSFLGGDPAAGCRALGFCSRRRLGRGLGCCSCLSLRSSRFRVAGSRRC

SEQ ID NO: 276314 - protein, 85 aa, Zea mays
  Clone ID: MRT4577_183582C.1.pep
DEKGVHWSGAYQKRSWASLLLEADPGASGGWPGPAAPLKLGTKNPGIFPRGIKKNIRDHGRSQGEQNPRDGHLPEKIKPFQFMNG

SEQ ID NO: 276315 - protein, 70 aa, Zea mays
  unsure (1)..(70): unsure at all Xaa locations
  Clone ID: MRT4577_183583C.1.pep
QKWRAAPAXIARGLGRISHNSNIQGVGVGXARGMLSLCVSTCVNIFIQTFLHRGGGVSRSPPWTEGXQHA

SEQ ID NO: 276316 - protein, 111 aa, Zea mays
  unsure (1)..(111): unsure at all Xaa locations
  Clone ID: MRT4577_183584C.1.pep
KGGNGLGNGYPYRHRKRAAXTIQRITXTAIRTLAQXGGAKXRFRGLIXDETRGELXIILENVIRXDCITYTEXHVLLNTVTVMDVVKTLKRQSRTLYTFRGYRRLPFDDWM

SEQ ID NO: 276317 - protein, 57 aa, Zea mays
  unsure (1)..(57): unsure at all Xaa locations
  Clone ID: MRT4577_183585C.1.pep
NYPLSSSKSYTSWLTSTTQGKVSLTSSTTSPQGENLVWSPEDVQANIQMSYILCRXV

SEQ ID NO: 276318 - protein, 126 aa, Zea mays
  unsure (1)..(126): unsure at all Xaa locations
  Clone ID: MRT4577_183586C.1.pep
MAARSSSLSLSASLVLAAALLLLAAGAATPSAMASCGEVTSSATPSLVYAMVSATTPSAWCCSAVRSLNSRASSXADRQVTCNCLKSMTARLVDAVSMTNAANIPGKCGVSVGEPINPTDDCTNID

SEQ ID NO: 276319 - protein, 370 aa, Zea mays
  Clone ID: MRT4577_183587C.1.pep
MDAKKPYMLAITTVAIYTGMYVVSKAAFNQGMNSFVFVFYRQAAASLLLLPIALVLERKNVRSMSSGLILKLFLLALIWNTLGMNLCNASVTLTSATVASATGNSTPVITFCLALLLRMEVVKLRSVSGIAKVTGVALCLAGALVIALYTGPSLSPVNRHHRASGGAHGFKAPTRGGTWVTGTFLMLLSNVTWSLWTVLQGALLKEYPNKLLVTTSQCLFSTAQSFVVAAVAERDFSKWALKLDVSLIAVAYTGFLVTGVSYYLQAWCVQIKGPVFLAVWNPLCFVLTIFCSSFFLGENVHLGSIVGGILLVCGLYSVLWGKTLEVHQTVESGDNTVGEVQNGQEEKNHQQKVLEKGRQEEASMTAPGVV

SEQ ID NO: 276320 - protein, 76 aa, Zea mays
  Clone ID: MRT4577_183588C.1.pep
SFKKNAKIRNRPRSTDETDISNMLQFTVIHQDGIVYEMIHKHGEHEMNPSVLFNRPQYNQGRWFIKKDRIDSCVRV

SEQ ID NO: 276321 - protein, 387 aa, Zea mays
  unsure (1)..(387): unsure at all Xaa locations
  Clone ID: MRT4577_183589C.1.pep
MDAKKPYMLAITTVAIYTGMYVVSKAAFNQGMNSFVFVFYRQAAASLLLLPIALVLEXLIIYYRIRSSQSSGAARKNVRSMSSGLILKLFLLALIWNTLGMNLCNASVTLTSATVASATGNSTPVITFCLALLLRMEVVKLRSVSGIAKVTGVALCLAGALVIALYTGPSLSPVNRHHRASGGAHGFKAPTRGGTWVTGTFLMLLSNVTWSLWTVLQGALLKEYPNKLLVTTSQCLFSTAQSFVVAAVAERDFSKWALKLDVSLIAVAYTGFLVTGVSYYLQAWCVQIKGPVFLAVWNPLCFVLTIFCSSFFLGENVHLGSIVGGILLVCGLYSVLWGKTLEVHQTVESGDNTVGEVQNGQEEKNHQQKVLEKGRQEEASMTAPGVV

SEQ ID NO: 276322 - protein, 94 aa, Zea mays
  Clone ID: MRT4577_18358C.1.pep
SRCIGYGKSPSAPPIAPPLPRPTDGAGENMLFQHLDLVVNYIGSSDVQSELNPQTRGEVSSSAKVPRRSLQGRGGLVLYSNRYSWYNNKESFHP

SEQ ID NO: 276323 - protein, 230 aa, Zea mays
  unsure (1)..(230): unsure at all Xaa locations
  Clone ID: MRT4577_183590C.1.pep
TRPRTRGWALSKIGGDLLYLPEMDRIADVAMAKVQDFNAQNVANVAGAFASMRQSAPGLFSALALRAAQLLQTFKEQELAQFLWGCASLNECPYPLLDALDTAFQNDTSFQCHVTDIKSSAHWSSAEELSGGEDGSTSSARTLNFNRDQVGNIAWSYAVIGQMDRPFFSHMWRTLSRFEEQRVSDQYREDMMFASQVYLANQSLKLEYRNLGLCLRSDLEXKIAKAGKSQ

SEQ ID NO: 276324 - protein, 67 aa, Zea mays
  Clone ID: MRT4577_183591C.1.pep
MCCSWITKKKKKKKKKKKKKKKKKKKKKKKRGGKKKKKKKKKKKKKKKKKKKRGGALLKKQSLLPRD

SEQ ID NO: 276325 - protein, 96 aa, Zea mays
  unsure (1)..(96): unsure at all Xaa locations
  Clone ID: MRT4577_183592C.1.pep
PPXPFFXDGSGAPPPXQEPRGPFLXXTPPPFNXXPKXATLPFFPNWSQNYPFFPPRXPMDKYLAAPPPGLGSAPPPPGAXLRPLLWHPQNFKVLGK

SEQ ID NO: 276326 - protein, 102 aa, Zea mays
  Clone ID: MRT4577_183593C.1.pep
RNRDPASDAGGVVLLYTLLSGRFAQVSLTPRSFARGPAAACCSSDRRGRAALVSGLHRNVCHFAPPHRLTSHGRAGPRDINGLWIHADPGSRMRPRWAAVGQ

SEQ ID NO: 276327 - protein, 100 aa, Zea mays
  Clone ID: MRT4577_183594C.1.pep
SRSTPRSSCPCCRRPRARTPRAASAEVVLCFSGHMTLSPGLMTMAVSYTSSPPLLWLWIVFIGPEPGVAFVADQRCGLPVIVEVGDERREYAMEVSRTCW

SEQ ID NO: 276328 - protein, 133 aa, Zea mays
  unsure (1)..(133): unsure at all Xaa locations
  Clone ID: MRT4577_183595C.1.pep
KACWASCPQKWLISRGITFCINGPKASPHPSSGFGNLPIHAEFLQSLWGTSISAPGPFGCFALGPSICSLIIKLKNNPPPVYFGPGHSKAHFCEKKFIIIKLGSRAFVPKKKKKKKQPWPPSTKKKTXXXXXX

SEQ ID NO: 276329 - protein, 111 aa, Zea mays
  Clone ID: MRT4577_183596C.1.pep
GRVHVHLHMKLPFCLFLLNSDSSHSREYNCVISPRKCIPHVFLFEEASCIYSPKHSLGVIFCERSSLSTPRPCLKYLRLHEPLARSHVPKQSKEGSMINMNFPWYEKSSKH

SEQ ID NO: 276330 - protein, 88 aa, Zea mays
  unsure (1)..(88): unsure at all Xaa locations
  Clone ID: MRT4577_183597C.1.pep
GPSSGNYANAEGKDAGGGIGGGADGAYGSGAGGGVGKGQGERGVALAPSSGGYYNGGAADATGGGSGAGGGRGGGAXGAPSYGTGGGL

SEQ ID NO: 276331 - protein, 59 aa, Zea mays
  Clone ID: MRT4577_183598C.1.pep
GDLQVVLAWMARWATIRPLASKGHAAGNSNAPRFHDHRAGVYTGSFNGVEACALCASFT

SEQ ID NO: 276332 - protein, 68 aa, Zea mays
  Clone ID: MRT4577_183599C.1.pep
HVYKPCPTCLRSPLKRTPAAATGYEARDISQRSEPDVRAVKPNDLCINCGEDTPPTTMLTNDEPSQNL

SEQ ID NO: 276333 - protein, 41 aa, Zea mays
  Clone ID: MRT4577_18359C.1.pep
WACWRSVMVLPSVVIHYVNLGTSPCFVGGYEEHQDVHACAG

SEQ ID NO: 276334 - protein, 51 aa, Zea mays
  Clone ID: MRT4577_1835C.1.pep
INHRIISLVEKWNHSEGTPQVPFFKHLLYCFRTSVIFFFKKKCYLINYCNI

SEQ ID NO: 276335 - protein, 113 aa, Zea mays
  Clone ID: MRT4577_183600C.1.pep
RFVFFFVFADKGSAASPPDISAFAYRPMKTVASDQGKTTGKTTDTIDGPPDLGLLAYTSTVCCPERSKHAGNPPDLSTFAYKPVKAAVGRLNGSRFRETAPKATGGTSRSQFK

SEQ ID NO: 276336 - protein, 89 aa, Zea mays
  Clone ID: MRT4577_183601C.1.pep
MGADSERPHRKQLEGLLGASSNRTSAVGSLNAVVKGKQPLIRAFPFLSIVEDSWHWAPGGPRGAAEVPLLQSPSVPIHQRGPWRTVTAC

SEQ ID NO: 276337 - protein, 43 aa, Zea mays
  Clone ID: MRT4577_183602C.1.pep
MAACRGFFECLLRLVNFIGTVAGLAMVGYGIYLLVEWVRVSDG

SEQ ID NO: 276338 - protein, 53 aa, Zea mays
  Clone ID: MRT4577_183603C.1.pep
RGKGKVVDMGAISPVNQWFPFVKRSRQHLMVSHSQNMFNVVPGQAHGKDAIQS

SEQ ID NO: 276339 - protein, 65 aa, Zea mays
  Clone ID: MRT4577_183604C.1.pep
AAFFFFFFQIETRNFIAIVAQLHLIYMLHLVVLLYLRLFRLFHISTAKRKIQTSSDQFVHKLHVQ

SEQ ID NO: 276340 - protein, 123 aa, Zea mays
  Clone ID: MRT4577_183605C.1.pep
PRSCQPRIPSSCNRQRAPRAPAIRGKPSIHGAFTAIPPVICAPSIAPRHRHPRKPFHPWRLPTNLCCQFLWRNRASPGCPSIHGVVAASAPQSTIPFHRRHSPSIAKLLFLHSTDGTHPKPSP

SEQ ID NO: 276341 - protein, 63 aa, Zea mays
  Clone ID: MRT4577_183606C.1.pep
KGTNLYFFNTNQCSRLKPLWYISVQNKKGNPFSYNGKQANPPVNKTPKKGKKTRGEPLDKNKP

SEQ ID NO: 276342 - protein, 75 aa, Zea mays
  Clone ID: MRT4577_183607C.1.pep
PQAVPIFLAQAHTYPVVAKLIKTWERYTYAFVTEREIERSPRTRGPVESTYRAGNHDEPHPEVTMPMLQRYIHYF

SEQ ID NO: 276343 - protein, 139 aa, Zea mays
  unsure (1)..(139): unsure at all Xaa locations
  Clone ID: MRT4577_183608C.1.pep
AGNLRMXDAHAHGKHVRSMSTVAGVPAHWLCSHQPACLCGHQPACLCSLKQDFKCFGKVINPKGSVEMTCHGLTDLCLWNFGKTLSCHCSLVSFEKPDRGGKSSRYGMWGLSVHPGALTKKKGKNKKTNRGEKRHRAER

SEQ ID NO: 276344 - protein, 54 aa, Zea mays
  Clone ID: MRT4577_183609C.1.pep
PTHLTGECGRCRCLHCAGLGVVKHLWTIQLEAIYESTCSYEHYTEDARSTLPLR

SEQ ID NO: 276345 - protein, 75 aa, Zea mays
  unsure (1)..(75): unsure at all Xaa locations
  Clone ID: MRT4577_18360C.1.pep
MREPGDHRSHYGGRYGHGXXPSPYAPPRPGHGERYARQSSGYYRQIPTMHCKNCGMGTVTYHHHGCACSHWLHGQ

SEQ ID NO: 276346 - protein, 79 aa, Zea mays
  Clone ID: MRT4577_183610C.1.pep
AFAYNTTHLTMSPKHQNNYLYTPYSFLNTRHPTPTGWHIYPMAKSHLFYFVTPSVWETMLQLLQHCLDIHHHYKLILYH

SEQ ID NO: 276347 - protein, 102 aa, Zea mays
  Clone ID: MRT4577_183611C.1.pep
MCADDTVVLKVAMACDGCADSFLRVLSKMVGVETFHLELKDLNVTVKGNVKPDDVFQKVFKYRKQTSFSERKYTSPDHAASAENVKRDNYKALAAGIACPPF

SEQ ID NO: 276348 - protein, 76 aa, Zea mays
  Clone ID: MRT4577_183612C.1.pep
YSYYTSKPFLCHHHKVFVTRCTICGIGTLSVVFYYKYEFEPDFSITFVASTGQNSFVYLVTIFEGKQPYRCYVAQP

SEQ ID NO: 276349 - protein, 77 aa, Zea mays
  Clone ID: MRT4577_183613C.1.pep
RPGTLSATTSSTAAPTRMSTGTGAAPFLRDSTSTSVVRGVPAVSARTAGASSSIIFSETTSAWRSSWRPRCVSSTST

SEQ ID NO: 276350 - protein, 81 aa, Zea mays
  Clone ID: MRT4577_183614C.1.pep
EPKKCFHTWMLIIISCDVSLIYIWLCWRSMIVVSNNISIVSVCNASPLSVLFLFLRSIVISCVILPYVHTCALCISFRYVN

SEQ ID NO: 276351 - protein, 122 aa, Zea mays
  Clone ID: MRT4577_183615C.1.pep
IGKLYHFQATKMGRTLTRTSKANKSERPKWGTVMLLPRETLPCLLPDISFLKCRGRGSKNKRAQLKRKKLLSLVHSLNAVNASKNPPTFSSPSSSAPSKQPGQARMDPSAEGRSESAPVRQR

SEQ ID NO: 276352 - protein, 70 aa, Zea mays
  Clone ID: MRT4577_183616C.1.pep
SCLQALRRMRVVIQMQLEHNLFPTHLCSADPDQDNSAVLLCTWSQSCLVRYLGKQSQRSSLLKVSPAAWR

SEQ ID NO: 276353 - protein, 71 aa, Zea mays
  unsure (1)..(71): unsure at all Xaa locations
  Clone ID: MRT4577_183617C.1.pep
MSPFNFQHANLTSQLRNSGMKKMEDTINAGINWLDTNHLAXAYEFYYKIKELXSLCNPIIVNIYQGSVSYI

SEQ ID NO: 276354 - protein, 63 aa, Zea mays
  Clone ID: MRT4577_183618C.1.pep
DNKKDRSHTPNVPLLSVHNSDYFRNEKTMNVSSKWHHITLTKKDQAMLAASSIDNIVNNIELD

SEQ ID NO: 276355 - protein, 93 aa, Zea mays
  Clone ID: MRT4577_183619C.1.pep
TADIVGGTALGHLRDKDTGHGMQLDAAKDRQVIGKHTGEPVLMNDRLYVTTRCAPDSRQVCQIDKPQLHRTTATYTRRSILASCQTPSQAIQA

SEQ ID NO: 276356 - protein, 80 aa, Zea mays
  unsure (1)..(80): unsure at all Xaa locations
  Clone ID: MRT4577_18361C.1.pep
GRSVGSLKGTILRVLGADNQRPNGRSAVGMRGDLRSYGLAHRFAQGQRVXLLSCLMFHCGGLQEAGSSGYADEKQWHXRP

SEQ ID NO: 276357 - protein, 75 aa, Zea mays
  Clone ID: MRT4577_183620C.1.pep
TDHAPWIWMRWQGALRPARAARCALMRMPGLLLPEALESASRGRTSGSAVFPRRPTGGGPPGFGRPPGPHPKECI

SEQ ID NO: 276358 - protein, 165 aa, Zea mays
  unsure (1)..(165): unsure at all Xaa locations
  Clone ID: MRT4577_183621C.1.pep
LIMKGDSMEMNGNILGLKMESNGIRVIEPFDMVVKYSNASGKTNLHLLVSEIYMNFSFSILRLFLAVEEEISAFLRMSSKKISLVCYQFDKVATMQGNANDQVLSFWRPRAPSGYAIFGDYLTPMNEPPTKGVLALNTNIXRVKRPLSXKLVWQSGSPRTNIFHQ

SEQ ID NO: 276359 - protein, 128 aa, Zea mays
  Clone ID: MRT4577_183622C.1.pep
RMLLLYSTLPLATLLIAISFRVVKQRMCCSITEEKSEFLFAPARRTDADRRPELAPVNMWWSSGAGGRWESVRDCLIRDVIHVSESEGLSFAFILGLGVLVSGYLFPLSLSRFRFGLVYCTSKYFCGG

SEQ ID NO: 276360 - protein, 54 aa, Zea mays
  Clone ID: MRT4577_183623C.1.pep
LACLLGLFPVYIAGKRKGIRVSQNRIGNGQDNCNSWNGFSLAYLNKSSRVWLSL

SEQ ID NO: 276361 - protein, 154 aa, Zea mays
  unsure (1)..(154): unsure at all Xaa locations
  Clone ID: MRT4577_183624C.1.pep
LDPCTTGPGTTDAPGRPRPTFCYSDTADSSQATQEDREESHPEQRGTLGEYRTPNNDXDDGVIPITHNGRTDTSPDACTPPSVDHLSTVHESQKIPPRSMAPCIRAPYQARAVYGVRTDETAMHEELSNRPDYDRVFGTELKRLGVQAAAGHPL

SEQ ID NO: 276362 - protein, 127 aa, Zea mays
  Clone ID: MRT4577_183625C.1.pep
MIYAVLGLIITADNMMYSHGLMFLPVSTFSLICASQLAFNVFFSYVLNSQKLTGLIMNSVVLLTLAALLLGANHETHGPITGGVSGRKYLLGFLLTVGASGTYSLILSLMPLTFESVNKKQTFSAVL

SEQ ID NO: 276363 - protein, 39 aa, Zea mays
  Clone ID: MRT4577_183626C.1.pep
ETPPSCPQFWGTGNRSFKCSVTICASLLWKTGVFYSPPI

SEQ ID NO: 276364 - protein, 79 aa, Zea mays
  Clone ID: MRT4577_183627C.1.pep
IDNNLALHTAQPPVAAGAGSEQRWVDAAGGRLVLDGGLATELEANGADLNDPLWSAKCLLSSPHLIRKANHSPQTLLFV

SEQ ID NO: 276365 - protein, 255 aa, Zea mays
  Clone ID: MRT4577_183628C.1.pep
VNNRQYRGKLEKTSVLKAVCSGFEETTEPDVCLREDIETNECLENNGGCWLDKATNVSACKDTFRGRVCECPIVNGVKFIGDGYNHCEASGLGRCQINNGGCWNETRNGKSVSACSNQEAKGCKCPAGFKGDGANSCEDVDECKEKLFCQCKDCACENTWGSYECSCGGGNSLYIREHDTCISKHSSSTPGWGFLWVVFLGLALAGAGAYAVYKYRLRSYMDSEIRAIMAQYMPLESQDMPSQQHHLVPVDRADV

SEQ ID NO: 276366 - protein, 41 aa, Zea mays
  unsure (1)..(41): unsure at all Xaa locations
  Clone ID: MRT4577_183629C.1.pep
VVILPRTLTRIEYYTQSELQSRPTEFPDAVNSTHCGGFXML

SEQ ID NO: 276367 - protein, 52 aa, Zea mays
  Clone ID: MRT4577_18362C.1.pep
KVHWKGLNVVPPVIHCFLRMYGSMQSGTFMSLPFQNGCMPQAGLCGSRSRRA

SEQ ID NO: 276368 - protein, 68 aa, Zea mays
  Clone ID: MRT4577_183630C.1.pep
PAVRHRIHKLHATRNPTILLTLDEQCSIILHTWERRSLTSTLCSLALSTLASLPPLTHLTYKPGGIDP

SEQ ID NO: 276369 - protein, 62 aa, Zea mays
  Clone ID: MRT4577_183631C.1.pep
MDKQDERKKPHGKTDPKRGDIMKRIIKDLTGGGNDGGGGGASDGGGNNDNDSGSGSTPAGAD

SEQ ID NO: 276370 - protein, 84 aa, Zea mays
  unsure (1)..(84): unsure at all Xaa locations
  Clone ID: MRT4577_183632C.1.pep
QRSPQLQNFRDYRILEFNSRPNTLLLPKHADPDYLIVILNGTAILCLVNNDDRDSXRLRSRDALRVPSGTTYYVVNPDNNENLR

SEQ ID NO: 276371 - protein, 67 aa, Zea mays
  Clone ID: MRT4577_183633C.1.pep
FGSRLNETLFFYRCFQRIGGARQPNLQKLDVDLMFMKLMLFQVVNEQTILALQRPLRKLWYQITRQT

SEQ ID NO: 276372 - protein, 60 aa, Zea mays
  Clone ID: MRT4577_183634C.1.pep
MDKQDERKKPHGKTDPKRGDIMKRIIKDLTGGGNDGGGGGASDGGGNNDSGSGSTPAGAD

SEQ ID NO: 276373 - protein, 62 aa, Zea mays; identical to SEQ ID NO: 276369
  Clone ID: MRT4577_183635C.1.pep

SEQ ID NO: 276374 - protein, 62 aa, Zea mays; identical to SEQ ID NO: 276369
  Clone ID: MRT4577_183636C.1.pep

SEQ ID NO: 276375 - protein, 111 aa, Zea mays
  unsure (1)..(111): unsure at all Xaa locations
  Clone ID: MRT4577_183637C.1.pep
PFVELLVQSGAFSTEEGAALYTCVAVKENDPXLLENIIRYGGNANSSMXDGTTPLDPAACDGNAHIVXILLEHGAVMDXYYNNGLSVRALPYQQGQKDIQFFFRSPKTHMQ

SEQ ID NO: 276376 - protein, 47 aa, Zea mays
  Clone ID: MRT4577_183638C.1.pep
GRGKHPPFFFAKKKKKKKKKKKKKKKKKKKKKKKKKKKKKKKKTRER

SEQ ID NO: 276377 - protein, 176 aa, Zea mays
  unsure (1)..(176): unsure at all Xaa locations
  Clone ID: MRT4577_183639C.1.pep
CTLVCLGSGVKPWIIAVSVAPPVAVVAFCFILYNRRQRIRFRRGRSKLRQKHPRNNLKGDKLDWEMETELSEFSVFDFHQILEATDNFSEENKLGEGGFGPVYKGQFPDGTEIAVKRLASHSGQGFVEFKNEVQLIAKXQHTNLVRLLGCCSQGEEKXLVYEYLSNKSLDFFIFDE

SEQ ID NO: 276378 - protein, 116 aa, Zea mays
  unsure (1)..(116): unsure at all Xaa locations
  Clone ID: MRT4577_18363C.1.pep
RAKRPIKRPPTGXSMATAARCCHRRLILASAGLLSVLAAASASAGTSCVPGWAIPDNPLRSCRWCVTSRTCGIGPSLPWPELSRRCCRXLADIPAYXRCTAXLRFLMDGAILSSPD

SEQ ID NO: 276379 - protein, 122 aa, Zea mays
  unsure (1)..(122): unsure at all Xaa locations
  Clone ID: MRT4577_183640C.1.pep
HRATGIAGPTKAQRTSRNGVXTTLLRRPLRLLLHLPVPLRLPILPGPAPRSVPRSPRLLAGRRKSRAGGGEGGPRGHGRVFEVGLRSRPLRKIRSGTGARGXQNATRRCAEEAGAVVGSRSD

SEQ ID NO: 276380 - protein, 70 aa, Zea mays
  unsure (1)..(70): unsure at all Xaa locations
  Clone ID: MRT4577_183641C.1.pep
IPGSTHASDVAFSYTYSMLLIEIXHTMKARSLYNFTMNMTNYYCINTSTIFYISLLFITYTAYFNTFPVN

SEQ ID NO: 276381 - protein, 106 aa, Zea mays
  unsure (1)..(106): unsure at all Xaa locations
  Clone ID: MRT4577_183642C.1.pep
LTHELTADHFIDYQIDGSKGVFNIFCNDXTSXFTTNLLYTVMHLLLKKYTEAQLDDKINEVDADVNDIIDVRDNINLMATKNKVTVSDEXLMDAFRMFNNYQYGFI

SEQ ID NO: 276382 - protein, 60 aa, Zea mays
  Clone ID: MRT4577_183643C.1.pep
RSVAHDVTRKCVLHTEEILMLPDKKSKGADCLQYSNLLTRPSQLYSAKLTLRRCSPYAWI

SEQ ID NO: 276383 - protein, 53 aa, Zea mays
  Clone ID: MRT4577_183644C.1.pep
QLGAGSMGGWCRGSSTGSVGSRRRRARRRQVRLGRLGRGFGSWSGRAWRRRTA

SEQ ID NO: 276384 - protein, 231 aa, Zea mays
  Clone ID: MRT4577_183645C.1.pep
MLSNTFLALSLLPLTLAHFNLNFPPTRGFDEDKEGNFPCGSYDQVSDKRTDFPISGGPIQLVLGHPQTNVAVYMAIGDNPGSGFSVVLKQQLMVEGLGNFCLGSVSIPKDLNVTAGTKASIQVVTNAHSSGGLFQCADVTLVDKQLSQSEFQDNCKNNTGIKVAQENISGNPNSTATGTGGSDDDDDDKPTASGSGSSSAAKPTAASAATHAPSIFMGCWVPVVLLELLCF

SEQ ID NO: 276385 - protein, 120 aa, Zea mays
  unsure (1)..(120): unsure at all Xaa locations
  Clone ID: MRT4577_183646C.1.pep
TCSNTPRSCGWPALVAAALLASSASTAITCGQVRSSLAPRIPYSTTRTSGLSASCCSGVKSLNRTARTNADRHAAWLCVKSLVNSVKSVNMGTVLTIPVQCGVSVGFPIXSMATDCSQIS

SEQ ID NO: 276386 - protein, 140 aa, Zea mays
  unsure (1)..(140): unsure at all Xaa locations
  Clone ID: MRT4577_183647C.1.pep
PKHQGFFFSPPCAPFPPCLFSPPPVFFPLPPRGAEHSPVFLTPPTTIPPAPCCGVAPISFFHPPPRFAXPAPLPPPRGPPXPANWCPPPPLFFPPPPVLFPPPPARGAPPLFLLQQLLPNKHLALTNRAAPKQQPIFGGA

SEQ ID NO: 276387 - protein, 100 aa, Zea mays
  Clone ID: MRT4577_183648C.1.pep
SVRVGELADVPASSRLSPALPWNFSASTIGCVTTSDFENEEEISVEEEEIAPSTENPPAGNCFYFDICGTEPDSPTTQGAETADFCCFCSKVVPKEEPQQ

SEQ ID NO: 276388 - protein, 392 aa, Zea mays
  Clone ID: MRT4577_183649C.1.pep
TLRSNRNPTKNRSKTQAAPCLVSRARASSLGSLRSPSAPPPRQPPPLPPPHPQRAVAAAAATASEASSTAGDPSSQPPQTARKPWGALKFAAFAAVSTAVGGTGYVSYAYSLEEVDQMTRELRKKSKQPIPEDASGFERFQAMAYSAAMKVPVAAIEVYMDVRSQIEDQIRGFSEPVSDKLLPDLAPQEQHVLTLVLDLNETLVYSDWKRERGWRTFKRPGVDAFLEHLGRFYEIVVYSDQLSMYVDPVVDRLDPKGNIRHRLSRVATKYENGKHYRDLSKLNRNPAQVLYISAHAKESSLQPENSVEIKPWKLENDDTQLLDLIPFLEYVAMARPSDIRAVLASYQSGDIAAEFIERSKEHQRSVDIFLCSITFLYLIDGNLNVDVPTPLL

SEQ ID NO: 276389 - protein, 101 aa, Zea mays
  Clone ID: MRT4577_18364C.1.pep
GYLEAGRAPTSMLRHPIPPPPPLGFWSEDRRCRRLPGAPSEDAAPRTPGTGYIRRGPAPDPGPVDGDETLCKAAFTSADHLRPQTYGHTLTGRDISYRNDL

SEQ ID NO: 276390 - protein, 149 aa, Zea mays
  Clone ID: MRT4577_183650C.1.pep
MDDDFTFPTLHAGGQLVPSAFPPHQLGLGGSPSRWFLATVAGEEEEEEEEEKMDMLWEDFNEELASVPPLCPLSPVINKERLAMSWLDLDDDDKMVVVDLEKHCKGKHPHHPQDGRVVRRRKWSLMLMLRLLKKLFLVNKSRNPRTAPI

SEQ ID NO: 276391 - protein, 165 aa, Zea mays
  Clone ID: MRT4577_183651C.1.pep
RQQLFLPFTHLAAFNSASYWRQPPLPFTQLSAACPQLFLPFTPPPALTSPAYLRRQPLLPFSPLAGVSPAPFLSPPQLLPFSPPAAPSAGPLLGVQPFLPFPPPLCRGRLSFCLLPVIGGALFFFSYELWFPKYSFLSIVKDKTKIKKNKKKKKKKKPKKKKKKR

SEQ ID NO: 276392 - protein, 48 aa, Zea mays
  Clone ID: MRT4577_183652C.1.pep
LRNKDCFFFPFVFKFQFFIGFSEMERDFMGLNSKEPLAVVKEDMHVYG

SEQ ID NO: 276393 - protein, 394 aa, Zea mays
  unsure (1)..(394): unsure at all Xaa locations
  Clone ID: MRT4577_183653C.1.pep
MATRILSRQNLRKLASCTLPNISQRQIVKHYPPALRSTIASPSKFPSPSYLSGXPSLLTEELYGTGNLVXSDDRNHLLQIGTIXPATKRRFRTXRRLLLLAMWVHKARTPAILYVPRRLCPWGLELXREXPAPEAWLKYKIEKAKLKEARLVEKLKKYEIAKAQGPMAKVDDLSGEERFYLKKVSQKKSNYVPVGRRGVFGGVILNMHLHWKKHETVKVICKPCKPGQIQEYANEIARLSGGIPVNVIGDDTIVFYRGKSYVQPEVMSPVDTLSKKKALEKSKYEQSLETVRRFIAISEKELELYYRHVALYGISQSQKSDLVCGDDREASLLKMEGLDRGKGQEPHLATNHFSDLHIGDVSESDEEDSSGSEYDADDDDNETESMASVSEDAS

SEQ ID NO: 276394 - protein, 93 aa, Zea mays
  Clone ID: MRT4577_183654C.1.pep
TLCALPLQVIRKTREPKWSEEFQFMVDEPPVEDKIPIQVKNKPPGLPFPTKESLGHVNINLVDVVNNGRINQKYPLINSRNGMIHVEIKWSPV

SEQ ID NO: 276395 - protein, 169 aa, Zea mays
  unsure (1)..(169): unsure at all Xaa locations
  Clone ID: MRT4577_183655C.1.pep
MQSKHAHLRLRVRLALDIYSGMEHKVAWCQQPKGPILCINNCGFFGSADTMNMCSKCHKEMMMKQEQAHLAGSSIDSIWNGRYNXGNXPAIAATVAVAVTHALEKTIVAHPMHVSQTIEAAAXSLQPKXPNRXHTCEKRDWLTGSNCRCRNTYCSMHRYSYKHDCQFYY

SEQ ID NO: 276396 - protein, 139 aa, Zea mays
  Clone ID: MRT4577_183656C.1.pep
LYQSYFFFFFFFFFISFLFFFFFFFIFFLNYFFCFFFFFLKRCPQILFPPQNFKKLVIWAPILWPQKGKKKGGRETLGYLGKDTSLLSEHPRGGSPPGAPVKLQSQIFPHLPPRNRGLNILTRPKKKGGYSNRPRRKFS

SEQ ID NO: 276397 - protein, 120 aa, Zea mays
  unsure (1)..(120): unsure at all Xaa locations
  Clone ID: MRT4577_183657C.1.pep
QATIISFFCLIPFLMVPTMMSPMTMASMMPPMMTPSMXISPXPCPVGGGDKPTMTPPMMMPGMMPPTMMPSMASPMMLPGHNTXPHCYFGSNEPMFQQHLCHLSHFPLASACSPCRCTVP

SEQ ID NO: 276398 - protein, 69 aa, Zea mays
  Clone ID: MRT4577_183658C.1.pep
VSEKPIKSLFHAPQLLASRRPPHADMATRTVSFPSFAVSYQCRGARRMHLRCEGHEKLRVAVTANATFF

SEQ ID NO: 276399 - protein, 72 aa, Zea mays
  Clone ID: MRT4577_183659C.1.pep
KMRLSSFMYLCVCPQASFCGLSLSDAIYAFPLINPTFRHCLETLGAVSLAQCDDHRLFLISGSYTSHLSSVY

SEQ ID NO: 276400 - protein, 387 aa, Zea mays
  Clone ID: MRT4577_18365C.1.pep
MRARKAKTATSSFWRSLLGGCLGGGGGGGRAAGDRQRKVRPGGGGGRLSFTDLSGAADQDLSASLVGSNLHVFSVAELREATRGFVSGNFLGEGGFGPVYRGFVADGVKKGLKAQAIAVKLWDPEGAQGHKEWLAEVIFLGQLRHPNLVKLVGYCCEDEHRLLVYEYMEHGSLENHLFKQIPAVLPWSTRLNIAVGAAKGLAFLHDAEKPVIYRDFKASNILLDSDYKAKLSDFGLAKDGPEGDDTHVSTRVMGTHGYAAPEYIMTGHLTAKSDVYSFGVVLLEILTGRRSVDKTRPSREQNLVDYARPCLKDPLRLGRIMDPAMEGQYSPRAAQSAALVAYRCLSGSPKNRPDMSAVVRALEPLLDLHDDVPVAPLGHAGPVVLFV

SEQ ID NO: 276401 - protein, 61 aa, Zea mays
  Clone ID: MRT4577_183660C.1.pep
YFSQIRLHMLLAFVLLFKMALELIQFDAMFDPYVKCISCMFVIYLVILIDKAKIYSPSIVK

SEQ ID NO: 276402 - protein, 127 aa, Zea mays
  unsure (1)..(127): unsure at all Xaa locations
  Clone ID: MRT4577_183661C.1.pep
GCTRGRHRPIXESYERSLSVLACRYVDEVIIGAPWDVSKDMITTFNISLVVHGTIAENMDFTEDDLHPYAVPMAMGTYRRLESPLDITTSTIIRRIVANHEAYQKRNEKKEASEKKYYESKSFVNGE

SEQ ID NO: 276403 - protein, 53 aa, Zea mays
  unsure (1)..(53): unsure at all Xaa locations
  Clone ID: MRT4577_183662C.1.pep
GYCEGLRRQKEGAHRASXGVVGQEKRLRXPLLSLEVETMERTVREVGDGEFGR

SEQ ID NO: 276404 - protein, 46 aa, Zea mays
  Clone ID: MRT4577_183663C.1.pep
MQIFVKTLTGKTITLEVEPSDTIENVKAMIQDKEGIPPDQQRLIFA

SEQ ID NO: 276405 - protein, 38 aa, Zea mays
  Clone ID: MRT4577_183664C.1.pep
ENMEHFTAFFIHCISTESRHKIFFLHDSCIIPAFQPKT

SEQ ID NO: 276406 - protein, 75 aa, Zea mays
  Clone ID: MRT4577_183665C.1.pep
LALPNSPFRPHPPCLHGSTPASGYLWQRLPMNLLNVFVSLLTVSGDPQCATPPPLLLKAPPISLSVPRGSLLPPT

SEQ ID NO: 276407 - protein, 113 aa, Zea mays
  unsure (1)..(113): unsure at all Xaa locations
  Clone ID: MRT4577_183666C.1.pep
PPPHKGRSHTQGTQGHHHHHHHSTRPPPPQPQTTATATPQRNRQPTAHAAATAAPPTTRQRRTGRARPGRTGPPPAAAGEQXPTERQEPRXEERAGGXRXXKEKXRAGRNPQE

SEQ ID NO: 276408 - protein, 56 aa, Zea mays
  unsure (1)..(56): unsure at all Xaa locations
  Clone ID: MRT4577_183667C.1.pep
ALFMPYDHKNTTPNGASAQSMRXVLENLNRRHFQDSCLVGSGGGSRWRVSFLVCRS

SEQ ID NO: 276409 - protein, 155 aa, Zea mays
  unsure (1)..(155): unsure at all Xaa locations
  Clone ID: MRT4577_183668C.1.pep
RVYNFFHTEPIAVVNPVDYLQQQMLACNPLALANIVAYQQQQQLQQFVPALSQLAMVNPAVYLQQQQLIXSSPVGVVNAPTYLQQQLLXNSIVPAVTXLAVENPAVYLKQVVPFNQLTGXNCGWCLQQQQQLLNALAVADPLVIGLLQQKQWVSY

SEQ ID NO: 276410 - protein, 49 aa, Zea mays
  Clone ID: MRT4577_183669C.1.pep
TIAHTLFIITSYFTNNASFRTWMYLANLLLTLGTLKSANIAEEWLPGSL

SEQ ID NO: 276411 - protein, 155 aa, Zea mays
  unsure (1)..(155): unsure at all Xaa locations
  Clone ID: MRT4577_18366C.1.pep
RSIPSSQMGLSLXDFRRMEYLSQVIDETLRLVNISYVSFREATKDVFVNGYLIPKGWNVQLWYRSVHMDPEVYRDSKEFNPSRWEGYTPRAGTFLPFGLGTRFCPGNDLAKLEISVFLHHFLLGYKLTRTNPNCRIRYLPHPRPVDNCLAKITRV

SEQ ID NO: 276412 - protein, 101 aa, Zea mays
  Clone ID: MRT4577_183670C.1.pep
QVVHGISHSLRGSLRNLRDAQIVSQGTLENWVPIGGDIVEINVERKSSIRERRKLEGLDLGMQELRTYFRLFLLSTFLLMFMFCARISKNRNRDSGNLFDP

SEQ ID NO: 276413 - protein, 67 aa, Zea mays
  unsure (1)..(67): unsure at all Xaa locations
  Clone ID: MRT4577_183671C.1.pep
DMANCHKRFAIIRSRPRPKVGSRIPFLHESIEKRVWRSGNTHTAARKASHLRKEVXRTPAPPAEDEC

SEQ ID NO: 276414 - protein, 435 aa, Zea mays
  unsure (1)..(435): unsure at all Xaa locations
  Clone ID: MRT4577_183672C.1.pep
MSAAYPRLLLCLLTLAPALAGAAAGKISAPRTPISRDIYHSSDSLLREIKALVARHSSKLSMDTIKTSNKGYSAELFVVTFNHVKERMDNGSKVHILLXFIVFQSFGQHGRELITSEVALRLLYVLTEKPKIAGVDLSSFEKLLENLVIKVVPMENMNGRKRVEEGELCDRRNGRGVDLNRNWSVDWGKKEKDYDPYEENPGIAPFSEPEAQIMRELSRSFKPHIWVNVHSGMEALFMPYDHKNTTPNGASAHSMRSVLENLNRRHFQDSCLVGSGGGSVGYLAHGTTTDYMYDIAKVPMPFTFEIYGDEKASSDDCFKMFNPVDKKTFDRVVNKWCMAFLILFEEGLRNLRDAQIVSQGTLENWVPIGGDIVEINVERKSSIRERRKLEGLDLGMQELRTYFRLFLLSTFLLMFMFCARISKNRNRDSGNLFDP

SEQ ID NO: 276415 - protein, 77 aa, Zea mays
  Clone ID: MRT4577_183673C.1.pep
LLGQTPLTLTYIPMGGTQEFYAITVMKGENLAMAFSFSTGVRLVCPDPGCPNAYHNPPDIKTHACGGDSNYQVPFCP

SEQ ID NO: 276416 - protein, 55 aa, Zea mays
  Clone ID: MRT4577_183674C.1.pep
RTRGVIACGQDHCPCCFDSLRLSPDGSWRPARAASATATPATASPAASAPAAAAS

SEQ ID NO: 276417 - protein, 122 aa, Zea mays
  Clone ID: MRT4577_183675C.1.pep
KGNTRYTSVNKVSLRIWVCVLAPTRSFREKFNIVYHWCRIKLGEKLYNWQWVVQTEFPCPFSQSYIRCTVLPFPGQSFLQCYRMPLGVLCLWKPSLRHHIWITCTFSTRGIFVSVNMLYYWY

SEQ ID NO: 276418 - protein, 87 aa, Zea mays
  unsure (1)..(87): unsure at all Xaa locations
  Clone ID: MRT4577_183676C.1.pep
GRCRPVPWSLGSPRLLPALLAWRLCLLSGVCPRLLLRGXGRRCPPPXPPAALRLSSAPALRSRRAASPSVPGVGCPLRFAPPPPAAL

SEQ ID NO: 276419 - protein, 137 aa, Zea mays
  Clone ID: MRT4577_183677C.1.pep
MAEKDTFRNGLYIGALLNNLHIEKSVTYIRFSSYAFGSSTFTKRQGAYVGNQNGRADEMIELLLPTWDQNAREVFFLVDKSKTQETLKRFLRWAQNEFELKVKKIWSDNGSEFKNLQVEEYLEEEGIKHEFSAPYTP

SEQ ID NO: 276420 - protein, 54 aa, Zea mays
  Clone ID: MRT4577_183678C.1.pep
YASSTCLLYLLLFVLMKRRTLSSTFDSATGMHTGLLRHKQEEDLYNGVCIPGPV

SEQ ID NO: 276421 - protein, 427 aa, Zea mays
  unsure (1)..(427): unsure at all Xaa locations
  Clone ID: MRT4577_183679C.1.pep
PTGVVSGSDTSNVPNQVLDPNGYDPIVAELVAEIKPRYHIAGTKGVFYSREPYVNDSAAHVTRFIGLANVGNKEKQXSVMSSADINAKPPNATLSPYXVQQNQFLSKKLQNXAENIDSQYWRYDVKRQRHGEAGGGGLCFKFVSSGSCQRGSRCSYRHDEEAVEHYQRNVCFDFLNKGKCERGPECKFVHSLSGETALRDARPPSERRRVESSCWFCLSSPDVESHLVISIGEGYYCTLAKGPLVPNHVLMIPVEHCPSTLMMPPEAEAELGRYKIALSKYFEKQGKTAVYFEWVSPRSHHANLQAVPVPLSKADAVNKIFHLAAKKLGFEFSMVNPDGAKTARESLMSQCESKSGLFYVELPEGRILLHMVDSNEKFPVQFGREVLAGLLSMADRADWRNCKISKEEEIKLVDDFKQGFREFDPAE

SEQ ID NO: 276422 - protein, 47 aa, Zea mays
  Clone ID: MRT4577_18367C.1.pep
PMNDSLKDVHPLDIIGRAVKSNYTRITLKFQRSKITVNGNISKKRVH

SEQ ID NO: 276423 - protein, 45 aa, Zea mays
  Clone ID: MRT4577_183680C.1.pep
NKHLDHQNMEAQTQIVTTPLGTFGSRKERDGYDSASEWRWVRNGR

SEQ ID NO: 276424 - protein, 41 aa, Zea mays
  Clone ID: MRT4577_183681C.1.pep
NGGNNKQPSINSLHASDDYSHDLNKYGREINIYGPFFFNSQ

SEQ ID NO: 276425 - protein, 606 aa, Zea mays
  unsure (1)..(606): unsure at all Xaa locations
  Clone ID: MRT4577_183682C.1.pep
MAATSPAPAPPRILLAGDAHGRLHQLFKRVKSVNQSTGPFHALLCVGQFFSPEGAAEGSPEDVTDYLEGRASVPIPTYFTGDYGPAAPRLLSKAAAGARGFAPGGIEICPNVFWLRGSNRFTLHGLSVVYLSGRKGLGGPGCYSQDDVDALRALAEEPGIDDLFLTNEWPTGVVSGSDTSNVPNQVLDPNGYDPIVAELVAEIKPRYHIAGTKGVFYSREPYVNDSAAHVTRFIGLANVGNKEKQKFIHAISPTPASVMSSADINAKPPNATLSPYXVQQNQFLSKKLQNXAENIDSQYWRYDVKRQRHGEAGGGGLCFKFVSSGSCQRGSRCSYRHDEEAVEHYQRNVCFDFLNKGKCERGPECKFVHSLSGETALRDARPPSERRRVESSCWFCLSSPDVESHLVISIGEGYYCTLAKGPLVPNHVLMIPVEHCPSTLMMPPEAEAELGRYKIALSKYFEKQGKTAVYFEWVSPRSHHANLQAVPVPLSKADAVNKIFHLAAKKLGFEFSMVNPDGAKTARESLMSQCESKSGLFYVELPEGRILLHMVDSNEKFPVQFGREVLAGLLSMADRADWRNCKISKEEEIKLVDDFKQGFREFDPAE

SEQ ID NO: 276426 - protein, 84 aa, Zea mays
  Clone ID: MRT4577_183683C.1.pep
MAESLDMSLEDIIKSNKKGNSSSGGGGRRREGRLGSAAAGSGAAADAAGGVRPNRRAFKRSGNRGGALPAVEGPGIGVAARHAL

SEQ ID NO: 276427 - protein, 57 aa, Zea mays
  Clone ID: MRT4577_183684C.1.pep
SFHSKCLFGHVAANLSAPVSSISLDIPARSQHEVSLAIGRVCWLLEIWIWNASTNKI

SEQ ID NO: 276428 - protein, 127 aa, Zea mays
  unsure (1)..(127): unsure at all Xaa locations
  Clone ID: MRT4577_183685C.1.pep
MVDVEHIQPLSCDKGTAMXKGGLALDYAPRAGFPSFVGXPQHAGARLDTTYKXHYAAPWRYKQHMTVXLQSPFERGFFCILPDMYTPWYHTFYDGLLACAEELPYIICGASLITXLSAENMTHIVFG

SEQ ID NO: 276429 - protein, 72 aa, Zea mays
  Clone ID: MRT4577_183686C.1.pep
TIYNLFASRVLQLTLLHVINISQIQMHKAYFLLYTKYYIYTHLPRQKRHPDTLLFTQSQIFSSSKSSKHKLK

SEQ ID NO: 276430 - protein, 56 aa, Zea mays
  Clone ID: MRT4577_183687C.1.pep
VCSPSPGPVARHVQCARLAHRHGVLLGNGACRDKRQLPVTFSALVPLSKSSNNCMV

SEQ ID NO: 276431 - protein, 95 aa, Zea mays
  unsure (1)..(95): unsure at all Xaa locations
  Clone ID: MRT4577_183688C.1.pep
PRCVFDPNASCATIKYVLAEASTAMFAALDELFYXFRVWPMDVVVLVVNFILFNPMPSLSSMIVNHYKTRCNILIYNLGGTGCIAGVIAIDLALD

SEQ ID NO: 276432 - protein, 63 aa, Zea mays
  unsure (1)..(63): unsure at all Xaa locations
  Clone ID: MRT4577_183689C.1.pep
HVRYDTIPYRSHYGIKKNSFPDLMVYLLVPSRITSRWFLPMHGCTGRPSSXNPRRLRSTYWDY

SEQ ID NO: 276433 - protein, 54 aa, Zea mays
  unsure (1)..(54): unsure at all Xaa locations
  Clone ID: MRT4577_18368C.1.pep
HLIDIHLERRPTVGRVREYNRSLGTLGTFIINNDHKEGRFATYIYEXPSLIDTK

SEQ ID NO: 276434 - protein, 71 aa, Zea mays
  Clone ID: MRT4577_183690C.1.pep
SYWPARACAGDVVAMDERRGHTAIAADIQGIVSTLIDKTIDSQAELLRQLSDFTQCHHSMKVTLVMLTSSE

SEQ ID NO: 276435 - protein, 162 aa, Zea mays
  unsure (1)..(162): unsure at all Xaa locations
  Clone ID: MRT4577_183691C.1.pep
TNTAHSTQHRQLLRERERRGAGGGHHHHNQPAPPAXGPNQGXKSXXRANENHXXAXRDGAXXPAPANPKDDQGGGXXXXXXXTXXXXQEGXPAXAPXNKATGPATKHTHGQTHPDKHAXNNPDQEDATXXXTESKDXGKGQRXNHKDNNTRHNXNTPHGDKD

SEQ ID NO: 276436 - protein, 88 aa, Zea mays
  Clone ID: MRT4577_183692C.1.pep
VAFSPLSILLRWQKSNTVYSGKVIIRNEFNGWELATGPSNPFYRHLYRSSSQVQYRCTGPVLASFLFLCSVLHVKKYRGQPFLLCSVT

SEQ ID NO: 276437 - protein, 51 aa, Zea mays
  unsure (1)..(51): unsure at all Xaa locations
  Clone ID: MRT4577_183693C.1.pep
MKEVVLHVYDVINSDSXMTNNTILXINRIFKVRIGLCGLLHIDVQVYGQDQ

SEQ ID NO: 276438 - protein, 63 aa, Zea mays
  Clone ID: MRT4577_183694C.1.pep
LFFRKKKGGLCTQRYSKQGVPARFILRGRSQVWVSQNAQFNSLCIIIKLLANPGNSRAPTLNG

SEQ ID NO: 276439 - protein, 248 aa, Zea mays
  Clone ID: MRT4577_183695C.1.pep
TGKAALPLKRDRTRSKRFLEIQKLRESKKDYDVPTAISLMKQMSSAKFVESAEAHFRMNLDPKYNDQQLRATVNLPKGTGQSVKIAVLTQGEKIDEARAAGADIVGGEDLIEQIKGGFMEFDKLIASPDMMPKVAGLGKILGPRGLMPNPKAGTVSPNITQAIEEFKKGKVEYRVDKSGIVHIPFGKVDFPEEDLIANFMAVVRSVERNKPSGAKGIYWKTAYLCSSMGPSIKLNIKEMLDYGLDSSD

SEQ ID NO: 276440 - protein, 345 aa, Zea mays
  Clone ID: MRT4577_183696C.1.pep
MATAAAATASSSLLAPAASSTAPASSNALLFPSSVPSLRAYPRLLLAFRRPAAAAVADPQGAVLEEEAEVDQQGQYDDDDGYEGGRGPAFTAPTRPRTGKAALLLKRDRTRSKRFLEIQKLRESKKDYDVPTAISLMKQMSSAKFVESAEAHFRMNLDPKYNDQQLRATVNLPKGTGQSVKIAVLTQGEKIDEARAAGADIVGGEDLIEQIKGGFMEFDKLIASPDMMPKVAGLGKILGPRGLMPNPKAGTVSSNITQAIEEFKKGKVEYRVDKSGIVHIPFGKVDFPEEDLIANFMSVVRSVERNKPSGAKGIYWKTAYLCSSMGPSIKLNIKEMLDYGLESSD

SEQ ID NO: 276441 - protein, 121 aa, Zea mays
  Clone ID: MRT4577_183697C.1.pep
MGGKLLLGASQSRHAHAVASPPLSKVATSGLHGEDSPYFAGWKAYDENPYDAVSNPGGVIQMGLAENQVSFDLLEGYLRDHPEAAGWGGSGSGVASFRDNALFQDYHGLKAFRKAMANFME

SEQ ID NO: 276442 - protein, 79 aa, Zea mays
  unsure (1)..(79): unsure at all Xaa locations
  Clone ID: MRT4577_183698C.1.pep
EIXXILDVNDVQTYVINRARDGFLNEPPQLRAFRGPIWKGPTLLTHSWETRSPGLPEAIRFCPLGCHLRSLNIETGIQA

SEQ ID NO: 276443 - protein, 43 aa, Zea mays
  Clone ID: MRT4577_183699C.1.pep
RLQLLHVLVEGILRYISRRHRQGAKPLDCVRSLILYTFCTSKG

SEQ ID NO: 276444 - protein, 112 aa, Zea mays
  unsure (1)..(112): unsure at all Xaa locations
  Clone ID: MRT4577_18369C.1.pep
MKYMKLGSKPDAFQTEGNSIRSVATELAVDIVVTVGDVKFYLHKFPLLSKSSRLQTLVASTSEEGSDEVDISDIPGGPAAFEVCAKFCYGMVVTLNAYNVLAARXAAEYLEM

SEQ ID NO: 276445 - protein, 60 aa, Zea mays
  Clone ID: MRT4577_1836C.1.pep
QFLPINQLAALNPSAYFQQQILIPFGQLVQTSTASFLTKQTSASVKLDSMCLHRATFIQS

SEQ ID NO: 276446 - protein, 76 aa, Zea mays
  Clone ID: MRT4577_183700C.1.pep
SLLYTGPGCLFFFWPEKGTIPHCRRPPTDGKTIYKHMFRPSNKKSLNPLACDCHSESTRQTNTNVMMLFLLDRHQT

SEQ ID NO: 276447 - protein, 77 aa, Zea mays
  Clone ID: MRT4577_183701C.1.pep
MAAAPAPADAKAEAAKMDLLEDDDEFEEFEIDQEWDDKEEGNEAVQQWEDDWDDDDVNDDFSLQLRKELEGNNAQKS

SEQ ID NO: 276448 - protein, 58 aa, Zea mays
  Clone ID: MRT4577_183702C.1.pep
VAIRKEESLSASGEWPPPRTLIGTKPPVQLKFLGNAKFISNSKGNVANFYFWPRSFRY

SEQ ID NO: 276449 - protein, 192 aa, Zea mays
  Clone ID: MRT4577_183703C.1.pep
MLPPAARLAARRLLGLASASASQSAARRLSPSPISSPAAAAATGYFSRAFSSALNYHIDSPDNNPNMPWEFTKANMDKVNEILSHYPSNYKQSGIIPMLDLAQQQHGGWVPVAAMDAIAKIVGVAPIRVYEVATFYSMFNRTKVGKYHLLVCGTTPCMIRGSRDIEDALLKHLGVKRNEVTSDGLFSVGEME

SEQ ID NO: 276450 - protein, 83 aa, Zea mays
  Clone ID: MRT4577_183704C.1.pep
KAIIPMGGFPHYGIVKGEYLMIKGFCLGPRKRVVTLSQSFLKQTSRLALKEIKVKLIDRLSKFGHGRFHPTDEKQRFFGKLKG

SEQ ID NO: 276451 - protein, 61 aa, Zea mays
  Clone ID: MRT4577_183705C.1.pep
MHHSPTLSSDAWARGVLKIFLENVIRDAVTYTEHARRKTVTAMDVVYALKRQGRTLYGFGG

SEQ ID NO: 276452 - protein, 106 aa, Zea mays
  Clone ID: MRT4577_183706C.1.pep
SSPLPARLGSSAFRVRYGRFVPAAVPDRWPCAVARLHRAPGNGEPTASKRHNPVSQSTLTRTLGARALIQRTLRPFLLHLLTGLHDECSCFSSGCICYPVNTCLIL

SEQ ID NO: 276453 - protein, 93 aa, Zea mays
  Clone ID: MRT4577_183707C.1.pep
KEKTTITSHRISSVDGGLQGRASAARQHGLHMQNLDHKLNNIHLMIYSLDTYIFQDIWEEHSHMGIWDYFSGALFKKIQGLQMLNVLGQELTF

SEQ ID NO: 276454 - protein, 87 aa, Zea mays
  unsure (1)..(87): unsure at all Xaa locations
  Clone ID: MRT4577_183708C.1.pep
IQFIALLFTINVQIKGGGGWGAXXNYLNKSXFKRILQFINAIIIIFHNIIFTNCYNFQFPSFIFPLHFIILSILITLYYXFIPNFFS

SEQ ID NO: 276455 - protein, 155 aa, Zea mays
  Clone ID: MRT4577_18370C.1.pep
PRLALQCLPPNSLHSCTLSGLLIPTSPRPAPHHLAKVEDSNEIWLPISLISISVKCRYNHLPYNYTRCMRGVGAAAAHFPPFNLLAEQDQVALTGSTPLCGMLHSLQRQRGVKGVEITSLENRESRRLSFLVKTDAWLYKMLGGIYYYPILLLSL

SEQ ID NO: 276456 - protein, 108 aa, Zea mays
  Clone ID: MRT4577_183710C.1.pep
NNFFFFFFFFLGGFFFFFLWFFFFWEKRGLFRPFYGPKGQQNKLAPIGQRNLNLGGGFLKNKGARWAKKQGGGCFRKQKGKPPPGGGGPGDFPCPGGVVLSLGGQFFS

SEQ ID NO: 276457 - protein, 76 aa, Zea mays
  Clone ID: MRT4577_183711C.1.pep
HWARGVFPGGGGGQPRGGGSFFGGNPKILGGKNHRGIAQKSNKRLKVKGKKPYLALKKPGGIYYPKKGGCFPENLG

SEQ ID NO: 276458 - protein, 52 aa, Zea mays
  Clone ID: MRT4577_183712C.1.pep
MTTASRSHLRQSYHQDSHAAINRHINPEFYHSYVSPSMSCYFDRDDVALKNF

SEQ ID NO: 276459 - protein, 117 aa, Zea mays
  unsure (1)..(117): unsure at all Xaa locations
  Clone ID: MRT4577_183713C.1.pep
AXXAAARHGGVQVCXRNYXXEEAVXTRDALRXQRVXAAGXYMAXQPSIRPPSPGSTPPRQGARRLGYKGQAGXYVVYRVRVIAWWXGKRPCAQGYLSMAKPKHQGITQLKFQREQEV

SEQ ID NO: 276460 - protein, 41 aa, Zea mays
  Clone ID: MRT4577_183714C.1.pep
SMVSPDAQGRKARPVMSMKQVKPPISSESILAVWLAVERGS

SEQ ID NO: 276461 - protein, 189 aa, Zea mays
  unsure (1)..(189): unsure at all Xaa locations
  Clone ID: MRT4577_183715C.1.pep
LLARPISLSPSPRPRPFTGCDAPGLSSNLTTALAGLTTTTSHALPWRVSDAKGQARGRLASRISGALRGKDKPTYLPHAQNVQMCIALNAQCITATGTTIVXSTHYWHTCYVXHFEERTLKYQMDKDPTEAILTAALRMLPHIKLRDDNDHKLRIFSGIDHPFHDRPLGDPAVPHRQIATCEPAHRVPC

SEQ ID NO: 276462 - protein, 618 aa, Zea mays
  unsure (1)..(618): unsure at all Xaa locations
  Clone ID: MRT4577_183716C.1.pep
CGPRGARLVPRRVGVRDGGATVGAAGAXGAGQKAELGPDVRRLSLTASLETDSRLHVRITDADHRRWEVPQSVIPREAPRDDVPLEASTGASPPRSRVLSAATSDLAFTLHASPFRFTVSRRSSGDALFDTSAALVFKDRYLELTTALPPEGGASLYGLGEHTKRTFRLQRNDTFTMWNADIPAANADVNLYGSHPFYLDVRHAGAAHGVLLLNSNGMDVEYGGSYLTYKVIGGVLDLYFFAGPAPLDVVDQYTQLIGRPAPMPYWSFGFHQCRYGYKNLADLEGVVAGYAKARIPLEVMWTDIDYMDAFKDFTLDPVNFPAGPMRQFVDRLHRNGQKYVVIIDPGISVNETYGTYVRGMQQDVFLKRNGTNYLGKVWPGYVYFPDFLNPRAAEFWAREIALFRRTLPVDGLWIDMNEVSNFVDPAPLNALDDPPYRINNSGVRRPINNKTTPASAVHYGGVRDYDAHNLYGFLEARATHGALLADTGRRPFVLSRSTFVGSGRYTAHWTGDNAATWDDLRYSINTMLSFGLFGIPMVGADICGFGGNTTEELCSRWIQLGAFYPFARDHSAIGTVRRELYLWELVARSARKALGLRYRLLPYMYTLMYEAHTTGAPI

SEQ ID NO: 276463 - protein, 121 aa, Zea mays
  Clone ID: MRT4577_183717C.1.pep
PVAMASNKKPIAATALLFLAVALTLAASVRAQALLAPTPAPAPSQNPCPAGFNNLLAFEIAKKEFLLNNGTMLLLFPSRGTQSTTSMAPSAAKGVRGVVCICFLCTNRILIGGPLTCQQLV

SEQ ID NO: 276464 - protein, 53 aa, Zea mays
  unsure (1)..(53): unsure at all Xaa locations
  Clone ID: MRT4577_183718C.1.pep
MILEKLQKKDTYGVFAXPVDPEELPDYHDVIEHPMDFSTVRKKLARNAYRSFE

SEQ ID NO: 276465 - protein, 50 aa, Zea mays
  Clone ID: MRT4577_183719C.1.pep
FVWHLNCLSKPFLYSSYFPLLTFLFSFTLLNLSFPFLILPIHGDLHLSIY

SEQ ID NO: 276466 - protein, 123 aa, Zea mays
  Clone ID: MRT4577_18371C.1.pep
SPALEFFFLYIELLNSGFKKYLLELESYCSGIKGQTWGLNNFFIEANRTYKALNFWKKWYWTNTCEGCSHKILQKILALMTSSTTLPLIMWWLNTQETQCSAWGSLPVCIITKLSKENNIARS

SEQ ID NO: 276467 - protein, 63 aa, Zea mays
  Clone ID: MRT4577_183720C.1.pep
IFMTTRKQKTPLLHRHGASKGTTPTNNLDLAMRSNVQQTTHMHISASINSRAYTLYETKDNEP

SEQ ID NO: 276468 - protein, 66 aa, Zea mays
  Clone ID: MRT4577_183721C.1.pep
FRFFTSKHEYSCILYLVDIEWPVSKLFLISSRSLNLMMGYRGRGLNPSGKCNLCHVFSEVRLELDR

SEQ ID NO: 276469 - protein, 70 aa, Zea mays
  Clone ID: MRT4577_183722C.1.pep
TPHIDQSSVTTALNLLDSLLILNLLPSLLYAFHAPLEDVVLPIAGYRHSNIPKTPGTQGGRRLVETSTRQ

SEQ ID NO: 276470 - protein, 82 aa, Zea mays
  Clone ID: MRT4577_183723C.1.pep
RFMNQHSFYLKNWMGLIIIHQGEGPLLFLSIKILAKPLELTQPFLIKKPKGLHGPPLKKGWAEKTFVHYCRFWFGHPRGRVG

SEQ ID NO: 276471 - protein, 103 aa, Zea mays
  Clone ID: MRT4577_183724C.1.pep
IDISVLVNIGRGHCIYLSDEMPKSHRLSVGQSAVQRLPPRCWQPPRYLDQSPSSPPRSPEVARSPRRAWVLLHQHWTWSCLALAAVVCPPCSRPAAPLSPGWL

SEQ ID NO: 276472 - protein, 45 aa, Zea mays
  Clone ID: MRT4577_183725C.1.pep
KGVPALGWWGMLVGSLRLASSWFSFVDMCALRVAVFSQTEMTDVH

SEQ ID NO: 276473 - protein, 84 aa, Zea mays
  Clone ID: MRT4577_183726C.1.pep
GWKMANHSHRVVNMASCSRHRLRRTAHLPAAGSAPATRPDVGSTPPQDDVCGAVAVPCPRASRSVPPLDIYISRCPCDIELQLM

SEQ ID NO: 276474 - protein, 168 aa, Zea mays
  unsure (1)..(168): unsure at all Xaa locations
  Clone ID: MRT4577_183727C.1.pep
CXPRXSCCLXPSPSPSRPXXPSCPGRGAXPSPSRSPXXXASWPGPRXGXXWRPWXAXRXWSSRRXXGGXXXXRRRCXXGGSXXRPWPRXPCXRXRXPGXAPSGAPPWPAGRXPRLFGXRRXPWPRXRRRXXRGPLXGGGPAXSWPFPLARLGXPASWSLLFXXLCVPL

SEQ ID NO: 276475 - protein, 48 aa, Zea mays
  Clone ID: MRT4577_183728C.1.pep
HVSIKIWGVHFVIRNKNRAPFYGLWEPRAYVYSFRPERKKKREQEPHS

SEQ ID NO: 276476 - protein, 61 aa, Zea mays
  Clone ID: MRT4577_183729C.1.pep
ISRTSSIGSLLSSCFRTSFTLTWSMSSIFPSRCGDCSPVFGCFRSAIVDLLDGTGLVRVGR

SEQ ID NO: 276477 - protein, 126 aa, Zea mays
  unsure (1)..(126): unsure at all Xaa locations
  Clone ID: MRT4577_18372C.1.pep
QHRKHIRVPTIVSERFGYLTLLGLCAHAATATIFPQCLQATIASLLATYISPALYATADNPIRQHSWIXQLAVSTSILPISPSVIXQHTQDVSQDVPTVATWEQPIRSHQLLXLVLATLAAYFQPT

SEQ ID NO: 276478 - protein, 69 aa, Zea mays
  Clone ID: MRT4577_183730C.1.pep
SGLCEGDAHAERPQGMLPSSALPGKQAGEEERRGGLCTKQSIFIHLYLLNEKKKGILWCPSSKVAFKCC

SEQ ID NO: 276479 - protein, 85 aa, Zea mays
  Clone ID: MRT4577_183731C.1.pep
PPSKGQPRGSKVLFLAPKHGFPILLGLEFRAPPSFPIALGRRNPRFLTGPLLFIAWEPQAFWVFGENRELCEFKNPVEILQGSVF

SEQ ID NO: 276480 - protein, 74 aa, Zea mays
  Clone ID: MRT4577_183732C.1.pep
KKRGGAPPPSRGAGPPPPPPGAIARGAGNRSWDQPALLLVVVGPGAHGETRREMCGSQAPHLTRGEKRGRRRAL

SEQ ID NO: 276481 - protein, 131 aa, Zea mays
  Clone ID: MRT4577_183733C.1.pep
APNAGSSQDGACPPPLRAPIGGARRRLQRRRPQPHAQPPARARDSTPGRTPRATSGRTPRGAPTRRLGSMGVAGEEEGLGAHRGAQLVHRGERERVGTSVHGGGAYVGGITCAAKGRRGLWKHTVRTRRTG

SEQ ID NO: 276482 - protein, 121 aa, Zea mays
  Clone ID: MRT4577_183734C.1.pep
MEVSMVEPTKHPPLQFAGFTGFGPQNPVVRFRRESMSSRGIITKGTFGFGSEPQYEEVRRMRRLAQSRSYAQGTFGVISEKGNRLKREKAIQTSMDYYRVIGQCKGISVILHGLRPVPINR

SEQ ID NO: 276483 - protein, 62 aa, Zea mays
  Clone ID: MRT4577_183735C.1.pep
VVVPVGFHVNVHFIVLFLDYDFIGPSEDSVLAASTLRARRATWPSYLIVITLDVDSIGRRAT

SEQ ID NO: 276484 - protein, 76 aa, Zea mays
  Clone ID: MRT4577_183736C.1.pep
CCMQGGSLRRTPLVRRGVKSGGDRPERLAQGGRRASAGERWSAEVGPCCAVRWFSCRENGRPGAARHMGFFFFFFF

SEQ ID NO: 276485 - protein, 115 aa, Zea mays
  Clone ID: MRT4577_183737C.1.pep
MARLRLAVVAVALALCCCCCLMIHAPTIGAAAAADAASFPPGLEVAAQQQDTRRVAPPPSSSSGAQHHQEAAAGAVAAEATTPVGRKRTELELVEDYPGSGANDRHSPWAQQRRN

SEQ ID NO: 276486 - protein, 83 aa, Zea mays
  Clone ID: MRT4577_183738C.1.pep
TRKLSTRGGGCHQTPFNYLTGCTLHQLFPQLTGHSNFFDSHSLTKQTLTLIFYKLWKNYSIPFQLKTLDLRCSTRSWYLLFLA

SEQ ID NO: 276487 - protein, 106 aa, Zea mays
  Clone ID: MRT4577_183739C.1.pep
MSFLPIPLPVVGDIASKLHDQEKPRGNGTTSAAAPIVGTVASRWRELHGENSWKGLLDPLDLHLRATIISYGEMVQATYDGFNTERRSPHCGACFYGHDDLLAGRG

SEQ ID NO: 276488 - protein, 193 aa, Zea mays
  Clone ID: MRT4577_18373C.1.pep
AVGEWRDSGCAGQEQATKKMSTLDTRTLKDELTSMDRKCLVDLGHPLLNRVADSFIRAAGVGAARAVSREAYVVTVEGLSGDSSGLDADGGKRSHFSSIRGDDGQRSLDAVVKTAGKEAFQWGLAAGVYSGLTYALREARGCHDWKNSAIAGAIAGAAVALTGDAGGHSDKLVNFAITGAALSSAGSLLSGIF

SEQ ID NO: 276489 - protein, 104 aa, Zea mays
  Clone ID: MRT4577_183740C.1.pep
TLYLFSCDSQRSDHSSRAERRKDDTLLFLARSILRQPYLTSYLYLQAPPRWVCIALDVETTTTTPRPAVDTLCTAACFDNNVRVPDGVRYVPARGDLDRRTGSQ

SEQ ID NO: 276490 - protein, 80 aa, Zea mays
  Clone ID: MRT4577_183741C.1.pep
IPHEIANIDKRGARKDKENKPEILVIQGPKPGKPTGMAPMPQILLKLKHTRPPHRKPTPPPAAATGNDGAPTAAGRMELS

SEQ ID NO: 276491 - protein, 72 aa, Zea mays
  unsure (1)..(72): unsure at all Xaa locations
  Clone ID: MRT4577_183742C.1.pep
YFHQRNNMSVAAYSKQHQPEMTLHATLLSRSKVHPTXKRXLFTNEKNASMEFYNTTLNTHTLVLPKMDIMLN

SEQ ID NO: 276492 - protein, 184 aa, Zea mays
  unsure (1)..(184): unsure at all Xaa locations
  Clone ID: MRT4577_183743C.1.pep
MLFHIEVXRNMQLHPQHFCAAPTRDKVVSLAHXDAQGTCSXRHGYRMWLITEXKDINKVLIRQSTGYVTFPVEDQCCVFRPFRGEILELACTMQDXMFFFAEAGPLAXIFVSYHLIPDDMEFQSXDGSNYTTSDESGKIRKESDVRLKIIVTPDHATQMFXCLDTTQDDLLRAIXHPDAAVHMV

SEQ ID NO: 276493 - protein, 48 aa, Zea mays
  Clone ID: MRT4577_183744C.1.pep
TEIGPVKLSQCWVSSFDRPATVVSDHYFSPASTNSLPTPVHQPCQRGS

SEQ ID NO: 276494 - protein, 142 aa, Zea mays
  unsure (1)..(142): unsure at all Xaa locations
  Clone ID: MRT4577_183745C.1.pep
APESPAPASRAPATAHRTGTEEPPAXAPTPARDARQNPDGPTPHHGGGNPGTQDQEPGGAQEDRQPARTGATTTPRERGEARTRPRRPXPPXARRQKSPTPPETPAPAKEEHKPETRPHAPQPPQPDTAEARRQPRGTTSHD

SEQ ID NO: 276495 - protein, 112 aa, Zea mays
  Clone ID: MRT4577_183746C.1.pep
NYPSFSVVFASPGEVVKYKRVVKNVGNNVDAVYEVGVKSPANVEIDVFPSKLAFSKEKSVLEYEVPFKSVVLGGGVGSVPGHEFGSIEWTDGEHVVKSPVAVQWGQGSVQSF

SEQ ID NO: 276496 - protein, 144 aa, Zea mays
  Clone ID: MRT4577_183747C.1.pep
ITTQLKMTQSNWLKQRSVPHLTEWTKFSLPPALKTDKKKKRCLVAAWRRHPAATILHHMGRVLGHQKQGREAEARDIKQARECFTRVPYLAHVAAVQLAVAGRVDFRDVLVAGGKTHAVMWLHCSLKSDSATRRAQGMSPPAAL

SEQ ID NO: 276497 - protein, 96 aa, Zea mays
  unsure (1)..(96): unsure at all Xaa locations
  Clone ID: MRT4577_183748C.1.pep
EGEDELIGGGWLVGGRVVSRLGVASGAGRGTWRVRRARGRRGSPPXPGTHPARRTWLAGGQNRSFSWGISLLLSLLGRDVSCGLQRGKRARPGRPR

SEQ ID NO: 276498 - protein, 214 aa, Zea mays
  unsure (1)..(214): unsure at all Xaa locations
  Clone ID: MRT4577_183749C.1.pep
SAXSYSGGWVGCTLQDSLLPWRPLYXXLLSTWXXXRWKKGKQSAXWGSMXISXASPSLVVLDPARGAXRRRSVLSTTRXXRWPRRPLPQGPSXARRGRKLXLLPXLQXKETXXXRGFFENXXLXSXIGPRXETXAPLAXRRFWPXXGXSKYRRRLXGGQYHXXNGXAXRRPPRPCGKPHXXRPTSLGXXVXXSPVAGSRKKREARXHRXPPAPS

SEQ ID NO: 276499 - protein, 88 aa, Zea mays
  Clone ID: MRT4577_18374C.1.pep
SGRPGRYKLFFFFFFFFWFFFFFFFFFFFFFFFFFLQKNNFFCKLFDHPQQKGGTSAPTSKFGFTAGSNYPKFFNLKQMRHPKGGKSF

SEQ ID NO: 276500 - protein, 79 aa, Zea mays
  Clone ID: MRT4577_183750C.1.pep
GGSPAERPQKRGGLKDQNGGNRGAPPPQKEGNKRKRSYPAGRDFSSQALKSPQKRGIRGKRAGRKKKKKKKKKKKPPPP

SEQ ID NO: 276501 - protein, 97 aa, Zea mays
  Clone ID: MRT4577_183751C.1.pep
LHTVMHYIHASQSAALRHYKVRSGKFKFLVSWGILMVGGERLSLGIHAKHVVSSSPSSNFTWRRISKFPGRRLTASRDSSSSKLMLRAWCPRCRNQE

SEQ ID NO: 276502 - protein, 104 aa, Zea mays
  unsure (1)..(104): unsure at all Xaa locations
  Clone ID: MRT4577_183752C.1.pep
KKKNKEGKKKLIKNIKINTIKKKKKKKNGAPVLKVPSFLPRACNFIFFFWGTLILFYWPCFNNVWIGKTLELPNLILLXHFPFSPLGILLKGPSPILFPKSCPA

SEQ ID NO: 276503 - protein, 65 aa, Zea mays
  Clone ID: MRT4577_183753C.1.pep
FLWRGRKEARGGHCLVAWGRVCRPLQLGGLGISSFLELCWALRMRWRWLQKTDPTRCGFVYTTLN

SEQ ID NO: 276504 - protein, 109 aa, Zea mays
  unsure (1)..(109): unsure at all Xaa locations
  Clone ID: MRT4577_183754C.1.pep
EPASVLQQPCAQRQQQSLAHLAIRPFPAQRQQRLLPALSPLFMVGPVASXHQQXLASNPLDVDRAGPIRHHHMRQYVPALSHLSMVYPHGFLRQHLVLSCTAALCGQSL

SEQ ID NO: 276505 - protein, 434 aa, Zea mays
  Clone ID: MRT4577_183755C.1.pep
MEDDPSRQVRVRFVTKLPPPLRAPPAAIAVPADLTRMGLSEIVNSLLAAAEPDHQSQPFDFIVQGELVRLPLQEFLLAKGISAERVLELEYVRAVAPRKQEEPCPHEDWVSAVDGSNPGFILSGCYDGLARLWKDAAVCTQILEGHNDAITSTRFINKGSETEGSLHVVTGSKDRSLRLYKCDTSVIMDYPKRVGAYKILRGHTASVKSISADPSGDMLCSGSWDGTIKLWAVEGSDDDDAVSLKKRRMNSDSSGPEESQLEGSATSTLLGHTQGVTAVTWPERKTIYSASWDHSVRQWDVQTVKETWNMFCGKALNCLDCGGEGSSLIAAGGSDPVLRVWDPRKPGTLAPVFQFSSHSSWITACKWHPSSCFHLVSSSFDGKVMLWDLRTAWPLASVDSHEDKVLCADWWKGDSVISGGADSKLCISSGIQIV

SEQ ID NO: 276506 - protein, 259 aa, Zea mays
  Clone ID: MRT4577_183756C.1.pep
MKTLCPKPGKGGKIHPSPAEDPTAAAFRLLPAAILVLVAGLCPEDQRVLAHLVTRSFLLGWDTITAPPPEQARGGPRRRRGHPPTVGCLCFQCYGSFWSRWDCSPQHDRIHAVLDAFEEHLNAAESAAAATATPPSSKRRDKGKRSRAPAATTPPPQPPTRGSPESQEPPSEVAHEPSAPLLPSCPCTPPPPAPAACLSENKENVPEETGAEAKAEQCGGEVAAEADEERKRGWADVMGGVLNLRRWGIWSPAVESGAT

SEQ ID NO: 276507 - protein, 172 aa, Zea mays
  unsure (1)..(172): unsure at all Xaa locations
  Clone ID: MRT4577_183757C.1.pep
MEDDPSRQVRVRFVTKLPPPLRAPPAAIAVPADLTRMGLSEIVNSLLAAAEPDHQSQPFDFIVQGELVRLPLQEFLLAKGISAXFFRRPFFRRCCCVGCGCDLREDSVWMCXERVLELEYVRAVAPRKQEEPCPHEDWVSAVDGSNPGFIISGCYDXGLARLWKDAAVCTQI

SEQ ID NO: 276508 - protein, 106 aa, Zea mays
  Clone ID: MRT4577_183758C.1.pep
LKKNFKKNPKKEKGEKKKKKKKKKKKKKKKKKKKKKKNKRGVPFGGTQFFGPGAFVFTPPFFLWGGGGGLTSPLVATPYLIWENPGLSPSWRALKEVPLLPRLPFL

SEQ ID NO: 276509 - protein, 101 aa, Zea mays
  Clone ID: MRT4577_183759C.1.pep
AVVTTQSTRVWAVEGSDDDDAVSLKKRRMNSDSSGPEKYQLEGSATSTLLGHTQGVTAVTWPERKTIYSASWDHSVRQWDVPTEKKKKKKKKKVLCVVTTA

SEQ ID NO: 276510 - protein, 94 aa, Zea mays
  unsure (1)..(94): unsure at all Xaa locations
  Clone ID: MRT4577_18375C.1.pep
TRLLILAFMGAAIAVPVDDDDKIVGGYTCEENSVPDQVSLNSGSHFXGGSLISDQWVVSAGHCYKPHIQVRLGEHNIEVLEGNEQFINAAKIIR

SEQ ID NO: 276511 - protein, 46 aa, Zea mays
  Clone ID: MRT4577_183760C.1.pep
TTDSKLNLFYVIDLAIISHFFLFYFFIRPNGLFFFFFEINHNSQMA

SEQ ID NO: 276512 - protein, 115 aa, Zea mays
  Clone ID: MRT4577_183761C.1.pep
KETCHPSTKHGGVKKKRGPQISFVVPHTKGQNTTHLLFAAHGGRKKQRTVNHLSKNGKKVSGPKRVTTYYSSALGKNKISLYFLLGKQNMLVHPGIILSKLNLLGDPTRILPLHV

SEQ ID NO: 276513 - protein, 51 aa, Zea mays
  unsure (1)..(51): unsure at all Xaa locations
  Clone ID: MRT4577_183762C.1.pep
IVMQKSDASRIVFCVYQMQKSDALNSYEIIVICSHILSKERNAMVSDVXCL

SEQ ID NO: 276514 - protein, 197 aa, Zea mays
  unsure (1)..(197): unsure at all Xaa locations
  Clone ID: MRT4577_183763C.1.pep
SNHHLPPPSAAPPHAPPRPPSTGAAVGSPPQAAAPPRSREPXPAPPPDNXRPPPRRPXPQPSAXRPQPXPPRSGPAAPPPTSHGGRTLPAPFHPAAAPPSKIPSATXSRPARPXPQPDSSVPAPYAAAGTTXLPPPGAXPPXPAPXASRPIPXPPQPQPPTXPGNGSRHLRPDPVAMVPGGEGSPSGLSRSDVSADD

SEQ ID NO: 276515 - protein, 127 aa, Zea mays
  unsure (1)..(127): unsure at all Xaa locations
  Clone ID: MRT4577_183764C.1.pep
MSTETHTVALHVDIDQLXLALITPRFYSNXEMLLREVISTSTDEWGQSRWGSPTDQRKLEAKPEVFIHTVRYKATSSMTTTYSAMRMSYSELVDSRVTMLPWSXPKECMYMLAAXTDVDMSGQSEVG

SEQ ID NO: 276516 - protein, 51 aa, Zea mays
  unsure (1)..(51): unsure at all Xaa locations
  Clone ID: MRT4577_183765C.1.pep
XLGXXTLKSSIIYQPETRNLCSEDRVTATSFNYVTWAAKLMYXCYGVRLTT

SEQ ID NO: 276517 - protein, 77 aa, Zea mays
  Clone ID: MRT4577_183766C.1.pep
LWCSSPSFSFDCSTSAALPMAATAALTSSMAWVTICVASAPTATPLRPRDTRLLRRIDGGNVGTVYLCRHGLRHLNV

SEQ ID NO: 276518 - protein, 40 aa, Zea mays
  unsure (1)..(40): unsure at all Xaa locations
  Clone ID: MRT4577_183767C.1.pep
NSRSLILMKYIQTNIYITCGSSIYICRYCYXKVSXRIYIP

SEQ ID NO: 276519 - protein, 74 aa, Zea mays
  Clone ID: MRT4577_183768C.1.pep
LIYTGLFLLNFCFYASTVKDTFGSRQQGLSFLNHICQKKTVIDVPLPCLKLSRKTRVVGIKNTQRVSVRQPWGR

SEQ ID NO: 276520 - protein, 82 aa, Zea mays
  Clone ID: MRT4577_183769C.1.pep
DLLRPLSPHDIDQITVDDLGILINSIPTVSFIELITELAILTHHRIITIKDLVRPFINPLTRIKIQLTKPNRSKIHKNNDEL

SEQ ID NO: 276521 - protein, 76 aa, Zea mays
  unsure (1)..(76): unsure at all Xaa locations
  Clone ID: MRT4577_18376C.1.pep
ARPPNFAQIKVXSLVTPVHCFTFSFPXRYLRWCGCRHPVSFTNLTNAFVCKFCPPMFPFWVQKKKKGKTQGGPSKG

SEQ ID NO: 276522 - protein, 119 aa, Zea mays
  Clone ID: MRT4577_183770C.1.pep
MASGGGSKQLKASLLMVVAALLLLICTCTTRGQAARPDPGSEGHTPQQLRAAVSVVSVVAGHEKKSGSSVAVVEMRREDPDQAARECEDDDADDEQAECLVRRTLLAHTDYIYTQGKHN

SEQ ID NO: 276523 - protein, 91 aa, Zea mays
  unsure (1)..(91): unsure at all Xaa locations
  Clone ID: MRT4577_183771C.1.pep
ILVGTKASMDXSKRPVPPSKGQAFSYEYGIKFFXTSAKTPLNVEQVFFSIARDFKQRLFXSVSKPEGRPISFNRPDGGEASASQKSAFFGL

SEQ ID NO: 276524 - protein, 118 aa, Zea mays
  Clone ID: MRT4577_183772C.1.pep
MASGGSSKQLKASLLMVVAALLLLICTCTTRGQAARPDPGSEGHTPQQLRAAVSVSVAAGNEKESGSSVAVVEMRRQQEPEAVSECEDDDGDDEQAECLMRRTLLAHTDYIYTQGKHN

SEQ ID NO: 276525 - protein, 162 aa, Zea mays
  Clone ID: MRT4577_183773C.1.pep
MASGGGSKQLKASLLMVVAALLLLICTCTTRGQAARPDPGSEGHTPQQLVPFGRQSFLFHSSCVHQILFLVGCPCIMSCASLTNLSSLCYLQRAAVSVVSVVAGHEKKSGSSVAVVEMRREDPDQAARECEDDDADDEQAECLVRRTLLAHTDYIYTQGKHN

SEQ ID NO: 276526 - protein, 53 aa, Zea mays
  Clone ID: MRT4577_183774C.1.pep
SLQHDSIAGASPPAHLSHLAHIRHYLTYRHAPPILAMFSATDASLTVTHSLDA

SEQ ID NO: 276527 - protein, 95 aa, Zea mays
  Clone ID: MRT4577_183775C.1.pep
PGATQGLGQFWLVFTGEFFILRGWVFFGGFPPKAGPWLQTLPFQGGVSPQPRKWGPQTVPFFYRPWGFPGAHKFFGFTFCPFNVAKLLGVFLGPP

SEQ ID NO: 276528 - protein, 105 aa, Zea mays
  Clone ID: MRT4577_183776C.1.pep
SDSHQAFCPGWCPSWPGSVCCFCCHPAGTWAPRYPSQAFNVPSFGATYELFSQGIWWVPSSFLFVPSGKMMVPIWFAAQIRVWFWNLPHLGPLYVACPVAKHRWS

SEQ ID NO: 276529 - protein, 308 aa, Zea mays
  unsure (1)..(308): unsure at all Xaa locations
  Clone ID: MRT4577_183777C.1.pep
PRARRYLPASSAPAARAPPPPLAVICVGDVHSYITKLESLWSNLXGRTPFDALATALVIFLGDYNDRGPHTRRVLNFLXLPTRYPAQRHVFLCGNHDLAFVAFVGALPPPPDGSPFFDHLRSAISLSSLSRCSLPRRPALHPMAGGFGDPAPAQPRSLRLSPRPVARPHHPHAPSLLPLLPLSPPPLCSTSGSWRNQWCRPSPHSLLWLATRPRHPHHGKCPRHCCWLSSLWWMWTSVCCFIDCPVEEEEETVVAGEDGGTGAQVTLIMKLDDMASPYHWRGQGCGPRHDPECSLIAMIICICTTSRV

SEQ ID NO: 276530 - protein, 417 aa, Zea mays
  Clone ID: MRT4577_183778C.1.pep
MILRIRSRDGTDRITVPDSASVTVADLQRLIESHLTVPVPLQRLSLDPALLLPNPSAAVPLLTDSAAPLASLRLANGAFVYLAYPPDARSARPPPPKALSAAGSFGKKMTMDDLIARQIRVTRQENALCAAASFDRDAANAFQLYVAEFLGFGVKRAGFLYGRVDAETKDVFVDFIYEPPQQGSEDVVHLLRDPDEEARVDTIAEGLGMRRVGLVFTQAVGRKASETGEYTMSNREVVQAAQLQAEGGIPEWVTAIVKLEVGDDGTGDVHFEAFQMSEICVKLFKDGVLETEVQDADDPRLSKMRKEVVAGGKDTMEVDNDFFLVPVKISDHQGPLSVGFPIENRGNPVSISALRSHLERMKHLAFVKRISDFHLLLKLATFLDVKADMPTIAACVKTQSRVPEGYQLLIESFASQG

SEQ ID NO: 276531 - protein, 29 aa, Zea mays
  Clone ID: MRT4577_183779C.1.pep
AFITVYLLRYNCYKHPALLPYIIFITVVA

SEQ ID NO: 276532 - protein, 76 aa, Zea mays
  Clone ID: MRT4577_18377C.1.pep
CGGPSGRRPSLLTILRYGVSVRFCQNVSARATYGLGVGTLLFALVAPVMCRVERRMSKVFVHSYFVPIRLINCSPV

SEQ ID NO: 276533 - protein, 88 aa, Zea mays
  Clone ID: MRT4577_183780C.1.pep
FELGTLNHVQSHVFWHEDSANMLAVESESHIQFCPPAILINVSSKLCEESGYLLVWLWYNDCTKHHPCNSFMPSLTSLFVYNVSLLFF

SEQ ID NO: 276534 - protein, 232 aa, Zea mays
  unsure (1)..(232): unsure at all Xaa locations
  Clone ID: MRT4577_183781C.1.pep
MDPPYAGAIIEPAKCRLMSVDEKKDLVRELSKRPQTAPDKLQSWSRRDIVEILCADLGRERKYTGLSKQRMLDYLFRVVTGKSSGPXCMCKKRSQLSIPTQVTXYPAKRQRKSDNPSRLPIAVXQSANRSCTRANXNVRSCRNIACRAILSMEDKFCRRCSCCICFKYDDNKDPTHMXXSCSSDHPMQKGFLAGYHAHLECALKDGRTGILPSGQCKKLDGAYYCPNCRKQH

SEQ ID NO: 276535 - protein, 152 aa, Zea mays
  unsure (1)..(152): unsure at all Xaa locations
  Clone ID: MRT4577_183782C.1.pep
TGERTSHDVPFRHXARSSRGPWSSSCWARGRPDRGDTGRTRHRPFPRSAGQPRRQAGEPEATRASWRSCREHRGERGRDGHLXAPKYSDKEDSDMSGAXQLSXTWRGRRPPHGLVRSPRXKFLELSRGSPPRSGTSTARPCKTCPSQRQDDV

SEQ ID NO: 276536 - protein, 90 aa, Zea mays
  Clone ID: MRT4577_183783C.1.pep
RSFPSGLNSLTPRKSPAKKFFPHLKNRGPHYVGAAHKKLVCGFEPKIFCFFPPQKVLEANFPAPRLKTHCSNSVWPCHACNKKSDGFPCF

SEQ ID NO: 276537 - protein, 233 aa, Zea mays
  Clone ID: MRT4577_183784C.1.pep
LLWAIGYPLGPAVPHTAPLWASLSLADAAAPSSVEPRTGATFPTEAAVGRRLLGIGLRKTSVLGLKSIDVYAFGVYADDNDLKQQLKEKYSKFSVSELKGNGELINDALERDIPMTVRLQIVYGRLSIRSVRSAFEKSVGSRLQKFGGQDTKELLQSFVAVFKDEYKLPKGSVIELSRESNHVLKICIEGEEVGSIQSKLLCKSLLDLYIGDDSFDENAKDGIHENIASILKS

SEQ ID NO: 276538 - protein, 113 aa, Zea mays
  Clone ID: MRT4577_183785C.1.pep
HPEKKVGSGPPHLKRQTPKSFAEPQGVKRRATARFFPPPKGEKWGPKRKENPPPPPRGKGSPPKCTPKGAPREKVIFQNLPLSVVSVSIFFFFFFFFFFFFFFFFIPRPGGRS

SEQ ID NO: 276539 - protein, 453 aa, Zea mays
  unsure (1)..(453): unsure at all Xaa locations
  Clone ID: MRT4577_183786C.1.pep
EFIIIDTXGVITLSKSQAGVMEELAVTTTVGMDGIPLATREAAIARMPSMIEKQAVAAVDEASVILFVVDGQAGLVAADIEISDWLRRNYSDKCILLAVNKCESPRKGQMQALDFWSLGFSPLPISAITGTGTGDLLDLVCSELRKFEVLDAVEEEKNKVPAIAIVGRPNVGKSSILNALVGEDRTIVSPVSGTTRDAIDTEFTTADGEKYKLIDTAGIRRRTAVISAGSTTESLSVKRAFRAIRRSDVVALVIEAMACVTEQDYKIAERIEKEGKACVIVVNKWDTIPNKNHESTTHYEQDVREKLRILDWAPIVYCSATNGTSVEKIISAAALVEKERSRRLSTSILNQVIREAIAFKSPPRTRGGKRGRVYYTTQAAVGPPTFVLFVNDAKLFPDTYRRYMEKKLRSDAGFPGTPIRLLWRSRRRPDKRGKSADSRAQSPGTPSEVALAA

SEQ ID NO: 276540 - protein, 94 aa, Zea mays
  unsure (1)..(94): unsure at all Xaa locations
  Clone ID: MRT4577_183787C.1.pep
IISTPVPTQLVLNRFRPPPGPVRQPAAQAPAPAPATISSPPAVIHSPPPRSPVSSPPHXYESRPSAVSMTSPPPSVEYPPLFAPRSPPAPVKSP

SEQ ID NO: 276541 - protein, 83 aa, Zea mays
  Clone ID: MRT4577_183788C.1.pep
YNGVNIFQAGLVAADIEISDWLRRNYSDKCILLAVNKCESPRKGQMQALDFWSLGFSPLPISAITGTRTGDLLDLVCSKLRKF

SEQ ID NO: 276542 - protein, 74 aa, Zea mays
  Clone ID: MRT4577_183789C.1.pep
LNRGLQKCSPQISSTTGNGILYRGGGGCLLQERGCSDELAVHGVSLMFGPWRFCCVYILLVRIRRRMHIGPMNE

SEQ ID NO: 276543 - protein, 100 aa, Zea mays
  unsure (1)..(100): unsure at all Xaa locations
  Clone ID: MRT4577_18378C.1.pep
SEGLTDDIVPLDNYLXSQYFGQISIGTPPQNFTVIFDTGSSNLWVPSSKCCWXVACCSHHKYRSTKSKTYTKYGESCPFPYGSGLLGGFFAWAWGRGGVF

SEQ ID NO: 276544 - protein, 47 aa, Zea mays
  Clone ID: MRT4577_183790C.1.pep
GASKNVLVKNKAKQMGTAVFWVTDLGDQRSRQCSVLADQEGRVRARR

SEQ ID NO: 276545 - protein, 76 aa, Zea mays
  Clone ID: MRT4577_183791C.1.pep
HASDDLAITSSASHVHRLRSTHMFNSFRDWDCSINSTHADEHVCPLWYWFHMCAGVLNPLLGDAYETCPKCHSQRH

SEQ ID NO: 276546 - protein, 82 aa, Zea mays
  Clone ID: MRT4577_183792C.1.pep
YSLYLYLLGGPTTKRYLALVQLSCMKHDLKPLVIDSYKNALLKYRLIIIGSTKGTASIRKGLPIERHFLQHGAPSTGRCSQD

SEQ ID NO: 276547 - protein, 320 aa, Zea mays
  Clone ID: MRT4577_183793C.1.pep
MSSSTSDAARDDVVSSPDLPPLSAHVAAAAAAAAAAASSGGGIGLGGVGSGRRLPPPCWTHEETLALIEAYRDRWEALQKGNLSAADWDDVANAVTARCGRFPTATPKSGVQCRHKVEKLRKRYRAERSRSAGRSKGPKWPFFPLLHDLAGGGVPDPSPNAIVKIKTKGPAPPASPPSPVSSPSSSEEAVRSRSLHGLISNGGAGSGLRFTIPKACRTKPAAAAAVKPERSGGEDDAESEAMAEVAAALRSVGEGFLRMEERRLELSLQMEKERMESEMKRTQTMLDAQQLFLEAFLGKQQQQQPKKARVSPSSAAMEED

SEQ ID NO: 276548 - protein, 73 aa, Zea mays
  Clone ID: MRT4577_183794C.1.pep
TKVFSILHSNISPVQVYDIGQQVFCLSHAGAQAKLASHGPKQSRCNARKNEYPRGTRDTSSNLQAVGLQTIAA

SEQ ID NO: 276549 - protein, 42 aa, Zea mays
  Clone ID: MRT4577_183796C.1.pep
AFHQSTYEVGFSRGRVMEFRCNQIDILTLSSMACVSLISYML

SEQ ID NO: 276550 - protein, 63 aa, Zea mays
  Clone ID: MRT4577_183797C.1.pep
IKLCYMKIAKQKQIFKPKLHKSHWIFKIRNNPVIYMQFFFPQVLKCEKGPNGVFRLHGPPPPT

SEQ ID NO: 276551 - protein, 39 aa, Zea mays
  Clone ID: MRT4577_183798C.1.pep
TSSIKLHILVYNLHNLFIFVSEDCTMILSPYGSLIICLG

SEQ ID NO: 276552 - protein, 108 aa, Zea mays
  unsure (1)..(108): unsure at all Xaa locations
  Clone ID: MRT4577_183799C.1.pep
EGDVRLRAIKFSQRQPIGTXAQVAMGGHHDCLYIEAPSALVVEPGSLKSCFFYRVVIAHFLVTFLFLSISVFXNLLIVHTRTSSVSSDDISAIPWSSEGMIFALAFFN

SEQ ID NO: 276553 - protein, 46 aa, Zea mays
  Clone ID: MRT4577_18379C.1.pep
TTIVRSINKLNDMVFVLPAVFVPRRQFQHLSLGYLVNEVVGTYFPT

SEQ ID NO: 276554 - protein, 99 aa, Zea mays
  Clone ID: MRT4577_183800C.1.pep
DLALLVGGGEGWCLAVSVPVAIHQVGVPLGLRFLERVLQFCLWWRSAGCLLVVVVFCLCPVGAFGWVFLVLWVLQWFGVETPKCFLKGPRFKFVEMEKN

SEQ ID NO: 276555 - protein, 223 aa, Zea mays
  Clone ID: MRT4577_183801C.1.pep
MSGSYFLGKTLDIISENPNFSKSEIPTPPPYNHDAISEDARPGHQEACSHLPKISSKETHPKIAQVLLERQKYDMALLVLKCTGHGSFSATENFKKDDISSLSEAVTVVRVRIECRLLTEAFMYHRSYCSKVKEQHSADMTHAEDALKNSWVYHVEMMVTEFCAICIKRNLVDKMIDLPWDSEEEKHLHKSLFDSAHEMPMKPNGSLLVVYYLRDRKMMLTIS

SEQ ID NO: 276556 - protein, 84 aa, Zea mays
  Clone ID: MRT4577_183802C.1.pep
PPFLFFLTTIKFLHTHIPIKQEKLKNMRRVKPQPFTHNIIYLLHTYKYTLPYLQNTYLPYDLTDSTHMILALEEWPRSSTTQLA

SEQ ID NO: 276557 - protein, 88 aa, Zea mays
  Clone ID: MRT4577_183803C.1.pep
EQLFTLGDWAKRIPHFSGLTLEEQVILLRAVWNELLIALFSHRSVSVQDGILLATGLHVHRSSAHSAGVGSIFDRVLTELVSKIKDMR

SEQ ID NO: 276558 - protein, 94 aa, Zea mays
  Clone ID: MRT4577_183804C.1.pep
ALKRLCRYQHNNHGGGGSYCSVFGTTQTMSNNAFIVLQYEQTRCMCNKHANNTYKDKHSGHHKAPRSTPLVTSKTNEADAEGELIKLQTVLGRE

SEQ ID NO: 276559 - protein, 57 aa, Zea mays
  Clone ID: MRT4577_183805C.1.pep
PFQFAACLGLGFPACRFILLGVGVALLCAFYFSVLGAVCLRVFYDPGSAVRDRTRSL

SEQ ID NO: 276560 - protein, 87 aa, Zea mays
  Clone ID: MRT4577_183806C.1.pep
KQFFHKKIKVPVGFLNHHFPKALGPELFKLIKNKHFYHTILKKGVNSYYHKNCRKPSQIFVGAYPFPNHAITLGGFFGGQLILLVKE

SEQ ID NO: 276561 - protein, 70 aa, Zea mays
  Clone ID: MRT4577_183807C.1.pep
QCHKRNHPSARLMTALRELDLDVYHASVSVVKDLMIQQVAVKMASRVYTQDQLSAALYSRLAEPGSAMGR

SEQ ID NO: 276562 - protein, 196 aa, Zea mays
  unsure (1)..(196): unsure at all Xaa locations
  Clone ID: MRT4577_183808C.1.pep
PANGREEGGIHVEAGRHPREKLNQRFYALRAVVPNVSKMDKASLLXGDAISYINELRGKLTSQQPAVGGDHVETDPSMLWLADAPVMDIKDSLSHSAGLGGHDGGPRCHAVEIDAKILGLEAMIRVQCHKRNHPSARLMTALRELDLDVYHASVSVVKDLMIQQVAVKMASRVYTQDQLSAALYSRLAEPGSAMGR

SEQ ID NO: 276563 - protein, 343 aa, Zea mays
  unsure (1)..(343): unsure at all Xaa locations
  Clone ID: MRT4577_183809C.1.pep
DNHAGIPLCKVEPFLDVTNIYYYLKGHDRQKKLPKETKSLATICEELLGILLSKELQCSDWSCRPLSEGQIQYAASDAYYLLDIFDLFQKRITMEGKCSSTTELTSDRHCSSVVIECSSSGYGICSGSCLMSIVTKYSEKIILTESDAKPRTSRRKXXLKIPANAKRKDNVDCSSEWQGXXPWDPSIGGXXXXXXXXXXXXXXXXXXXRCVGIDAAIPSSKKPEPRDLLNQTYKEGRILLTRDAKLLKYQYLAGNQVINIFQLKISEDQLMSRCTKCNGSFIQKPLTLEEAVEASKGFQIIPTCLFNRNLEFWKCTDCNQLYWEGTQYHNAVQRFLSVCNISD

SEQ ID NO: 276564 - protein, 42 aa, Zea mays
  Clone ID: MRT4577_18380C.1.pep
FGSPLIHVYWLVLRPHRSCDHPYQAKTHCNLFHYTGLLMSVE

SEQ ID NO: 276565 - protein, 288 aa, Zea mays
  unsure (1)..(288): unsure at all Xaa locations
  Clone ID: MRT4577_183810C.1.pep
MNLWTDDNASMMEAFMASADLPAYPWGAPAGGGNPPPPQMPPAMAMAPGFNQDTLQQRLQAMIEGSRETWTYAIFWQSSLDAATGASLLGWGDGYYKGCDDDKRRHRPPLTPAVHAEQEHRKRVLRELNSLISGGACXAPAPAPDEAVEEEVTDTECFLPESMEMSCSHASGNAQRNPSPAPPASLTTAPGSLFSQSQHTATAAANDAKNNNNNNKRSMEATSLASNTNHHPAAAANEGMLSFSSAPTARPSAGTGAPAKSESDHSDLDASVREVESSRVVAPPPEAE

SEQ ID NO: 276566 - protein, 81 aa, Zea mays
  unsure (1)..(81): unsure at all Xaa locations
  Clone ID: MRT4577_183811C.1.pep
VINIFQLKISEDQLMARGTKCNGSFIQKPLTLXEAXEASKGFQIIPTCLVNRNLEVWKCTDCNQLYWEGTQYHNAVQRVLA

SEQ ID NO: 276567 - protein, 714 aa, Zea mays
  unsure (1)..(714): unsure at all Xaa locations
  Clone ID: MRT4577_183812C.1.pep
MNLWTDDNASMMEAFMASADLPTFPWGAPAGGGNSSAAAASPPPXMPAAMAPGFNQDTLQQRLQAMIEGSRETWTYAIFWQSSLDSATGASLLGWGDGYYKGCDEDKRKQKPLTPSAQAEQEHRKRVLRELNSLISGAAAAPDEAVEEEVTDTEWFFLVSMTQSFLNGSGLPGQALFAGQPTWIASGLSSAPCERARQAYNFGLRTMVCFPVGTGVLELGSTDVVFKTAESMAKIRSLFGGGAGGGSWPPVQPQAPSSQQPAAGADHAETDPSMLWLADAPVMDIKDSLSHPSAEISVSKPPPHPPQIHFENGSTSTLTENPSPSVHAPPPPPAPAAPQQRQHQHQNQAHQGPFRRELNFSDFASTPSLAATPPFFKPESGEILSFGADSNARRNPSPVPPAATASLTTAPGSLFSQHTATMTAAAANDAKNNNKRSMEATSRASNTNHHPAATANEGMLSFSSAPTTRPSTGTGAPAKSESDHSDLDASVREVESSRVVAPPPEAEKRPRKRGRKPANGREEPLNHVEAERQRREKLNQRFYALRAVVPNVSKMDKASLLGDAISYINELRGKLTSQQPAAGGDHVETDPSMLWLADAPVMDIKDSLSHPSAEISVSKPPPHPPQIHFDGGSGIMGLEALIRVQCHKRNHPSARLMTALRELDLDVYHASVSVVKDLMIQQVAVKMASRMYSQDQLSAALYSRLAEPGSVMGR

SEQ ID NO: 276568 - protein, 116 aa, Zea mays
  Clone ID: MRT4577_183813C.1.pep
ELQCSDWSCRPLSEGQIQYAASDAYYLLDIFDLFQKRITMEGKCSSTTELTSDRHCSSVVIECSSSGYGICSGSCLMSIVTKYSEKIILTESDAKPRTSRRKEKLKIPANAKRKDN

SEQ ID NO: 276569 - protein, 66 aa, Zea mays
  Clone ID: MRT4577_183814C.1.pep
HLHATYTTLLSLHRSTHEVDAAMCENCMCVFALISKAARYGVSVSGFYTEPASPSPRVGVVSGYSV

SEQ ID NO: 276570 - protein, 147 aa, Zea mays
  unsure (1)..(147): unsure at all Xaa locations
  Clone ID: MRT4577_183815C.1.pep
ELQCSDWSCRPLSEGQIQYAAADAYYLLDIFDLFQKRITMEGNSXKLTSDRHCSSVVIECSSSGYGICSGSCLMSIVTKYSEKIILTESDAKPRTSRRKEKLKIPANAKHKDKVDCSSEWQGPPPWDPSIGGDGYPKFLCDVMGSIK

SEQ ID NO: 276571 - protein, 504 aa, Zea mays
  unsure (1)..(504): unsure at all Xaa locations
  Clone ID: MRT4577_183816C.1.pep
MDHAPAPPFAVHLVTGGGSSSGIALLLRSLAAARVVALDAEWKPRRRGSPAAADPAALGDDTTPASETSPAPPKFPTVTLLQVACRFSDGGGGEGERSEVFVVDLLSVPLADLWAPLRELFERPETLKLGFRFKQDLVYLSSTFSAALGCDSGFDRVEPFLDVTNIYYYLKGHDRQKKLPKETKSLATICEELLGILLSKELQCSDWSCRPLSEGQIQYAASDAYYLLDIFDLFQKRITMEGXNVHLQQNLLQTDXSSVVIECSSSGYGICSGSCLMSIVTKYSEKIILTESDAKPRTSRRKEKLKIPANAKRKDNVDCSSEWQGPPPWDPSIGGDGYPKFLCDVMIEGLAKHLRCVGIDAAIPSSKKPEPRDLLNQTYKEGRILLTRDAKLLKYQYLAGNQVYRVKSLLKHDQLAEVINIFQLKISEDQLMSRCTKCNGSFIQKPLTLEEAVEASKGFQIIPTCLFNRNLEFWKCTDCNQLYWEGTQYHNAVQRFLSVCNISD

SEQ ID NO: 276572 - protein, 189 aa, Zea mays
  Clone ID: MRT4577_183817C.1.pep
MRAVAAAASPPLRALLLLSRHPRRAGFTNWPSLPRGQNAGPTAPPAATAPKPAAPSRRQGRGLTASLPRQVARISTPHLRPPATPPRCPDRRHQSHGVRALAGCPRKTVRHLPAPTSHLRFTMNPSSSSSSSGGYHSRAAAFASPQPRGGGGRRRGGGRVQDGSDRIDALGRLLTRVLRHMAAELRLDM

SEQ ID NO: 276573 - protein, 66 aa, Zea mays
  Clone ID: MRT4577_183818C.1.pep
PCLSLCRLPVVRRSPSWLATCLCPSSGTRAVTGEPIIPVGALAIWLAGCIECAPASGSTRLISLDR

SEQ ID NO: 276574 - protein, 86 aa, Zea mays
  Clone ID: MRT4577_183819C.1.pep
GYSFSGTPKTGGPFPPRGRSRPGPFSPGGKKNRNIKSLPGVQQQGPPELERFRAQHSPQGGNGHRFSSSEFIRPGIMQLGGVFFIS

SEQ ID NO: 276575 - protein, 61 aa, Zea mays
  Clone ID: MRT4577_18381C.1.pep
HSWGIQTSGGLQLIIFEFLPTPPYNIEWVGPIHIQNCGIGGRTKKGGCWPFHTKSLFSTKF

SEQ ID NO: 276576 - protein, 88 aa, Zea mays
  Clone ID: MRT4577_183820C.1.pep
GHGHRNRRICLVQVAPGGPSVKSNQIAFMDLRVRGDDLMIKMVKWQKFSRVEVFSRNQISTVGWPVICLWHKQRGFFVLCSNMSGLRC

SEQ ID NO: 276577 - protein, 112 aa, Zea mays
  Clone ID: MRT4577_183821C.1.pep
VGNGVNEKAVSGTSTQGRSLVPTTVSPSVKKRTLVSSPGRSRLWNQHIGPRRPVQDPCACSDEEKVWLVASASRMGGKYLLDSGYSGPGTGDPTPAPVADGTGSMSETNGRE

SEQ ID NO: 276578 - protein, 64 aa, Zea mays
  Clone ID: MRT4577_183822C.1.pep
LRRRWLLRQRRRCNGPDGAQQLVMARAAQNLEYLVPFCCRIALCTAVRFSVDKKMYSSSPLYYW

SEQ ID NO: 276579 - protein, 34 aa, Zea mays
  Clone ID: MRT4577_183823C.1.pep
KMPNSKNNSATWMFLISKCEMGAMLTLIHDALLG

SEQ ID NO: 276580 - protein, 439 aa, Zea mays
  unsure (1)..(439): unsure at all Xaa locations
  Clone ID: MRT4577_183824C.1.pep
MASAGISGSGDDDAGGKLLADRYQKGEVLGEGTYGVVFKAIDTKTGNTVAVKRIWVGKDKKEGVNFTALREIKLLKELKGPNIIELIDCFPYKENLHLVFEFMETDLEALIKDKNIILSPADTKSYLQMLLKGLSFCHKKWVIHRDMKPNNLLIGADGQLKLADFGLARMFGSPGRNFTHQAHEFLLFLHXVFARWYRAPELLFGSKHYGSGVDIWAAGCIFAELLTRRAFLQGSSDIDQLGKIFAALGTPKSSQWPDMVYLPDYVEYQYVAAPPLRTLLPMASDDALDLLSRMLTYDPKARISAQQALEHRYFSSLPAPTRPSQLLRSRRKGDQGNNKMPDLNLQHGPVVLSPPRKFRRVTAHEWMEGMHRADKVDEHPSGMRHTDDMPSQKSSRIPMSVDVGAVFGTRPAPRPTLNSADKSRLKRKLDMDPEFGFAE

SEQ ID NO: 276581 - protein, 110 aa, Zea mays
  Clone ID: MRT4577_183826C.1.pep
CQTRTPVVHFQENFWVCRGKRKSFFFDQGRWSSPGKGESFHVGRLTRSQGWEGPPPSGFLFKPLFPGLSCWAVVCVNHFFPPPPLGGCPVKKLSPFGYTDLVPVTNFLFE

SEQ ID NO: 276582 - protein, 77 aa, Zea mays
  Clone ID: MRT4577_183827C.1.pep
AAGALPEVGRHRMPRVAGEHQTCASRLVLVQSGSEPLVSKVESLPWRPLESFASATTPPVFTCAHGPEKGFLAPRAE

SEQ ID NO: 276583 - protein, 233 aa, Zea mays
  unsure (1)..(233): unsure at all Xaa locations
  Clone ID: MRT4577_183828C.1.pep
MAMERELMETFEAAKKAADAAAEEADGSSPEAERCLDALRRLREFRVNTDVLVSTQVGKRLRYLTKHPNSDIQAVAADLFGYWKKVVIEETGKKNGTPANGKSNNSAAKAEKPQPMKVEKKSAHVKVEKNSTSTTVKSEKNATVKTEKNSMSASVKIEKTANSDSKVQVKVEKVSKEVSRTSETKKPSSVPNGPPKLTSLVRCNDAARDKYRELLGDAFVKVPXETSDDDREE

SEQ ID NO: 276584 - protein, 98 aa, Zea mays
  Clone ID: MRT4577_183829C.1.pep
GRVQIPQSSCSTPLSSSNSAAMSGPRKGGKGLGKGGAKPPPKGFRDHLQGFTKPAIPKLAKKGRVKPIFRLIYEETRGVLKIFLENVIRDAVTYNRAR

SEQ ID NO: 276585 - protein, 41 aa, Zea mays
  Clone ID: MRT4577_18382C.1.pep
GNPVLIMYYKVGRPCFPCGYMFGGAMCVVRLSTKKKYPLPR

SEQ ID NO: 276586 - protein, 99 aa, Zea mays
  unsure (1)..(99): unsure at all Xaa locations
  Clone ID: MRT4577_183830C.1.pep
PGTHGGHSAAGVVSKADSIQGLEPQVNVDDDHTMLGQPVAWTLWLTVDSTETGGADGSVTVLSPNSTGISNAMIXHMTHARRLMDTEKAMTDLHGTDEG

SEQ ID NO: 276587 - protein, 69 aa, Zea mays
  Clone ID: MRT4577_183831C.1.pep
GKSSVKPLYGTLKGTPDLKLYGENRPTVPTRKGKKPKERGLRRLQVERHPWGEPTHPAGLNGPVQGGAQ

SEQ ID NO: 276588 - protein, 142 aa, Zea mays
  Clone ID: MRT4577_183832C.1.pep
MSKNTRDTRFIPRFGHTTKVPYFLVEAPTKSRVSFNPNPPFADHKVWEVYIKVPTKAGGRWGKLAKNRLNRFVNRLNRFPPGRTRFTDLLSRRVNRTQNRLSRAQIRLNRFSQNLHTTFSDRTDWQTGSDRAEQCRNRLNRF

SEQ ID NO: 276589 - protein, 82 aa, Zea mays
  Clone ID: MRT4577_183833C.1.pep
RSIAGGPRPKGTCSSKMLQLLMALAFSAAPLTLYVPPVRSLSLFVEAMEAVCRDCAPYSHGAVARFRLGLSRVLAGLARAVR

SEQ ID NO: 276590 - protein, 83 aa, Zea mays
  Clone ID: MRT4577_183834C.1.pep
SGAPLAARAGQVCVVRQPDRLSASGAHPVGQSPASSAAASPRAARCQEIGRQAPAVPVRRGDVRLKLSDCRSTLVTHAVSPLV

SEQ ID NO: 276591 - protein, 170 aa, Zea mays
  Clone ID: MRT4577_183835C.1.pep
SRPAGTPHPAQPKNARRRIRNAPKPLRARRTASCSAEHTPHTPTGSKASCSRLPHTPSPPQSRPPARSPPDATRPQPKRQPPASGWGQLLSIDRGGPKGTCSSKMLQLLMALAFSAAPLTLYVPPVRSLSLFVEAMEAVCRDCAPYSHGAVARFRLGLSRVLAGLARAVR

SEQ ID NO: 276592 - protein, 131 aa, Zea mays
  Clone ID: MRT4577_183836C.1.pep
TPFNGRGRSRSRRDYPFGHVCSGEVCSQSHQLEDHPVEGGPFVVETNLPDIRRAALSSTVHSARKFCRGLWRVHGLQLQHDTWRRGCSRWSYRRRQEGSPWRSQHRAGGYVEYMKECDLRPASRIPIAHRS

SEQ ID NO: 276593 - protein, 69 aa, Zea mays
  Clone ID: MRT4577_183837C.1.pep
SLPPTLPAGLYRLGLLVAPTGGGSCLCPGGLGGGTTGKLAKALVGPKITVSMAAVLGYHGIMASWGMVK

SEQ ID NO: 276594 - protein, 69 aa, Zea mays
  Clone ID: MRT4577_183838C.1.pep
ASSESPLARAPFYYFLFFFFAPWGFFKTIPGFKHLQTITTPWFRTLLQTPTVTHHEHKPPPAKPDPSVP

SEQ ID NO: 276595 - protein, 145 aa, Zea mays
  Clone ID: MRT4577_183839C.1.pep
MGMQQSKEELLYQQVNYGNIEGIRNLRAQGAGVEWIDKEGKTPLMVASMRPDLLNVAKALIELGANVNAYRPGSHAGTALHHAAKKGLDPTVHLLLSHGANPFITDDDCNTALDLAREKGHVNVVRAIEGRISLFSGWMREKYGP

SEQ ID NO: 276596 - protein, 60 aa, Zea mays
  Clone ID: MRT4577_18383C.1.pep
ELVAACSISEISGAAVTLAEDRSDILQKVVRISGTPEQASKAENLLQGFILSIPDDIPSG

SEQ ID NO: 276597 - protein, 103 aa, Zea mays
  Clone ID: MRT4577_183840C.1.pep
HRTTHRLGVFTPKGVLCNGVPGRSKTDLLLQDRQRSGHGCFLLPKSSTLLRRSLSPLGLTTSLPIPLYQRDIFLGLLYLLSCKGQTHGLLPGYCSLVVTYGRK

SEQ ID NO: 276598 - protein, 123 aa, Zea mays
  Clone ID: MRT4577_183841C.1.pep
MAGRLTAAGSRVLGGGGARAAAAALRHRAGMGLPVGRHIVPDKPLPVNDELVWDNGTPFPEPCIDRLAPHIGKYEALAWLCGGLGFFAALGVAAVVNNKASKIPYTPKVYPYDNLRAELGDRP

SEQ ID NO: 276599 - protein, 43 aa, Zea mays
  Clone ID: MRT4577_183842C.1.pep
VETRKNTSYLINKLGSHDICAYGHADWGRPRGPRRAAYLLIKT

SEQ ID NO: 276600 - protein, 37 aa, Zea mays
  unsure (1)..(37): unsure at all Xaa locations
  Clone ID: MRT4577_183843C.1.pep
SCDHSLGQMLGXQRLGRTALHADRFRLLLQVPVQSTI

SEQ ID NO: 276601 - protein, 97 aa, Zea mays
  Clone ID: MRT4577_183844C.1.pep
VVSTLLVVEVSLVHGWSMLWLGVRTLCRRRVRVMGCWWMSKARRRRRVHIWCRWVRVRLRSSMSWSRVGFLGRDSMPADLSISPFLVLLPTRRPTRR

SEQ ID NO: 276602 - protein, 54 aa, Zea mays
  Clone ID: MRT4577_183845C.1.pep
VLENLHCLALIKDKFSTQICHCAYKNFQSSVMTCLTIKKYSLLSHLVLNDTHHT

SEQ ID NO: 276603 - protein, 109 aa, Zea mays
  Clone ID: MRT4577_183846C.1.pep
IQHMHLPPPDLARRLAMAITKGDTSMVHSLIMQKSPSFNWTGGPLDEEKRTSAMNMEAHRGHSKILELLSQVEPRANLAANDPNDNGMTPLHCAWPRWFPHHGPLATPI

SEQ ID NO: 276604 - protein, 79 aa, Zea mays
  Clone ID: MRT4577_183847C.1.pep
PRVRPRVRPRVRPRVRPRVGANQQFHSFIRYWRQTNNDIIVAKNRLIVKQQRLVRRSRRAATAHKLYLIQLSHVGAHVP

SEQ ID NO: 276605 - protein, 62 aa, Zea mays
  unsure (1)..(62): unsure at all Xaa locations
  Clone ID: MRT4577_183848C.1.pep
SEGVGGLLPLTISNLSNYLTSVLMYRCLVKEDDRDTAIFTFESVEXGSEGTNVVIQINLAFN

SEQ ID NO: 276606 - protein, 598 aa, Zea mays
  Clone ID: MRT4577_183849C.1.pep
MGMGSLAGIFFLRGYGFGQVIPNGFLPITISTPELQAIPWPPLYMSPTLPIYDGLTDLKQFLMNYEATISSFLMLRAKAPAVQDDIVIEAMVKGLRPGSIAQYFARNPSHSLEKRQEFHGYTKVTLGFGGRFHPMHAQSIHNPSQGCSRPPPEDYDRVVDDVPAVPDAQSSPNLIPLSQPGDDLQIDSLGCIPLAQTNCRETAALVVDPQTVACGCFGDRFIASNSPEFRNEEEPYAFDMAADLDDDRPVDDRDPRVHEFSDLSLSHQANAEGRDDVLLDAPERWLQHYAVLRKRPYRVLHSYEKRRYTVVCDKDNCAWRVYAMIQKITAKWKITKVVGLHTCVEHELTMKRRQLTSTLIGKQLMGILQSESNMKVRTIMRIMENVYDGYKITYGKAWMAKQCAWKMIYGDWESGYKQLPVLLYAMKAGTLLIAISGDANNKLVPLAFALVEKENKDSLGWFLRMVRIHVVGPGQEVGVISDQHQGILNAVREQIDGYPPLHHRWCTRHLAENLLHKDGVKDNFELFQKTCHQLEDKFFREKLDKLKVATNVEGRDWLTRLIPDLEKWTRAHDLGGWRYEFQCSNTAESFNKLLLGIR

SEQ ID NO: 276607 - protein, 40 aa, Zea mays
  Clone ID: MRT4577_18384C.1.pep
NGKYINTDNYCTNIKYGGFMLNDTKIKTRYLVYSVYLFEN

SEQ ID NO: 276608 - protein, 155 aa, Zea mays
  Clone ID: MRT4577_183850C.1.pep
MACQNGSGVTTIPHNAIFTALLHCFCAYWEKVAKEKDRTKEHFKEEESDLLPRLEQVRRMQREEGKVSGRSSSAWASEAVSTMEMTHSKLFPFFMTGLLPQEAMQYLDLVCRCTKNTRHLVSMLRSLAERLEDANPSIIHNNPTKLYEHLLVKSP

SEQ ID NO: 276609 - protein, 275 aa, Zea mays
  Clone ID: MRT4577_183851C.1.pep
MRIVENVFDGYKITYGKAWRAKQCAWKMIYGDWESGYEQLPVLLNAMKAVNPGMHYEYIPKPNAWIDGRQIFFRAFWCFPQCVDAFRHCRPVFSIDGTFLLGKYQGTLLIAISVDANNKLVPLAFALVEKENKDSWGWFLRLVRIHVVGPGREVGVISDRHQGILNAVREQIDGYPPLHHRWCTRHLAENLLRKDGVKDNFELFQETCRQLEDKFFREKLEKLKVATNAEGRDWLNGLMPDLEKWTRAHDLGGWRYEFQCSNMAESFNKLLLGIR

SEQ ID NO: 276610 - protein, 233 aa, Zea mays
  Clone ID: MRT4577_183852C.1.pep
MGNCSPSPRRRRPTEPDSPPLGSTVSAPTVTVNSISVSSYALEHARMEETLIFPDIQRASFPGVCDKVNEQHGRHLPMMNGIKEDIKTLLTLELGSPLFHEVVVNLSVRLKALQDHTKEHFKEEESDLLPRLEQVRRMQREEGKVSDKSSSAWASEAVATMEMTHSKLFPFFMTGLLPQEAMQYLDLVCRCTKNTRHLVSMLRSLAERLEDANPSIIHNNPTKLYEHLLVKSP

SEQ ID NO: 276611 - protein, 243 aa, Zea mays
  Clone ID: MRT4577_183853C.1.pep
MIHRIESEKINIELPSLDGQEITPPQLPQREHHDLKYILPLNPHDVPDEGYECTVTITSIPEGKTWYYIACNTCPNKPSIDPIIRQCSTCGSTKYCFRYKLTFKASDGTAEAEMFAFDTVARTIIGKPCPTVVASFPDASAIPPEIAAIVSRKYTFIIEFNSQSFRFLEKTLLIKGIVASYGRMTSLPIVQEKFDVQLPLTPTKNKLITTAAESPSTPMSRLSTADSPSMPQKLTYSPAKNKP

SEQ ID NO: 276612 - protein, 63 aa, Zea mays
  Clone ID: MRT4577_183854C.1.pep
RSNLKLYRGSTHTGAKKFWVQHKGPNGSFKPTKPPPRFLTPNPQVFIKPPPPFRGPPEGPKPP

SEQ ID NO: 276613 - protein, 75 aa, Zea mays
  Clone ID: MRT4577_183855C.1.pep
PWGQTHKLSPRKWKTKTLTKRAFRSYQLKNRMLRQHGSCPATLIDTCSKTPIERTGFRQLNAHYLSHLKAFERRP

SEQ ID NO: 276614 - protein, 200 aa, Zea mays
  Clone ID: MRT4577_183856C.1.pep
ATNVVRAPVVCGITSLGYDHMEILGNTLGEITREKAGILKKGVPAYTVPQPEEAMCVLMKRATELGVSLQVVHPLDPQKLEDQPLGLHGEHQYMNAGLAVALANAWLERQGHLNRLHVKHSGTLPDQFIKGLSSACLQGRGQIIPDSQVNSENDRDSSLVFYLDGAHSSESMEMCARWFAHATNSDGIQPGPSEQPHTDR

SEQ ID NO: 276615 - protein, 91 aa, Zea mays
  unsure (1)..(91): unsure at all Xaa locations
  Clone ID: MRT4577_183857C.1.pep
MASSMLSATTVPVQQEGGLSEFSGLRSSASLPMRXRDATSGDFMSAVSFRTHAVGTSGGSRRAATEANWKVAINGFGRIGRDFLRXWHGRG

SEQ ID NO: 276616 - protein, 45 aa, Zea mays
  Clone ID: MRT4577_183859C.1.pep
PVVTCSTGSGTLCPSDSHTFSGSPRHVCSNSRWLANCCPTASVDV

SEQ ID NO: 276617 - protein, 143 aa, Zea mays
  unsure (1)..(143): unsure at all Xaa locations
  Clone ID: MRT4577_18385C.1.pep
LDSMHPRRRSXKQNAWTERRKYDIGLHASHTTPCCHKIIQRGRASVGNVMXNALLLDSVLYSTHGEVDMLPTRILYSTCSALHHAMVLTRHLALRAIALCDAVLFHSSNVTSLXVDIALMKKTPALLKDNVMLQDDKVTPQLT

SEQ ID NO: 276618 - protein, 136 aa, Zea mays
  Clone ID: MRT4577_183860C.1.pep
EAGRELPLLKTYTVSTGSPQKGNRSSKNTRFLMALLFKKSPTNITDLIIASLLVLLFIMASMSPSFQVHVKGDDGHQHEGSLELAQQLRTTTCIAVKGGICFQKKCQGICESNGFNAATAFCYKPPGLHLPQCCCP

SEQ ID NO: 276619 - protein, 92 aa, Zea mays
  Clone ID: MRT4577_183861C.1.pep
MVNIFGIALFLLVYNYGFLKFLQDEWTGEQKVQYSDIPDDIEPEEIRPMGNYAVSITWPDGFSQIAPYDQLEMLERLVEAPSPAAASAVALV

SEQ ID NO: 276620 - protein, 531 aa, Zea mays
  Clone ID: MRT4577_183862C.1.pep
MQTLRPAPASFLVPPAPQLLRTAPPPAPRANAAALAAVSHGRFPSPHRACRRRRRVTRPASSGASATVASVDDAKKDVLIALSQIIDPDFGTDIVSCGFIKDLEVSEALEEVSFRLELTTPACPIKDEFEQKANEVVAALPWVKKVDVTMSAQPAQPVYGGELPEGLQKISNIIAVSSCKGGVGKSTVAVNLAYTLAGMGARVGIFDADVFGPSLPTMVSPENRLLVMNPESKYILPTEYLGVKMVSFGFAGQGRAIMRGPMVSGVINQLLTTTDWGELDYLVIDMPPGTGDIHLTLCQVAPLTAAVIVTTPQKLAFIDVAKGVRMFSKLKVPCVAVVENMCYFDADGKRYYPFGQGSGTQVVQQFGIPHLFDLPIRPTLSASGDTGIPEVVADPQGDVANTFQNLGACVVQQCAKIRQQVSTAVSYDRSIKAIRVKVPDSDEEFLLHPATVRRNDRSAQSVDEWTGEQKVQYSDIPDDIEPEEIRPMGNYAVSITWPDGFSQIAPYDQLEMLERLVEAPSPAAASAVASS

SEQ ID NO: 276621 - protein, 77 aa, Zea mays
  unsure (1)..(77): unsure at all Xaa locations
  Clone ID: MRT4577_183863C.1.pep
TGXQKXGHRAPQDKNLYLEIQKXNLFASEMRDIVVLHTELVACDSDGTNNFXGTSETLFTPIYTIHVCIRQLVFTLI

SEQ ID NO: 276622 - protein, 54 aa, Zea mays
  Clone ID: MRT4577_183864C.1.pep
MVVLKPIGVRRLHLAGATGRHAITRASDHLLDILEGFGGRHGHSLVHQRYPRGR

SEQ ID NO: 276623 - protein, 38 aa, Zea mays
  Clone ID: MRT4577_183865C.1.pep
FVLTAAGTQAEQVIDALKPAHRGKLQRIPVFFVAKRLT

SEQ ID NO: 276624 - protein, 46 aa, Zea mays
  Clone ID: MRT4577_183866C.1.pep
KFRCKKKKKKKKKKKKKKKKKKKKKKKKKKKKKKKKKKGAAQKDQS

SEQ ID NO: 276625 - protein, 108 aa, Zea mays
  Clone ID: MRT4577_183867C.1.pep
PPKVAELYPDTKGPKFPHGHPPWAGKTKGGVQKAHRAGVSDPPHGEDLQGSRRNPQKPGPHPLNPNGCQNGKSLSWVRPFVMAPVKLQAGLGYLVVKIRSPNDDAAEP

SEQ ID NO: 276626 - protein, 100 aa, Zea mays
  Clone ID: MRT4577_183868C.1.pep
MAAQVRGPLSGRARSPAALAVRALTRRSQCGFVPAGAWYRPWCPVEARARTWYSHGGNQTVERIIMVQNTPCIGVGRKTARLQRDHLLPVVSGCCPASSH

SEQ ID NO: 276627 - protein, 107 aa, Zea mays
  Clone ID: MRT4577_183869C.1.pep
PKGKLVKVKVLYKLSDPPKKASPKPKVKPAKAPPSKTPAPKPAKAPPPKSKKAAAPNPKKAPFFGPQPKVPKKKVVGNPKKSPPPKAKANPKPVKSPPPKKARKPPP

SEQ ID NO: 276628 - protein, 95 aa, Zea mays
  Clone ID: MRT4577_18386C.1.pep
RGRFSCLTNTSEARCLLPATTMLSRLYPVQELAQEHTPKGVGAPAPVSRLLALPKRPSDVPRDQHHLFPAVHTAGASNASQAGARPPASSASNEP

SEQ ID NO: 276629 - protein, 127 aa, Zea mays
  Clone ID: MRT4577_183870C.1.pep
GTRGRKARRLSAVSTARLRRSHPVAGGSRPQRLGRGSGCSAMAAQVRGPLSGRARSPAALAVRALTRRSQCGFVPAGAWYRPWCPVEARARTWYSHGGNQTVERIIMVQNTPCIGVGRKVNLVVETN

SEQ ID NO: 276630 - protein, 122 aa, Zea mays
  unsure (1)..(122): unsure at all Xaa locations
  Clone ID: MRT4577_183871C.1.pep
YLFSASNQGTHQMGKPGKKXLISTQTALQKKNLKLRYRPKHPKVNVEKTRVPRKDRLKKKKNDPLFRGVKDRKLRVVKDQNQPLGRCRWLQVGPAGSHLGETGGTPHTQGVIFLGPQRQGQV

SEQ ID NO: 276631 - protein, 173 aa, Zea mays
  Clone ID: MRT4577_183872C.1.pep
MTFAGASRRRRASGSHPPLPLIAIVLLLVFPPPSRTYALRVPLREVASLLSLSHSLLTRIAVTRADRGDAAAAARARRIASHISILSSRGAWALGWDYLRHYAFSSVTGCGFSCATAAARLLAAAAEASRLKSPVDAAQWLRRNYGDLLAAATQLLNGLLSAFSEQGPLREVV

SEQ ID NO: 276632 - protein, 85 aa, Zea mays
  Clone ID: MRT4577_183873C.1.pep
VTCANLYSPSCRHQASENGGGSPLYGIHLENGLSYTHDRHFPFIGTSLQAGLTLAASLGPLLSLEETVSRSSWRSGIRDPACRAT

SEQ ID NO: 276633 - protein, 86 aa, Zea mays
  Clone ID: MRT4577_183874C.1.pep
VGHIMSSEDKAMANRVTSHSPKAMVSEPDPNRMMMFRSNMEYSQTNGQTNAVLGPVAIFWDIEDCPVSCDVRPEDVAGNVRMALRM

SEQ ID NO: 276634 - protein, 69 aa, Zea mays
  Clone ID: MRT4577_183875C.1.pep
QQTPPPHRGLQVIGRIVSSPKQCRGRGPVLLPLYLSNVDRCGCNGGLLLSFGTEKKRSWAAAKWLLRDT

SEQ ID NO: 276635 - protein, 171 aa, Zea mays
  unsure (1)..(171): unsure at all Xaa locations
  Clone ID: MRT4577_183876C.1.pep
MERASPNTAGTETTKREARDGKKKGSGSRGKRPGGGNPQGGGGKAQGEKPXGKTKRGKIPPPHKTKKKKDPPRKXEPPPPGRGTPPQGPKKKEAWEKXPKPWGTPPPEXPPPPGPGSGKRPPRPGAGRERATRRRQTRPPGXRPKGARGQGHRGTKQSGPPPKGACPRGGK

SEQ ID NO: 276636 - protein, 83 aa, Zea mays
  Clone ID: MRT4577_183877C.1.pep
WTLLLDTLPGLALSHELLWLDLSPKIGCYMLCMTQIRDVRGFCITTGSNDLGLGESNTPRAGSCDPLVLCLERASLSVCMGVA

SEQ ID NO: 276637 - protein, 132 aa, Zea mays
  unsure (1)..(132): unsure at all Xaa locations
  Clone ID: MRT4577_183878C.1.pep
RFKPWGIFFFSKMVFWKKFSGGLKKIPGAASLKGKKRGGGAFPLNRPPGGPCWAPNFFQFPRGAIFWGRGGPLXXPPPPPPPPPKKKKGLVFGGPPPQKNLGPFGFFWEGPKEALLGFKIRAKKKPFSRFVP

SEQ ID NO: 276638 - protein, 119 aa, Zea mays
  unsure (1)..(119): unsure at all Xaa locations
  Clone ID: MRT4577_183879C.1.pep
RVRSLDPSSRRALXFFFFFFFFFWAELYFDFINAKKKNREFEEPKKVRGKNEGNPTFLRGGGHEKLKTGRHESKQNMSGVVWLMEFRAVPGGSRGRLYCKEAFFLTPWLWELHPKPCWG

SEQ ID NO: 276639 - protein, 359 aa, Zea mays
  Clone ID: MRT4577_18387C.1.pep
MAWLRRTETLVLLLVVLLASASTSAAAAAAGEEEERVIRLKHSDGGYSYNHTLAHILVEYASAVYTSDLTSLFSWTCPRCKGHTKGFEVIEIIVDVENCLQAFVGVAPDPRSIIIAFRGTQQHSVSNWIEDLFWKQLDVTYPGMPDAMVHHGFYSAYYNTTLRYEILKSIKWARKTYGNLPINVVGHSMGGALASFCALDLSVKFGSQEVELMTFGQPRIGNPAFAVYFGEQVPRTIRVTHQNDIVPHLPPYYYYLGEWTYHHFAREVWLHESIDGNVVTRNETVCDDSGEDPTCSRSVYGMSVADHLEYYDVTLHADSRGTCQFVIGAANQVYNYVREVDGSIILSRYPQEPQALESM

SEQ ID NO: 276640 - protein, 54 aa, Zea mays
  Clone ID: MRT4577_183880C.1.pep
ASTRASTRPSTRALPRSVTGTLNTHALSALHQVYQTLYGAARARQWQRLEVLRG

SEQ ID NO: 276641 - protein, 157 aa, Zea mays
  unsure (1)..(157): unsure at all Xaa locations
  Clone ID: MRT4577_183881C.1.pep
SDSDHAGNKXDRKSTSGILYCLGNSPITXQSSKQKVVALSSCEAEYIASALGACQGVWLARLLRDLTGSESRAPELKVDNKSAIDLSKNPVHHDRSKHIYTKYHYIRECVESGRIVLKQISTKDQLADVLTKPLGRVKFRELCDRIGIVNVKDKVQD

SEQ ID NO: 276642 - protein, 83 aa, Zea mays
  Clone ID: MRT4577_183882C.1.pep
DFCDFISPSTEEQSSRAAAVQDVSDVVKHIWPQCKVEVFGSFRTGLYLPTSDIDVVIFESRVKTPQVGLYALAKALSQKGVAK

SEQ ID NO: 276643 - protein, 68 aa, Zea mays
  Clone ID: MRT4577_183883C.1.pep
KPEISQFVLKNLGVPPCSMGLVLGNPPIGGKPRSKMCFKFEGGVFLWAMFLGECVCYGYNQKLKTQFS

SEQ ID NO: 276644 - protein, 57 aa, Zea mays
  Clone ID: MRT4577_183884C.1.pep
THVLLSTSILLKSNELIITSLKLIILSIVVLSLCVIVIETCGIERLKPKSYLIKTFR

SEQ ID NO: 276645 - protein, 59 aa, Zea mays
  Clone ID: MRT4577_183885C.1.pep
PAILLVGSQLLLLCQQESTGLLQLAGCMVVVFAAANKQRGSERPDAPSPRIFRSGACGR

SEQ ID NO: 276646 - protein, 101 aa, Zea mays
  unsure (1)..(101): unsure at all Xaa locations
  Clone ID: MRT4577_183886C.1.pep
FGGFGKGNSSFVSKVPSQPIKIWAYEGSPFCKLEQKPLVELELPLLLPRGAGGSPKRQDFFKKKGFFRAPSFKVPNPGVQMFXSPEIIDSLNATYARAPSW

SEQ ID NO: 276647 - protein, 103 aa, Zea mays
  unsure (1)..(103): unsure at all Xaa locations
  Clone ID: MRT4577_183887C.1.pep
HPFHPPCMANMAAVASLVTPVIINEDEEDNLDTASRQQPIGQNLNGFDECHYTHPRIHRIPLKHVWQFMLEGSDIHLNKEAGFNAXANERPLLKTQTLVLDML

SEQ ID NO: 276648 - protein, 120 aa, Zea mays
  Clone ID: MRT4577_183888C.1.pep
DAAAAAARSASLGDEQNHHRILISLASFAASLRCRRRRTPSPSPGASVCWLDSVLPTRPLTRERRPCRCVASISSGMMGSSSPCSPLACILLHPIRPLPTSSNPICYVCTYIILLLNAIP

SEQ ID NO: 276649 - protein, 306 aa, Zea mays
  Clone ID: MRT4577_183889C.1.pep
MLDLGWQQRYARFCGRIIVLSVLVLLLYPFLWVWTVIGTLWFSTARGCLPEEGQKWGFLIWLLFSYCGLACIACVAIGKWLHRRHALQQRAQQGIPVSEHGVLVDMIRVPDWAFEAVGLEMRVGQDTAYHPGLYLTDAQREAVEALIQELPKFRLKAVPTDCSECPICLEEFHVGNEVRGLPCAHNFHVECIDQWLRLNVKCPRCRCSVFPNLDLSALNNLRSTSEPDHPSASASNVTTATAATRYVRSQPAGQSYLVRLQGLLLRPVRHDSVESDGEPAVGNSRLVGTEELPSILVDDGHQLPDR

SEQ ID NO: 276650 - protein, 57 aa, Zea mays
  Clone ID: MRT4577_18388C.1.pep
TSRYTTATAPLDESPSKDTSHRYEYRWSISHIHDCTYKHIDDTQVPCINYDIHNVLQ

SEQ ID NO: 276651 - protein, 69 aa, Zea mays
  Clone ID: MRT4577_183890C.1.pep
PSPLVLTPSWPRGMGGFRHRIRRPGAIFVATDARRRGRCHREGRSLGGREDVVRMARGHQSSCWWCLCS

SEQ ID NO: 276652 - protein, 91 aa, Zea mays
  Clone ID: MRT4577_183891C.1.pep
MEPEMEAALIKVGMFVLVQALVYLILSQSSTVFSRTKSLALRPARSLSARRMLALLSDLPLVAGEPSPVAAFARTRSALSPMLAAAGRKQD

SEQ ID NO: 276653 - protein, 87 aa, Zea mays
  Clone ID: MRT4577_183892C.1.pep
IFGGKNPLFLKIEWEGVPSPRDPPYFRGHQPKKNWGGKIQFFGQLGQPPPQKKKKKNLSPGLLAPPEFLPGFLVLIPVSHPLWGAPR

SEQ ID NO: 276654 - protein, 136 aa, Zea mays
  Clone ID: MRT4577_183893C.1.pep
RKAYMLCTSSTSSSSTQRMHASRVTCTCLGRTHVSSASYSCTSGVQLVSTVHSASEVTLSMQSSISCSADPLMLVQYVERALTVRHNYFHGGAYSHEEKCSSLIDLIFCKGPFIISATFRQRSVDHGLVGIPPLCR

SEQ ID NO: 276655 - protein, 81 aa, Zea mays
  Clone ID: MRT4577_183894C.1.pep
MSAYDEVEIEDMEWNAELKAYTYPCPCGDLFQITLDDLRIGEEIARCPSCSLFLTVVYNAEDFADAKEPTHKPSPSPVAVA

SEQ ID NO: 276656 - protein, 52 aa, Zea mays
  Clone ID: MRT4577_183895C.1.pep
TLLLYYIYIYIYIYIYIYKYTHTYILQVDHSYPPTTYKILINTRLCLYKNKT

SEQ ID NO: 276657 - protein, 118 aa, Zea mays
  Clone ID: MRT4577_183896C.1.pep
TCIVGSTHFFIAIDGNGIHRSGLFPSRSRTPWQHALSPNHHMAWGPRQSVAFNQNAGLRSFSVMDRDLLEILAVIQMQLPRERDRYAISKRWPYTTAPGAEVLSGQLVASRVPSKIIQ

SEQ ID NO: 276658 - protein, 56 aa, Zea mays
  unsure (1)..(56): unsure at all Xaa locations
  Clone ID: MRT4577_183897C.1.pep
IRVSFLPHPQLLPFWXQFGVNPVPLLXLXELLAFVQLVLVNQGASYQQPFMGGALF

SEQ ID NO: 276659 - protein, 106 aa, Zea mays
  unsure (1)..(106): unsure at all Xaa locations
  Clone ID: MRT4577_183898C.1.pep
MLKEQLPFSHLAPDYPHXLLPFNQLATLNSADYLQQQHLLPFTQLSDVSPAAFLTQQHYLPFYLHTMPNADTLLQLQQFLPFNPLSITNPTVIYXQQPIIAGALSY

SEQ ID NO: 276660 - protein, 84 aa, Zea mays
  Clone ID: MRT4577_183899C.1.pep
PCWPRKVLWCGNPPLNQGAGEHLHPVTIEKLGKSIGWGDLVFKTRGKPKKRGPPLSLGRKKGEPFGFGKGFGPKKFPPPAQGWF

SEQ ID NO: 276661 - protein, 263 aa, Zea mays
  unsure (1)..(263): unsure at all Xaa locations
  Clone ID: MRT4577_18389C.1.pep
MAPEARGEAALVYRDALAPVEERVRDLLGRMTLREKAAQMAQIERTVATPRTLTELGAGSVLNAGGSTPCEQASPADWAAMVDGFQRLAISSRLGVPILYGTDAIHGHNNVYGATVFPHNVGLGACRDGELARRIGEATALEVRATGIHWTFAPCVAVCRDPRWGRCYESYSEDPEIVRSLTTIVSGLQGQPPADHPHGYPFLASPRENVLACAKHFVGDGGTDKGVNEGNAICSYEGLEAIHMTPYPDCIAQGXGTVMASYS

SEQ ID NO: 276662 - protein, 78 aa, Zea mays
  Clone ID: MRT4577_1838C.1.pep
LCFFNLELPINNFFFRANSIGELTTERAVLGSIKRQVQKKKNKPRHTGGGTAVKKNPGSYQNSLTVKLRYLTYELSNE

SEQ ID NO: 276663 - protein, 157 aa, Zea mays
  unsure (1)..(157): unsure at all Xaa locations
  Clone ID: MRT4577_183900C.1.pep
MLIIRRRNLLKPLSLDLCNPFDGFPFSTDIILLPLNRRQLDSEIFALKPIHREENAHAHVDNTDGWVLTEDDFKADVEDHDAXSIRDQRDKEXXEKTNTRKRXVKPRLGDMRNTLDCPTTSRRXQIRCAMYNGVRTVTEPNRETXREHEEKPIQISP

SEQ ID NO: 276664 - protein, 66 aa, Zea mays
  Clone ID: MRT4577_183901C.1.pep
RAYARHATGRGLHPSPSLPGPRNTGAASLCTRRTGDLGQRGKCGGNAGVCGGLGVGVEGDWEIPGR

SEQ ID NO: 276665 - protein, 31 aa, Zea mays
  Clone ID: MRT4577_183902C.1.pep
VVLTWKRKIGSSLSVEPNHLSDELEPKLEDA

SEQ ID NO: 276666 - protein, 218 aa, Zea mays
  Clone ID: MRT4577_183904C.1.pep
MASSSSSSPAPALAGEALRQKRILSSKLYLEVPSSKAPVVYSPAYDISFLGLEKLHPFESAKWGRICRYLTREGYLDKKRMVEPLEACKEDLLVVHTEAYLNSLKCSFRVSSIVEVPPVSLVPNWIVHRKLLHPFRKQVGGSILSAKLAFERGWAINVGGGFHHCSADEGGGFCAYADISLCIHFAFVRLNISSVLIIDLDAHQGNGHEKDFANDAFR

SEQ ID NO: 276667 - protein, 37 aa, Zea mays
  Clone ID: MRT4577_183905C.1.pep
SPGGELTQVLVAINQRKHIVPLLECLKEWNGEPLPLC

SEQ ID NO: 276668 - protein, 64 aa, Zea mays
  Clone ID: MRT4577_183906C.1.pep
GPPTHKKGSLTSNLGPIKVGAPPKLFSRPQLENKNLKNPGAPKPGAGLNLNLFANPPPNPFSNP

SEQ ID NO: 276669 - protein, 60 aa, Zea mays
  Clone ID: MRT4577_183907C.1.pep
TPSLPPTRPPTRPPTLSGPMTRTRAAMSPTKKLPSASKLWRSSGFNQKEINHLSDCDGLE

SEQ ID NO: 276670 - protein, 91 aa, Zea mays
  unsure (1)..(91): unsure at all Xaa locations
  Clone ID: MRT4577_183908C.1.pep
TVRFLACLHLMLPCAVIISIQAKLGCKVAPITXIGDEAVGVQIDAQARDGQPSAALVDLISSVLGVKKRVVWIGLGFKSRDRVGLVQDSSL

SEQ ID NO: 276671 - protein, 133 aa, Zea mays; identical to SEQ ID NO: 275492
  Clone ID: MRT4577_183909C.1.pep

SEQ ID NO: 276672 - protein, 230 aa, Zea mays
  unsure (1)..(230): unsure at all Xaa locations
  Clone ID: MRT4577_18390C.1.pep
MQVRQHTEPADRHEHQQQRARGSPNNVVRANSKYSTHARNFPWLPPAYAAARRRRSSSPRSSSSRPCRSCCKRPGRRRAMAATDVYSSSISRRRRRVPRRRRRQQRVAAGAVVPGPHLRQRRRRCKKGXPLALLLPPPPXRRRSPPPPPPLRRRHRRRRLPAAGCSARCPXPRRRPXSSALLSCLRTRTSTPRPRARGAICSIIASPPPPRPILFHTDILFVDLLTAHSG

SEQ ID NO: 276673 - protein, 281 aa, Zea mays
  unsure (1)..(281): unsure at all Xaa locations
  Clone ID: MRT4577_183910C.1.pep
GKAGTACRSAVRNSRVDPRVRFNGEFWAVYALHQFIGNLITFALLSDDQQEGSTKGTTLLFIVFLFIMTFGAILMCFLRKRSANSKGQQELSGADAGACASLKSLSKSLASALSDVKMLLIIPLIAYSGLQQAFVWAEFTKYVVTPAIGISGVGSSMAAYGAFDGICSLLAGRLTSGLTSITTIVSVGLFAQAVVLVLLLLNFSISSGFLGTVYILFLAGLLGIGDGVLMTQLNALIGILFKHDTEGAFAQLKIWQCATIAIVFFFXPLISFKAXLVIMLA

SEQ ID NO: 276674 - protein, 133 aa, Zea mays; identical to SEQ ID NO: 275492
  Clone ID: MRT4577_183911C.1.pep

SEQ ID NO: 276675 - protein, 71 aa, Zea mays
  Clone ID: MRT4577_183912C.1.pep
IQCKPEHDYQKMELQLHDVQEMELPLDCQDNTSGEAFGESTTLLSASVFPDAIYIGNCIYVFILRYPMISQ

SEQ ID NO: 276676 - protein, 133 aa, Zea mays; identical to SEQ ID NO: 275535
  Clone ID: MRT4577_183913C.1.pep

SEQ ID NO: 276677 - protein, 133 aa, Zea mays; identical to SEQ ID NO: 275535
  Clone ID: MRT4577_183914C.1.pep

SEQ ID NO: 276678 - protein, 76 aa, Zea mays
  Clone ID: MRT4577_183915C.1.pep
PAPLPQLPHSCYYDPFKIPAGVRPSIHSSVKRRGEAVRSSGGAAIRGQTETEHGARTVTALRYSERPWWSWKQHIQ

SEQ ID NO: 276679 - protein, 98 aa, Zea mays
  Clone ID: MRT4577_183916C.1.pep
RLSGPVFWGDPTPPPRGGGPRVSQVVCFKELRAPLLGGENPTFWGTKGGTLGIKKKRYGGDSPRNVVQPPLFAPYELGSFFGLKKKKKKKKKKEKKTK

SEQ ID NO: 276680 - protein, 36 aa, Zea mays
  Clone ID: MRT4577_183917C.1.pep
KHHDDRLSLSDEPIVRINKGRRRTAHRNMMPACRYA

SEQ ID NO: 276681 - protein, 53 aa, Zea mays
  Clone ID: MRT4577_183918C.1.pep
MRLAAEMSRGSKLRWLWRAPARTLGRARDLYVRGLTGWARHVPSDPAFGYPVF

SEQ ID NO: 276682 - protein, 108 aa, Zea mays
  unsure (1)..(108): unsure at all Xaa locations
  Clone ID: MRT4577_183919C.1.pep
GATSSYSQINQVRCGLPFTTYFPYTPTWLCIEPIRLYLQPRXLLPLQXCAGVSPATFMTQPLVPSYYHDAAPNAGTLLRQLQLLPFNQLALTNLAVFYQQPIIAGALF

SEQ ID NO: 276683 - protein, 37 aa, Zea mays
  Clone ID: MRT4577_18391C.1.pep
TKGFFKGVIRRKCKAIMYNMLATGWVNVVAKSPPCYF

SEQ ID NO: 276684 - protein, 75 aa, Zea mays
  Clone ID: MRT4577_183920C.1.pep
FSCGEEVTTKRAVGLFGRRKEGGSESISLTMKGCMEPGLYRLSWKLLKYSICCFPQDFLWNQTSSSITWNMSDCL

SEQ ID NO: 276685 - protein, 480 aa, Zea mays
  unsure (1)..(480): unsure at all Xaa locations
  Clone ID: MRT4577_183921C.1.pep
MVRIIEHRAETSVDFAVEGEAASSTPQVPSRLAPVTPAVHAARQHTIAQTSRTPSRASPGALSAARELLRHPPSSTTSLGAMKQWRDDVDRLLSMAHSTSTRSKTRSSRRQHEASASVRSPSVRGAQTNDLRAELNRMRAGEDARVSLERARERRQNIDGRDLDQGFAAVAPQTPMGTRSQMGVPLAGVGCAALADHLRVASWPPKFRPHLPEKYDGTTNPLEFLQVYVTAITAAAQTWLMNLTPGSVYFWEELCARFVANFASAYQQHGVEAHLHAVRQEPGETFRKLISRFTKGVRDEKMLEKLATHDVETVPXTLFALADKCARAAEGHAWHSAPQTGATQSGGSGAVLRDEKKKKKKDRDYQKSWSIALVVAAATGGQGDRNKRPRPQRGGSGSCPVHPNGRHSAAECREIINLAKRVSERREQSSKDGSPPRRRPGKEKVDDGEVVAAERDLGYQSPEGDLKDIFAGGSYSGEDN

SEQ ID NO: 276686 - protein, 36 aa, Zea mays
  Clone ID: MRT4577_183922C.1.pep
QNPINVSYFTHIGNHRNYALCLRLLTSCKIMVLQVF

SEQ ID NO: 276687 - protein, 128 aa, Zea mays
  Clone ID: MRT4577_183923C.1.pep
LNGPARFFSWKGAGGGPPINLGWFPPLAPPPFPFFFPARFFFGFVRGYQFFPGSNYAPPFPPLGSDPGSPPNAPPRVGFPPPFRPPGRVKKKKKKKIKKKKKKKKNKIKKKKKKKKEKKKKKKKKKSL

SEQ ID NO: 276688 - protein, 92 aa, Zea mays
  unsure (1)..(92): unsure at all Xaa locations
  Clone ID: MRT4577_183924C.1.pep
LCGLVPVVRVGSGLSVAPAVGFVRAACVLRGCLAXLLAFSRLGCGSCSLALVACGLSSLLCLLLAFAPSCLAALCLACACAALAVCRLSGPR

SEQ ID NO: 276689 - protein, 117 aa, Zea mays
  Clone ID: MRT4577_183925C.1.pep
YRENRFSGKTGKSPKKGQSNGPRAGGWGPVNPPKKTPPFVAGNPPQMAKQKKRLSPGGVLFFTKPAKKKARIHVGPGGWGQAQGFFKILPNRFQNQQESRARPKGYPQNWKKKGQSI

SEQ ID NO: 276690 - protein, 104 aa, Zea mays
  Clone ID: MRT4577_183926C.1.pep
FGEASLKPRKHRSAQPPPLVILWPRAPRRFSAVIRSNLCSTRKASHSSPATLKFSYTPGCSSAWSPSRSESSAPSSMILSKFSVSPLTAASPPVWSCSTPGLSR

SEQ ID NO: 276691 - protein, 222 aa, Zea mays
  unsure (1)..(222): unsure at all Xaa locations
  Clone ID: MRT4577_183927C.1.pep
MAAAAVRRLLRGASSTSVSNTSRLLSSTTSPPPHRSPNTNSPVAFDWSDDDADGSSHLPPSTEKKDELPPPYYDPFNKKPAIAEPSDPTNLQEVFHKMRKEGLTDYAIKMFDGLSKDGLTHEALALFAVIKDRGSMPDVVAHTAVLEAYASAGPAHWRDAVRTYDRMLASGVMPNAYTXAVLVRGLAASDRCAEAGKYLVEMLDRGMRPNVATYLAAFEAYL

SEQ ID NO: 276692 - protein, 146 aa, Zea mays
  unsure (1)..(146): unsure at all Xaa locations
  Clone ID: MRT4577_183928C.1.pep
LQQLVLPVXNQVALANLFPYFPLQHFFPFNPLSTLTPSVYFQHHLFPFSQLAIAYFXHQQLFPFNQLAALNPAAYLQQQILFPFCQLVTANRVSFLPQQQLLPFFQQFWANPATLFQLQQLLPFVQLALTNPAASFHPPIIGGALF

SEQ ID NO: 276693 - protein, 94 aa, Zea mays
  unsure (1)..(94): unsure at all Xaa locations
  Clone ID: MRT4577_183929C.1.pep
LGTSRPAGTSVRDRGSMRMTSANDKPAAAXGALLHGPDRXVLYLVPLSWRTPPSYLTGARVPGXDTGWDTAGLPADPETFAENRELEVIHSRCA

SEQ ID NO: 276694 - protein, 241 aa, Zea mays
  unsure (1)..(241): unsure at all Xaa locations
  Clone ID: MRT4577_18392C.1.pep
MAPEARGEAALVYRDALAPVEERVRDLLGRMTLREKAAQMAQIERTVATPRTLTELGAGSVLNAGGSTPCEQASPADWAAMVDGFQRLAISSRLGVPILYGTDAIHGHNNVYGATVFPHNVGLGAXGNDRFDPQTMFCVMAASLYYPNVLSARQPYSVDLTXQDGELARRIGEATALEVRATGIHWTFAPCVAVCRDPRWGXRCYESYSEDPEIVRSLTTIVSGLQGQPAADHPHGYPFLA

SEQ ID NO: 276695 - protein, 523 aa, Zea mays
  Clone ID: MRT4577_183930C.1.pep
MGMVVNSSAVPFSIALLAVVIAAVVITKAALGRRRRRRTAAANNPAPPPRNDVDTGRRRPPAAITGVTSAVRLVHALATKGFEATLYEQYAKLGSVFTVSLFGMKTTTFLAGPDVSAHFYQGPDSEISHGDLLEFTVPMFGEGVAFAVDAATRAEQHRFYLDALKPARLRCHVAPMLQEVEEFFARWGQQGTVDLKQELEQVLMLITARCLLGKEVRERMLHEVFSAYRDLTENSLHLTSLLFPYAPTPAARRRDRARATLSGIFSEIVRSRRRSGRRAGDDDGDVLQSLVDARYRDGRGTTEAEVTGLVIAILFAGKHTSSATSTWTGARLLRHAECLDAAVDEQRRVVAERGSGVDYDALAEMGFLHCCIKEALRMHPTAPLFLRRAHRGFTVRTREGAEYDVPSGQTVASPLLINHYIPYVYRDPHVYDPRRFGPGREEDRVGGRFCYNAFSGGRHACPGEAYAYMQVKVIWSHLLRNFELKLVSPFPRTDWMKLSPEARGKVVVSYKRRMVPVGSVLEN

SEQ ID NO: 276696 - protein, 97 aa, Zea mays
  Clone ID: MRT4577_183931C.1.pep
MNIFRGLGAGGGLGFPKAPNGPPEELFAPPFGPLPKMGFFFPPGNIRALAPPAGNVPSPVGGLFGNLGPLNFFADKTVFWPPRSGVGLGGLWLGPWV

SEQ ID NO: 276697 - protein, 47 aa, Zea mays
  Clone ID: MRT4577_183932C.1.pep
SERLGAHIDKNLGADMTDDMVSRSHLSHDILRNKRAYSRAEAAVYRV

SEQ ID NO: 276698 - protein, 155 aa, Zea mays
  unsure (1)..(155): unsure at all Xaa locations
  Clone ID: MRT4577_183933C.1.pep
ICILPVRNFFLPRKVSRNYLEHVKXKFVHRVSSSALQIFATQDMLRAIEIGNSSSLPSAAALNWVMKDGLGRLSRCIYTASLASSFDTNLKRVRFYTSVLFSLSIGVELLTPVFPQYFLMLASIANLAKQISHACYLASGTCPGGRSKSLAHARE

SEQ ID NO: 276699 - protein, 62 aa, Zea mays
  Clone ID: MRT4577_183934C.1.pep
HMDDALVFVASIAIVMDDCSIGLSMPFCAVKSDRLRSKVLPTVYIVIHSMPVQIGSSFICWS

SEQ ID NO: 276700 - protein, 80 aa, Zea mays
  Clone ID: MRT4577_183935C.1.pep
VISSSCTPANVVTLLSCALWTPSKRSLSKKGCDLSSDPLAPAQVVSVSSLSYWSSVFAFWSGARPMSVPHQSANSSAIRN

SEQ ID NO: 276701 - protein, 53 aa, Zea mays
  unsure (1)..(53): unsure at all Xaa locations
  Clone ID: MRT4577_183936C.1.pep
SXPSXXXXPXXPATRTAXPXRRRGKSLXPXFLANALTFGGRSEIFPXPPSRYP

SEQ ID NO: 276702 - protein, 123 aa, Zea mays
  Clone ID: MRT4577_183937C.1.pep
RRTKVEIAAPSYSSSVTWMLPSQPSWTRPARLRHHAVEPEAAAAEVSQASFQEGEASSLSLLAAGAEGAYSVGYAYLRVRPPRGYVSSAGVVRGRRVPGWRVQQLSAGIPRCGRARAGGGSEE

SEQ ID NO: 276703 - protein, 92 aa, Zea mays
  unsure (1)..(92): unsure at all Xaa locations
  Clone ID: MRT4577_183938C.1.pep
APAHSRTGPXPRALGHNNMLLQAPQGRTSGAGERRARRAGPSRRRPSRSSAPPRPVFACPVSGRRSSAPPRPDVLYCAFLPPSQRWPPGQHR

SEQ ID NO: 276704 - protein, 246 aa, Zea mays
  unsure (1)..(246): unsure at all Xaa locations
  Clone ID: MRT4577_183939C.1.pep
MGEASSPAIAKDVTELIGNTPLVYLNKVTDGCVGRVAAKLESMEPCSSVKDRIGYSMITDAEEKGFIVPGKSVLIEPTSGNTGIGLAFMAAAKGYRLVLTMPASMSMERRIILKAFGAELVLTDPLLGMKGAVQKAEELAAKTPNSYILQQFENAANPKIHYETTGPEIWKGTGGKIDGLVSGIGTGGTITGSGKYLKEQNPNIKLYGVEPTESAVLNGGKPGPHXIQGIGAGFILVALHVDIIDE

SEQ ID NO: 276705 - protein, 30 aa, Zea mays
  Clone ID: MRT4577_18393C.1.pep
RLADGYGDGALGDWTKAPPGASIFVDPREF

SEQ ID NO: 276706 - protein, 169 aa, Zea mays
  unsure (1)..(169): unsure at all Xaa locations
  Clone ID: MRT4577_183940C.1.pep
AHQKLNFRYFGPYXVLSKVGAVAYRLDLPTSSGIHPVIHVSQLKLATGFKGTVSPTLPSSVPELSVPLNILQTRGVTKGNRLVHQVLVEWSGLPSELATWEDREALKQCFPGAPAWGQACFKGAGNVNTAVLPEVSKEDLQPQDAGQHLLGRGRRTRRANTRVHGPEWV

SEQ ID NO: 276707 - protein, 145 aa, Zea mays
  Clone ID: MRT4577_183941C.1.pep
FQKSGSQKLPITRRCGGRWPRPLWRCGSSQRPSRWRSSGCRYSATPWRRPLPDDQEEAGGQQKVAWLLLRQRRQRRWAGSGYCILRRPGRSRRRRPRGQHAGTGIASSPGQLLPVDPTTVNPVCLRLGAWALDTYSLEAFFFLFL

SEQ ID NO: 276708 - protein, 177 aa, Zea mays
  Clone ID: MRT4577_183942C.1.pep
LASVFPGVADHWYPSDLFTRAKIESILDWHHSNLRRGAATLVMHTALAPFLGLTTSHEAVKQAREKLVMQSLGVIESVWLKGDAKFLLGSPQPSIADLSLVCEIMQLEILGDEVRDRFLGAHEKILVWMDKVKKATSPHFEEAHELLFQVKKARMVQGSSSSKAFEPSTKLKTASKL

SEQ ID NO: 276709 - protein, 63 aa, Zea mays
  Clone ID: MRT4577_183943C.1.pep
RCKVVKLLNRIGCTFSSLLQNPGFRALPRLPLLSCPPPGRQAQSYRFSKTKTAREQFLVSDPR

SEQ ID NO: 276710 - protein, 103 aa, Zea mays
  Clone ID: MRT4577_183944C.1.pep
SPAHSHSFIPLASRDSIGFRSPAPIRSFSAAAAAAAPRPDPKGCGLWPLQTHRFLPLGFSTPRSRILWIHPLTACAIGGRAASSSAYSSVPAPACFYRYTARA

SEQ ID NO: 276711 - protein, 976 aa, Zea mays
  unsure (1)..(976): unsure at all Xaa locations
  Clone ID: MRT4577_183945C.1.pep
RSAQLTLSFSYLTPSSSCSGDGQAAEQIKRAEAAPPPPRASLLSLPASLHPATRARCPPLSLSTRPXMACCLQLHHLRRPSPAPLPARVLFLLSTPRLRPVRASPGPSPPNSFAGWSSDSDSADDGADKSTLGFGRAGGLLGPGLAAFFFLAGITFAAVSIRSSGTHAAGKLQNLPTETAATESYPDYHSHKEDGATREASLPTDWDEEDYDNLDKKEDTDEYLTPLQSNEVPGVPAEGEVGHLLQNTEPVTNGDHVVGEEANQFDNLIASDGNQDPPPPPLPILDAAGPSEEIPDVEETSDPKMDLPENQHFDETLTSDAMVLDSDVVPIQDISEGAIAAAFHPEDKGIEQNPQTLDKDELSPSGLPDYMEHVSADGMHPLGSNELSMATRTSETGDGEETIVEDLYKGESELENQNKQLESTPPDQYFSSPGIPAPSVVSTALQVPAGPIVVPASVDPTQENAIAALQILKVIEPSAQAGELCTRREYARWLVAASNCLSRNTSSKVYPAMYIDNVTELAFDDVTPEDPDFPFIQGLAEAGLISSKLSRSDMNIPEDVHDNHILFSPESPLSRQDLVSWKMALDKRQLPEVDRNCLFKLSGYIDIDKINTAAWPALAADLDAGDQSITALAFGFTRLFQPNKPVTKGQAALAFSAGDSGEVVLEELTRIEAEKIAEAAVNAHAALVAQVEKDLNASFERELKEERERVETLEKVAEEARVELDRLRAEREEEKNILVRGRAAVESEMEVLLKLRSEVEEQLQNVLSKKVEVSFEKSRIEKLQKEIESDNSAVVQLQYELEVERKALSMARAWAEEEAKKAREHARALEEARNQWERQGIRVVVEGELKDDASAGVTWANAGKEHAVDESINRAEALLEKLKTMSGEMEVQSRGAVERVMQHVRSFIAILKQQAADARQWCTEFGACAASRANEVSAQVKGSVSAFGATLGDKSKRAMEECKDGLERISHRFKTD

SEQ ID NO: 276712 - protein, 110 aa, Zea mays
  Clone ID: MRT4577_183946C.1.pep
LKKTQPDKVKPTPQEQTTQTARVMSPGQRPKARKNPAPPQKEGKPRQEPAKHPPPPGDPGNKGENHPKGGETGAETAATGNLKKRGKPGPHPGKNRGPEEPPQAPPWAAT

SEQ ID NO: 276713 - protein, 48 aa, Zea mays
  Clone ID: MRT4577_183947C.1.pep
PFLRTYPVQSLILVQAYDIFPSYLKLNEGILIPSIHSGFVAPRLALND

SEQ ID NO: 276714 - protein, 67 aa, Zea mays
  Clone ID: MRT4577_183948C.1.pep
RWSSLAYVSVVISVEIICHSICQDVDDRSDRTRCCVTGDQSHPIQTANVAHSLMIASTLWYICACPR

SEQ ID NO: 276715 - protein, 52 aa, Zea mays
  Clone ID: MRT4577_183949C.1.pep
LSSFRDSACSLSDGWPVGTTMKLFLDALADCTPFLTPVRTKRTGMVAFSSSS

SEQ ID NO: 276716 - protein, 158 aa, Zea mays
  unsure (1)..(158): unsure at all Xaa locations
  Clone ID: MRT4577_18394C.1.pep
MKELFEILDNASSSSACTSTSXSQQAHSXTRPLSTPPSPAPHSSAEPPTGTGPSPFSNFTTSSVKSAVGPPLSSSLSPSSAPSASGFTEALTESTASAAPLSPPCPSPMTGSSSSSSTAAASLMGTSAADCASPTACGGGSSIPCSCDILGPAVAETS

SEQ ID NO: 276717 - protein, 68 aa, Zea mays
  Clone ID: MRT4577_183950C.1.pep
KGVSGAKIGPWVFPGFPSGACVKLVRGVPFKDPGCLFSETCPRRMRGAPVPLGELPPAEGSGRPSFSF

SEQ ID NO: 276718 - protein, 63 aa, Zea mays
  Clone ID: MRT4577_183951C.1.pep
LVVRAVVVIGRYILPTPAPRPRIVEDACEWSGSKLFVPRICDSNSEHLALDPQQVLFRIRLRV

SEQ ID NO: 276719 - protein, 182 aa, Zea mays
  unsure (1)..(182): unsure at all Xaa locations
  Clone ID: MRT4577_183952C.1.pep
PILQPYGISTGXTDEMLPLSPLFLQQCSGLXQQMPLEXNVVAAHSKEQSPLQQASCVPETFAALLVEQQXDTLPLXHTRLHLNXGSYLSLLQLPFRQLPAAYPQELLPFSQVAELNSTGYXQWRQLQPYSHASXVSPDNFVTQPQLLXVYQHDAPNAGTLLHLQQLMPYNQLALTNSSLFYQ

SEQ ID NO: 276720 - protein, 66 aa, Zea mays
  Clone ID: MRT4577_183953C.1.pep
CHPNELLPLWFHRSVNLGAVDGGAHGPADGHTALAGDVGGVGHADPAAEPDSHALDKVTKRPAASV

SEQ ID NO: 276721 - protein, 145 aa, Zea mays
  Clone ID: MRT4577_183954C.1.pep
GSATASVWSTPATIAGGPGSPGGVPISPPPGCSTTTCSRSCSGGISAPASSLSSSVPFNPFRSFSSSFPMSRVRLCCHPPPLGRYRPLLFAAPSFRVVSFRFLLLLLWSSSSSLCPWFVTCLCSYPNRMCPLMSLGLPCWLAFKY

SEQ ID NO: 276722 - protein, 150 aa, Zea mays
  Clone ID: MRT4577_183955C.1.pep
QQIRRRILMMKHHRLTTNRHQRIRPKRNLTPTSMRIRMRIINNLTRSINRRRTSRMTRKQIRIRLPHRIRIKTPRINIHRPNDTNMRRHQHRRPKHPIKRPSNTNKRQRILRHLLKLRMHNINLPPPTRHILNQTSNKTTQAHKSAQRSK

SEQ ID NO: 276723 - protein, 64 aa, Zea mays
  unsure (1)..(64): unsure at all Xaa locations
  Clone ID: MRT4577_183956C.1.pep
LLVHRDAAALPEWAPPEVQQLQALLLLLGHVELFLVLASGVSXLXACLTKHVSAHLCGEQWRID

SEQ ID NO: 276724 - protein, 53 aa, Zea mays
  Clone ID: MRT4577_183957C.1.pep
PPEWHHAQNVTFRSGSPSPYFNSWLHVHICQIGVILYSVSRACGDRRMVVLHP

SEQ ID NO: 276725 - protein, 61 aa, Zea mays
  Clone ID: MRT4577_183958C.1.pep
QNFEWRCVTETQQLFRSLGSDCGKELMLHQTWHMWTTGRCSGYTVGQMKSWLSRMDLLAHE

SEQ ID NO: 276726 - protein, 174 aa, Zea mays
  unsure (1)..(174): unsure at all Xaa locations
  Clone ID: MRT4577_183959C.1.pep
SARASARNSRSEAPSGSQKENGASTSNIEKPPPVEKTLLCTLEELYNGTKRKMKITRNVAKPDGRIEVETEVLAVEVLPGWKKGTKITFPNKGDKLHGQLAQDLTFVLDSKPHDVYNLEGNXLLVKQVIPLVDALAGAEINLTTLDGQNLPVRVEEVFRPGYEVVLGEPKGADH

SEQ ID NO: 276727 - protein, 65 aa, Zea mays
  Clone ID: MRT4577_18395C.1.pep
MDLLQHQQQLQIMLQHGNGGGAMDLGLGYGYGLPPIMHYPMHPESYPVPYNMFSDKNCNIMCSLM

SEQ ID NO: 276728 - protein, 315 aa, Zea mays
  Clone ID: MRT4577_183960C.1.pep
WKKERELAEEKERRRLEEAERERERKKDRLAVERATREAHERAFAEAREKAEKMALERINAARQRASAEAREKEDRASVEPAAERASREARIKAERAAVERATAEARERAIEKAKAEKALAEARERRERYKSSFKESFKSTNQDIRQESQFHRATSSNFIRNPDSSNRAMVEVESALRHKARLERHQRTAERVTKALAEKNTRDLLAQREQAEKHRLSEFLDPEIKRWSNGKEGNLRALLSTLQYILGADSGWQPVPLTDLITAVAVKKAYRKATLCVHPDKLQQRGATIRQKYICEKVFDLLKDAWNKFTSEER

SEQ ID NO: 276729 - protein, 336 aa, Zea mays
  unsure (1)..(336): unsure at all Xaa locations
  Clone ID: MRT4577_183961C.1.pep
YQRQQRSRLGPAMLAAXLLAGAGVSNGQLQVGFYSKSCPDAESTVASVVRQSGSADPTILPALIRLQFHDCFVRGCDGSVLIKGGGNNNNNAEVDNGKHQGLRGLEIIEGAKTQLEAQCPGVVSCADIVVLAARDAVAFTGGPSFDVPTGRLDGKVSNLRDADALPDVHDGIDALRSKFRANGLDEKDLVLLTAAHTVGTTACFFLQDRLYNFPLPGGGRGSDPTIPPGFLSELKARCAPGDFNTRLALDRGSENVFDTSILRNIRNGFAVIGTDAALYNDTATVDVVDSYSGLLSNFFGPYFRQDFADAMVRMGSIGVVTGSKQGEVRKVCSKFN

SEQ ID NO: 276730 - protein, 69 aa, Zea mays
  Clone ID: MRT4577_183962C.1.pep
RAPAPPAPRRLRLLQRRHGRHCVTANVVSAVHCFRAGSDIFGAIFRCYAVVFSLFVAVLETKWGFIIRF

SEQ ID NO: 276731 - protein, 42 aa, Zea mays
  Clone ID: MRT4577_183963C.1.pep
PHTYKKQWVDLWAKQRPTPRNSPDCTPWCLPGVPDTWNKLLS

SEQ ID NO: 276732 - protein, 80 aa, Zea mays
  Clone ID: MRT4577_183964C.1.pep
DGSTQLASQPASSQLARRARGSSSPPWGSVPSRPPPPSHSGMEMKNIACASLVADSAVTVALAAEASHPEPTRGSSTVAP

SEQ ID NO: 276733 - protein, 70 aa, Zea mays
  Clone ID: MRT4577_183965C.1.pep
KQTTEPAELRIKLPSTVLVELQQSTMTAIIKNQDVHVSYKDCLLPTDGVSSEALHSLAITASPTRPPTRP

SEQ ID NO: 276734 - protein, 85 aa, Zea mays
  unsure (1)..(85): unsure at all Xaa locations
  Clone ID: MRT4577_183966C.1.pep
MASLLRPLVLVLLIASCAAQQSPPAQPPPTPNAPPANSAAQAPXAGNPAPAPQAPSGGKTAPAPTGTSPSGPTTSAPAPTTTSPG

SEQ ID NO: 276735 - protein, 90 aa, Zea mays
  Clone ID: MRT4577_183967C.1.pep
ISWAHQAPGGYYKRRARLIKRAENTARWTSGISISGTRLESPTAGLISCGAKIEQARLNTAAKSIPVSGDADTGYGNWMKAKRTVKGDIN

SEQ ID NO: 276736 - protein, 98 aa, Zea mays
  Clone ID: MRT4577_183968C.1.pep
LCLKSLQNKRSTQMISIRERERERERERERERERERERERVCLAPRTPPTVANLSSDQSIYVWHTGSQAQRHVTLNLSPSPPWKDTKTFTLFFSTPHS

SEQ ID NO: 276737 - protein, 42 aa, Zea mays
  Clone ID: MRT4577_183969C.1.pep
SSNSAALRWSFFSSCACLCQLPSPLQCTCPAPSRGCMACTAL

SEQ ID NO: 276738 - protein, 73 aa, Zea mays
  unsure (1)..(73): unsure at all Xaa locations
  Clone ID: MRT4577_18396C.1.pep
TRERTPXDYIFYRYRLPFFYFWGSVVLLVCTRCNLQIHGLLSLQLSSSRLITTSNINPFRTLTKLNSLSTTNN

SEQ ID NO: 276739 - protein, 107 aa, Zea mays
  Clone ID: MRT4577_183970C.1.pep
IPFFDPSHTRFIFVSPFSPTPFTNPRNSFFFSGGFFFRENLRPSFLPIFPPNLLVWGFPSPPLKFFFFPKNVKNFFFPHISWNPPNPSLPGFFQTFFLCEVGLPFWI

SEQ ID NO: 276740 - protein, 71 aa, Zea mays
  Clone ID: MRT4577_183971C.1.pep
HTRGTPLYKHTLPPGGPTLKGLKPDHTLPIKGKPWHRPKQEGPTTSPPNKLPLGTTQNGEGEQMQRHIPIW

SEQ ID NO: 276741 - protein, 118 aa, Zea mays
  Clone ID: MRT4577_183972C.1.pep
HAYTLSTIISTFYSLMHPCQILPFSIPPTTSCFFNNPPSFLYADHIKICINLFIRIPILITSVSPHTKNFYLFPIINTFHYHVTTYTSIYILHILFHLPLLILNQTFTTIIYIPSTPF

SEQ ID NO: 276742 - protein, 85 aa, Zea mays
  Clone ID: MRT4577_183973C.1.pep
QRKGLRFFFFFFLLAGRHAINIHGGSKGATGHRNTAEADRCDGDRHTQSSQNALLIAKKATVQQHWRPSILLSNGGLHSVPWHQI

SEQ ID NO: 276743 - protein, 117 aa, Zea mays
  unsure (1)..(117): unsure at all Xaa locations
  Clone ID: MRT4577_183974C.1.pep
MRDPFDAPVDLINVDHNGGYQLSRTGAVSAGDHGLQNGGPKSLAPNSDTVVRHQLQGASLHKDLALEDPNTRIMDPETKELYFRSQSQEDEILLLRKKIAXASLKELSLLSEXHILE

SEQ ID NO: 276744 - protein, 52 aa, Zea mays
  unsure (1)..(52): unsure at all Xaa locations
  Clone ID: MRT4577_183975C.1.pep
AQERHGEGVLDGAVALVNXXVCGAGLWPVRKHTIQSCRWXNASGCPGCPPGG

SEQ ID NO: 276745 - protein, 117 aa, Zea mays
  Clone ID: MRT4577_183976C.1.pep
MASFAVATAPSLAAPAAKRRPAAGVTYVEGMNAYSGLKGLNKVTMLGVRKTADYSFAKVVASLSPAGRKRRGGAFGAQMNAAAEIFRIAATMSGLVLVGVAVGFVLLRVEAAVEEAE

SEQ ID NO: 276746 - protein, 131 aa, Zea mays
  Clone ID: MRT4577_183977C.1.pep
KLGPPFKKKGEKTSTNIRIFGPPFVDPRGAPFFGGLWKKKNPLGGKKPNIPGAFKKGKSFTNLFFPLGKIFLKKKKPFFLKVLELFFFKGRFPDAPKKVSPPELFRIIPGLENWEICRGSKLGALEIFFSG

SEQ ID NO: 276747 - protein, 117 aa, Zea mays; identical to SEQ ID NO: 276745
  Clone ID: MRT4577_183978C.1.pep

SEQ ID NO: 276748 - protein, 68 aa, Zea mays
  Clone ID: MRT4577_183979C.1.pep
RNSRSHCKQDERPSCPQLGTTMDLLKNSQTRKKGGQETNLLEAEYIQRLPPLTKRKGAKQMEMQALHL

SEQ ID NO: 276749 - protein, 153 aa, Zea mays
  Clone ID: MRT4577_18397C.1.pep
PVLDFCNLHRRTTSLRACTEAEVQARYNGRIPVTSYICMHAWSKLLASCLTDELLLQPGHGPRREWQVDDGRTEQESQCPNQPPCKLCCSSDRGHVQQLARRARGAFLTPCVCQILPSFSFGLSLTRPCSSSLHRSRQSPARVHERTHAQRDT

SEQ ID NO: 276750 - protein, 117 aa, Zea mays; identical to SEQ ID NO: 276745
  Clone ID: MRT4577_183980C.1.pep

SEQ ID NO: 276751 - protein, 95 aa, Zea mays
  unsure (1)..(95): unsure at all Xaa locations
  Clone ID: MRT4577_183981C.1.pep
EVFDYRAVGFRGFQKIAVSRDDKXDQTHDRQRIEDPRGFAMLAWTCLERSVLAIICSFCDKLLKQYVVAFPEINDEVVYSSLEFLILARYGLWDV

SEQ ID NO: 276752 - protein, 117 aa, Zea mays; identical to SEQ ID NO: 276745
  Clone ID: MRT4577_183982C.1.pep

SEQ ID NO: 276753 - protein, 97 aa, Zea mays
  Clone ID: MRT4577_183983C.1.pep
MSYIYSRAQKNPIDTMRVLLVALALLALTASATFTHTIGCCGCQPPTPIHIPTPVHLPPSVHLPLPGLIPPPVHMPSSVQFQPPVIFLPPVNLPPSQ

SEQ ID NO: 276754 - protein, 177 aa, Zea mays
  unsure (1)..(177): unsure at all Xaa locations
  Clone ID: MRT4577_183984C.1.pep
TPRPPHPPPRVLPRVRPRVRGRVGAARPTITVWSAEGESSGSLPLPQVFTAPIRLDVVQQVHKSMAKNKRQPYAVAENAGHQTSAESWGTGRAVARIPRVSGGGTQRSGQAAFGNMCRGGRMFAPTKTWRRWHVKVNQNQKRYAVASAIAASGXPSLVLARGHRIEQIQEVPLVLSS

SEQ ID NO: 276755 - protein, 216 aa, Zea mays
  unsure (1)..(216): unsure at all Xaa locations
  Clone ID: MRT4577_183985C.1.pep
CRCRCSTSPSSTSRPPXARPRHXPSGSSCPTPSSSSSPPTPACSSSAPPPPPRRTTTVTATAASTRRRRPRTSRLLWLAWRRPSPXEQRRRRPRVRIGREQRHRRRRKPVGDQRRRQRSDDGEPEPEPGRERGAAGGEAAAPPARRAPXRRTRSRRRPSSPXRAGQERGAQRGEAEAAAPARRDXRRRRTGGRRRRLLPTRRRSWRASTRGCRTRS

SEQ ID NO: 276756 - protein, 70 aa, Zea mays
  Clone ID: MRT4577_183986C.1.pep
WESRKANFQRGTTRTALRPKIPPITLFKKKKPPGFNPPWGAQNGTFYMGETGFLQADPLWFYPPKKNTPG

SEQ ID NO: 276757 - protein, 86 aa, Zea mays
  unsure (1)..(86): unsure at all Xaa locations
  Clone ID: MRT4577_183987C.1.pep
SPRQLXFPPFPXTTVXSSPXRXXXXHAYRSAXGSNSNAXXLXESAXEAQXXTAPMXEXRIMRQXXQGXXPTPXPSESXSHXLXLXL

SEQ ID NO: 276758 - protein, 35 aa, Zea mays
  Clone ID: MRT4577_183988C.1.pep
ISLFISLVHPVIGWLFPIVIEIMSIHTSCNELSCA

SEQ ID NO: 276759 - protein, 72 aa, Zea mays
  unsure (1)..(72): unsure at all Xaa locations
  Clone ID: MRT4577_183989C.1.pep
PATDPXLKNVEKTFLGARHPQNQTSPLLPTHLPAYKKESGISSNLILKDLKHLLTDSPTSFNARPPGQTQIS

SEQ ID NO: 276760 - protein, 49 aa, Zea mays
  Clone ID: MRT4577_18398C.1.pep
KLVTTHAHAHESFDSIEGAAPFFFLGHTWLLSLFQMNLLSCIFGDLNTG

SEQ ID NO: 276761 - protein, 61 aa, Zea mays
  Clone ID: MRT4577_183990C.1.pep
QQRLQYVNSAATGVELNVNSKGTCKFVYPSIQMIREIPFVFALLLIYIIVSTFYKNKGCVF

SEQ ID NO: 276762 - protein, 57 aa, Zea mays
  Clone ID: MRT4577_183991C.1.pep
TTCSKIIISLIRQFSIFYRLCSAFDNSQPRSQYQAWTYSLFQSYLPVCAKTQTSVVC

SEQ ID NO: 276763 - protein, 53 aa, Zea mays
  Clone ID: MRT4577_183992C.1.pep
DFTRQPLRRERAGILRNDVFVHPHETLTQGNFEKASLSRGSHCLSSTAEMCSC

SEQ ID NO: 276764 - protein, 110 aa, Zea mays
  unsure (1)..(110): unsure at all Xaa locations
  Clone ID: MRT4577_183993C.1.pep
SAPVSRASGLVQXAVRMVTDDYMRSAVDYFKTTRARQSLASTLLITTWSRLEFRGADFGWGEPVMSGPVSLPEKXVILFLAHGKXSKSINVLLGLPATAMDAFQELVDEI

SEQ ID NO: 276765 - protein, 51 aa, Zea mays
  Clone ID: MRT4577_183994C.1.pep
DAWALQLNCSKSLLAATIGGTQMSPTIISKKTCYIMRSKNYLYTRHDNAYP

SEQ ID NO: 276766 - protein, 47 aa, Zea mays
  Clone ID: MRT4577_183995C.1.pep
KIKNERVIKFPKKNLGISKENHLCYWSGFCSKKKPRGVCGIYMQKFC

SEQ ID NO: 276767 - protein, 156 aa, Zea mays
  Clone ID: MRT4577_183996C.1.pep
YRSGIPGSTHASVQQNRHVNTDGRIELPADQVQHNQVMSSASLARSTDSGSPGISSISQRKQESSHDPSAITSTSQLASSPQDTFVGSDRVLPSSSQSMPQRQMSGGVPVHGYGIGGQVQLQQSRQQLQSQQQQQQQQRPVVQGGVYAHPSNSGQG

SEQ ID NO: 276768 - protein, 73 aa, Zea mays
  Clone ID: MRT4577_183997C.1.pep
SRPAGKLYHENGTRSPSLLPSLKSGNQSHLSIGLACLATPASVVPHYQLRPCRHGHVHERVLDRVELHHHEYG

SEQ ID NO: 276769 - protein, 213 aa, Zea mays
  Clone ID: MRT4577_183998C.1.pep
MGKDCGNHGEDDIRRTCRRFLAFLFFLALIVAVIALIVYLVLHPTHPRFYLQDASLRQLDVLTANASAAAGVLSTVLQVTVASRNPNDRVGVYYDRLDVYASYKYQQITLASALPPVYQGHGDVEVWSPVLPGPNVPFAPYLADALAKDVQAGYLILQVKIDGRVRWKVGSWISGHYHIFATCPAFLVGAGGNGAPGASGLRFQNATYCHVEV

SEQ ID NO: 276770 - protein, 157 aa, Zea mays
  Clone ID: MRT4577_183999C.1.pep
MNPSQNNMQRLIMQQNRHVNTDGRIELPADQVQHNQVMSSASLARSTDSGSPGISSISQRKQESSHDPSAITSTSQLASSPQDTFVGSDRVLPSSSQSMPQRQMSGGVPVHGYGIGGQVQLQQSRQQLQSQQQQQQQQQRPVVQGGVYAHPSNSGQG

SEQ ID NO: 276771 - protein, 89 aa, Zea mays
  Clone ID: MRT4577_18399C.1.pep
EQRPELSFLYGRHSGSTARCRGAHGTCDLLDPTLTCNTGLTQQRHGRQGTAEVWKTTSYRQDCGPGWHRLPTHRLTHRINLKSPRVAGQ

SEQ ID NO: 276772 - protein, 354 aa, Zea mays
  unsure (1)..(354): unsure at all Xaa locations
  Clone ID: MRT4577_1839C.1.pep
PDPITAGKVYYIPLNSVPGQAYVTLPAPPAPAPAPTDYTLSGTPDYHSSKFPYGWVIGSMGVALALIVIAVLALVLWKFFGYKPQDRNGQRKSPDRHKFQLLKSGSFCYGSGRYLCCQFGNAKPTRADGGEHHINVPKAGVAADVFDREKPIVFTHEEILISTDSFSDANLLGHGTYGXSVYYGVLREQEVAIKRMMATKTKEFIVEMKVLCKVHHASLXELIGYAAGKDELFLVYEYSQNGSLKNHLHDPERKGCSSLSWIFRVQIALDAARGLEYIHEHTKDHYVHRDIKSSNILLDGSFRAKISDFGLAKLVVKSNDAEASVTKVVGTFGYLAPEYLRDGLAATKSDVYAF

SEQ ID NO: 276773 - protein, 163 aa, Zea mays
  unsure (1)..(163): unsure at all Xaa locations
  Clone ID: MRT4577_183C.1.pep
VECIXSIHIGQAGIQVGNACWELYCLEHGIHADGQMPGDKTIGGGDDAFNTFFRETGAGKHVPRAVFVDLEPTVIDDVRTGTYRQLFHPEQLISANEDADNNFARGHYTIVKEIADLXCLDRVMKLADNCTDLQGFLCFDAVGGGTTSGRGSLLLQSLSVDYG

SEQ ID NO: 276774 - protein, 255 aa, Zea mays
  Clone ID: MRT4577_184000C.1.pep
RERHTLIIYDDLSKQAQAYRQMSLLLRRPPGREAYPGDVFYLHSRLLERAAKLNSLLGEGSMTALPIVETQSGDVSAYIPTNVISITDGQIFLSADLFNAGIRPAINVGISVSRVGSAARIKAMKQVAGKSKLELAQFAELQAFAQFASALDKTSQNQLARGRRLRELLKQSQSNPLPVEEQVATIYTGTRGYLDSLEIEQVKKFLDELRKHLKDTKPQFQEIISSSKTFTEQAETLLKEAIQEQLERFSLQEQT

SEQ ID NO: 276775 - protein, 51 aa, Zea mays
  Clone ID: MRT4577_184001C.1.pep
KKKKKKKKKNKKIKKGGPIKGYQVTYTCMRLNILLYRDTKIQFIGPVITTY

SEQ ID NO: 276776 - protein, 90 aa, Zea mays
  Clone ID: MRT4577_184002C.1.pep
QCLVESPAQKNCNLLKIKMICFIIAASTLISLQRFHHFRYSRRRRSHVVESKLRDHEIIHMTLLQLLIIQGPGRHRELLMPSLVVNRRIV

SEQ ID NO: 276777 - protein, 207 aa, Zea mays
  Clone ID: MRT4577_184003C.1.pep
FATIDKLALVNVEGTGMAGVPGTANAIFGAVKDVGANVIMISQASSEHSVCFAVPEKEVALGAAALHARFREALAAGRLSKAAVLKENMNIDLRVMGIAGSRTMLLSDIGVDLTQWKEKLQTEAEPANLDKFVHHLSENHFFPNRVLVDCTADTSVASHYYDWLKKGIHVITPNKIANSGPLDRYLKLRTLQRASYTHYFYEATVGA

SEQ ID NO: 276778 - protein, 920 aa, Zea mays
  Clone ID: MRT4577_184004C.1.pep
MRSLTVASRHPGAAFSTRRRPLLHPAAAGRDSTFQRCWRWEKTQDSSFGSSLRTSRLPRTVHGDILKNLLAPTAGAVSVEQAEAIADLPKGDMWSVHKFGGTCMGTSERIHNVADIVLRDPSERKLVVVSAMSKVTDMMYNLVNKAQSRDDSYIAVLDEVFDKHMTTAKDLLAGEDLARFLSQLHADISNLKAMLRAIYIAGHATESFSDFVVGHGELWSAQMLSYAIQKSGTPCSWMDTREVLVVNPSGANQVDPDYLESEKRLEKWFSRCPAETIIATGFIASTPENIPTTLKRDGSDFSAAIIGSLVKARQVTIWTDVDGVFSADPRKVSEAVILSTLSYQEAWEMSYFGANVLHPRTIIPVMKYNIPIVIRNIFNTSAPGTMICQQPANENGDLEACVKAFATIDKLALVNVEGTGMAGVPGTANAIFGAVKDVGANVIMISQASSEHSVCFAVPEKEVALVSAALHARFREALAAGRLSKVEVIHNCSILATVGLRMASTPGVSATLFDALAKANINVRAIAQGCSEYNITIVLKQEDCVRALRAAHSRFFLSKTTLAVGIIGPGLIGRTLLNQLKDQAAVLKENMNIDLRVMGIAGSRTMLLSDIGVDLTQWKEKLQTEAEPANLDKFVHHLSENHFFPNRVLVDCTADTSVASHYYDWLKKGIHVITPNKKANSGPLDRYLKLRTLQRASYTHYFYEATVGAGLPIISTLRGLLETGDKILRIEGIFSGTLSYIFNNFEGARTFSDVVAEAKKAGYTEPDPRDDLSGTDVARKVIILARESGLGLELSDIPVRSLVPEALKSCTSADEYMQKLPSFDEDWARERKNAEAAGEVLRYVGVVDVVSKKGQVELRAYKRDHPFAQLSGSDNIIAFTTSRYKDQPLIVRGPGAGAEVTAGGVFCDILRLSSYLGAPS

SEQ ID NO: 276779 - protein, 173 aa, Zea mays
  unsure (1)..(173): unsure at all Xaa locations
  Clone ID: MRT4577_184005C.1.pep
RTFSDVVAEAKKAGYTEPDPRDDLSGTDVARKVIILARESGLGLELSDIPVRSLVPEALKSCTSADEYMQKLPSFDEDWARERKNAEAAGEVLRYVGVVDVVNKKGXQVELRAYKRDHPFAQLSGSDNIIAFTTSRYKDQPLIVRGPGAGAEVTAGGVFCDILRLSSYLGAPS

SEQ ID NO: 276780 - protein, 279 aa, Zea mays
  unsure (1)..(279): unsure at all Xaa locations
  Clone ID: MRT4577_184006C.1.pep
VGEIVRLSFLKRKLFSSLVWQKIACDAYILSNLGFAEPSIFFGFAFLLHGSLQKRELGTLTQRWNLKTIGYMLVFCVPVFFVQALLVFVGPTFVKDENSAQGRRVFAKYFIQTSMPVGDTNVCTYPLFGTIFLGLIDAVLMSYVSYVGSRVLSLVINKALRKRVTWLIMSVLFFLPIRVLLLGFSVMPNPGDKAFEVIVFLSFVMMLSGTTVGILLLVYWPVHDSLALKDAGNREIAEMVPYDDYYYEGSSLVXXQSFREXERNSDTXTKRGFISFRTM

SEQ ID NO: 276781 - protein, 81 aa, Zea mays
  unsure (1)..(81): unsure at all Xaa locations
  Clone ID: MRT4577_184007C.1.pep
IRAQQLLXFLLPVTNQVAGANFYPYSQQQHYLSFNQLTTLNRAAYSHXQLFPFTHLATAYXSNINILPVTNWLVLHPAAYL

SEQ ID NO: 276782 - protein, 47 aa, Zea mays
  unsure (1)..(47): unsure at all Xaa locations
  Clone ID: MRT4577_184008C.1.pep
NLMLSSIFELTLHMLISMLLVLIHYQIAPQXCISWVSCSHWWLIYSF

SEQ ID NO: 276783 - protein, 79 aa, Zea mays
  unsure (1)..(79): unsure at all Xaa locations
  Clone ID: MRT4577_184009C.1.pep
MNDRSGSRAAVYERYSHFLSLIPVLYNWFANHNLVWPSLLCRWGPHFXKSSYKNHQXLYLSQPNXDGFFPNTPAYPIIF

SEQ ID NO: 276784 - protein, 57 aa, Zea mays
  Clone ID: MRT4577_18400C.1.pep
SDGERKHPFIHPGGQATNKGFSTPHRGWPAWQIHASRSVFAFAIEVCRFKSISKRFL

SEQ ID NO: 276785 - protein, 245 aa, Zea mays
  unsure (1)..(245): unsure at all Xaa locations
  Clone ID: MRT4577_184010C.1.pep
MAVASRLAVTRVSPADGGRPAAAAGRRSGLAVVRLPPTDSRGRRRRRCGAVAASPPTEEVVQMTEPLTKEDLVAYLVCGCKPKENWRIGTEHEKFGFEVDTLRPIKYDQIRDILNGLAERFDWEKIMEGNIVIGLKQGKQSISLEPGGQFELSGAPLETLHQTCAEVNSHLYQVKAVGEEMGIGFLGLGFHPKWALSDIPIIPQGRYLIWRNYMPKXSTLPLDMMFRTCFPWSNPDRCSAQYMLG

SEQ ID NO: 276786 - protein, 113 aa, Zea mays
  Clone ID: MRT4577_184011C.1.pep
RPGRDSPRTFTTDEHSPSHLICDTHGGATPSPHLLLRPARSNTPWRPHLCPLAAQALSPQAYTDARRLTISLRPVIVRNHRNEHHPRSHHMTIRRQNSLLNMSRKKGKVKWEG

SEQ ID NO: 276787 - protein, 53 aa, Zea mays
  unsure (1)..(53): unsure at all Xaa locations
  Clone ID: MRT4577_184012C.1.pep
KXHRPVLGGGTGGAAGAEPGRVGEKRGLGCWXETYFNSTPDPMNISPITQLWP

SEQ ID NO: 276788 - protein, 153 aa, Zea mays
  Clone ID: MRT4577_184013C.1.pep
VPVLHQKPCVLVGVLMQQSISSASGIVYSHISAYAEVHQLLVLSQSCIEALDCHGELFLASIWCLEITEPRPSICVYIKPMAAMVAATKYTTRMQQMFTTCRIHLWPGRFRSMRDGSPPRLVEKVSGASLSFSSVYELETRVSRNLELECVVV

SEQ ID NO: 276789 - protein, 66 aa, Zea mays
  Clone ID: MRT4577_184014C.1.pep
KRITYLSLPSPSLSLAPFPGQSRSWPLLKQPPSHHLSNDIHIPSPCNLCASRMLKLPVPKTSLHTP

SEQ ID NO: 276790 - protein, 128 aa, Zea mays
  unsure (1)..(128): unsure at all Xaa locations
  Clone ID: MRT4577_184015C.1.pep
KTTVTDEITTVLVKTYRDTTRAFXQIDSAPEKKAMGITIYTYYVPYDSTTGHYTHIHXTXHADYLKNIITAXTQMDXHIMLLAVTDGXRRXTVEQIQLSRNSCRPNIIWILNKCYMADDEXLIELIEI

SEQ ID NO: 276791 - protein, 67 aa, Zea mays
  Clone ID: MRT4577_184016C.1.pep
YSSFGTLQASVVSTLERMCVRKINRGPVGSHEFLVNEFVCKKSLHSFFPCTVRFLRRCDVKQCQLGC

SEQ ID NO: 276792 - protein, 81 aa, Zea mays
  Clone ID: MRT4577_184017C.1.pep
NTSALDKRQSDMQVQGTQRKQSENFEDNECMYQHQIASDYKASSCCLSVTKHYSSDSSTASTIIQMGMAKENRTHYCTRQT

SEQ ID NO: 276793 - protein, 192 aa, Zea mays
  Clone ID: MRT4577_184018C.1.pep
VIEDIPLKQSTFSDIEKFCPPHCILATNTSTISLNVIGKRTNSQDRIVGAHFFSPAHIMPLLEIVRTENTSAQAILDLITVGKIVKKVPVVVGNCTGFAVERAFFPYRQGSMFLVGLGVDVFRIDRVIRNFGMPIGPFQLQDVSGYGVGLTVKDICAAAFGERNFSSELMDLMVQNGRLGKSNGKGLYIYIE

SEQ ID NO: 276794 - protein, 106 aa, Zea mays
  Clone ID: MRT4577_184019C.1.pep
SYLLLILRVYDHSSNVVLNSNLHVQVCSSPHISLMPRNWVILWNCLMIVPSVLIIGQLRAAPKESHIWSLSPFFRNKLVENHLQQVPKTFGIANPILSTTHIFVEC

SEQ ID NO: 276795 - protein, 65 aa, Zea mays
  Clone ID: MRT4577_18401C.1.pep
QYFFPAPICRFMGGSVFCGDILLMKQVSTPKTVPQCPPLWAPFCFFFSIRCGVYKEPPRGFPPFF

SEQ ID NO: 276796 - protein, 61 aa, Zea mays
  Clone ID: MRT4577_184020C.1.pep
MLVYQDLLSGDELLSDSFTYKELENGVLWEVEGKRSTQGPVGVEIAGCLSGQRSLSDTLPC

SEQ ID NO: 276797 - protein, 46 aa, Zea mays
  Clone ID: MRT4577_184021C.1.pep
FHQERSIIIEGDRNSSFLSRLSHPRRDNEPIEAYIYIIGRSQPSSL

SEQ ID NO: 276798 - protein, 88 aa, Zea mays
  Clone ID: MRT4577_184022C.1.pep
FFFFFFIFLFFFFFLVHALICLFSFFSLPLKGKILREHAPIFFLRDHNRGNFFSFLPNFPKEPRRVSPHFSFQKTKRKPKPTGSFPYG

SEQ ID NO: 276799 - protein, 111 aa, Zea mays
  unsure (1)..(111): unsure at all Xaa locations
  Clone ID: MRT4577_184023C.1.pep
WFPLLGFAGIAWRPFRLMPSVVRLVLFCSCVRSFFVGGLLGCLVPPFRSRFSCSLFYCKKSAGCRFCRXGSCGRKSLPAPGVVLLLLLASVWVVSSSSILRVYSSQVCPPF

SEQ ID NO: 276800 - protein, 64 aa, Zea mays
  Clone ID: MRT4577_184024C.1.pep
GMTRATPCFQPLHNGESPLGPFFTSTKNEGGNCTGALKRILLGKKEINPTAFHKRRECHSQRAL

SEQ ID NO: 276801 - protein, 100 aa, Zea mays
  Clone ID: MRT4577_184025C.1.pep
MLTRAKIREIFMPALSSTMTEGNIVSCSDAEGDHVSKGDAVEVVESDKPDKDAETFHDRLMLADLAQTAQPETKSAAITLLAQPDETDSLALAKVHKLSN

SEQ ID NO: 276802 - protein, 84 aa, Zea mays
  unsure (1)..(84): unsure at all Xaa locations
  Clone ID: MRT4577_184026C.1.pep
GDPLFLINYNYXELLYTLQTTLSNGGFFYSTNLLALNFAAYLQQQLPFIQLAVDYLQLFLSFNQLEVIYLFILFTSATASTIQS

SEQ ID NO: 276803 - protein, 70 aa, Zea mays
  Clone ID: MRT4577_184027C.1.pep
STSMCLTAHVLVHAVPTYQLKYCHLLVLSYSMGPVDAYHCFAVQACEAQAHDVVGISGSKVRVILILSVT

SEQ ID NO: 276804 - protein, 84 aa, Zea mays
  unsure (1)..(84): unsure at all Xaa locations
  Clone ID: MRT4577_184028C.1.pep
HGLGHPXNXXXSXIFXNNYLPXKIXGLIFFFFHTPLHKQLNLTIFITSKNIEIYIEFKYFDFHSKPTSSIFTDIAPSSTHLKSS

SEQ ID NO: 276805 - protein, 66 aa, Zea mays
  Clone ID: MRT4577_184029C.1.pep
PPAIRSCRRARERVRDRDRAPRGGRPTAGRRMRRRAGPAPPAGVVGWSRPCRAALSWLSLSLTPSI

SEQ ID NO: 276806 - protein, 63 aa, Zea mays
  Clone ID: MRT4577_18402C.1.pep
TLTARSLIDPRPNTSTSRIQKRPTVPLLDPYAANRCSSSASCQICAQTVTLIWDHHSVDSRVC

SEQ ID NO: 276807 - protein, 123 aa, Zea mays
  unsure (1)..(123): unsure at all Xaa locations
  Clone ID: MRT4577_184030C.1.pep
VRIIILIIYVPCSKCSCFXGNLLRREPLKLVDGGQSQRTFVYIKDAIEAVVLMIENPARANGHIFNVGNPNNEVTVRELAQMMTEVCHILLTLTGVLVTCFYCKSSIVILSRGSSIFATDKRV

SEQ ID NO: 276808 - protein, 83 aa, Zea mays
  Clone ID: MRT4577_184031C.1.pep
VDPTRVFVLVKSGELEGSIPHELQDRLRVGAPHLLREPAKRRLLLVGTRALLVARLGALMDAPVGSHMHTSACTHLCARCLSG

SEQ ID NO: 276809 - protein, 96 aa, Zea mays
  Clone ID: MRT4577_184032C.1.pep
GGGRVHSSIWRHRCRGCRQASQVRVSHGGYHPHHASDRLLASLAAGGSPPVVLDNSLTLRARMASVAQRCGGEAVVEQSTRLLGAWLDGLRIGSAA

SEQ ID NO: 276810 - protein, 95 aa, Zea mays
  Clone ID: MRT4577_184033C.1.pep
MRLNSCCQLQKENPARANGHIFNVGNPNNEVTVRELAQMMTEVCHILLTLTGVLVTCFYCKSSIVILSRGSSIFATDKRVGEYYLYSKGDVCQID

SEQ ID NO: 276811 - protein, 201 aa, Zea mays
  unsure (1)..(201): unsure at all Xaa locations
  Clone ID: MRT4577_184034C.1.pep
IPPEGGENFNAPRNSRRDFPAQASRGRRDREVASQNNVLGKRQDVRLXGVNKFSELQPIVTAAKGAVRHKDYKEPLPRTVFXPGELKSWSFYRAGIAEVVSTFLFLYIIILTAMSVSNFSSICATVPIQGIAWPFGGMIFSFVYCTAFISGGHIHPAVTFGMVLARKLSLTMALFYIIMRCLGAICGALLEKAFHYGLYMG

SEQ ID NO: 276812 - protein, 121 aa, Zea mays
  Clone ID: MRT4577_184035C.1.pep
GRPFFFFLKRNEHFYPIRTYPRQKSRDTTRIITALRQQERTPALPTSAADRPDRVIAVQRRGVFVFRLQVLRAQQTIEAARNLRPAPQRITPCGSATPRCRPSPCPSRARSGGRAAARGRA

SEQ ID NO: 276813 - protein, 74 aa, Zea mays
  Clone ID: MRT4577_184036C.1.pep
ILLSLASGNWFVPSYMRPAIFNSTLNEVSEAGTQAQTTVQIDEEPGSDEDDDLPPLEANTNMNRPYELISQRNN

SEQ ID NO: 276814 - protein, 129 aa, Zea mays
  Clone ID: MRT4577_184037C.1.pep
GFGRTTFPDEFYMYSLADSPWTDTSATAGGMGGRVQSPVSLTPSPPPRPWQVGMTSSPVWPSPSRRVWRWRESDGRLHTPDVVAAAAEPVASVWHVVRRVGRCEHGGERREQSRTRGSTRRTSRMAMLD

SEQ ID NO: 276815 - protein, 80 aa, Zea mays
  unsure (1)..(80): unsure at all Xaa locations
  Clone ID: MRT4577_184038C.1.pep
ANLNHRPDTGEMLGVHIAGLHAAELIHEGSNAIALGTRVQHVRXFVLHAQATLTEVMDGLFKAAKVNSGDSHSVHEPVAA

SEQ ID NO: 276816 - protein, 102 aa, Zea mays
  Clone ID: MRT4577_184039C.1.pep
RLLEAGISIWAATHVLPGVSAPLCVSRSYLRAAQKMYVHNRPRLPPINVILGWAGIRDVRWMVVQLFRFAVSINEAWVGWGCIKTISGMFHYANQPLVVFFW

SEQ ID NO: 276817 - protein, 71 aa, Zea mays
  unsure (1)..(71): unsure at all Xaa locations
  Clone ID: MRT4577_18403C.1.pep
VGKSTFSAQLSFALAEMDHHVGLLDIDICGPNNPKMASLXEQKIIKRNLGGHPFKLNSNXGVKVNGFKLPK

SEQ ID NO: 276818 - protein, 69 aa, Zea mays
  Clone ID: MRT4577_184040C.1.pep
LFQRWLPSIYFVVFSSLNAMCPYKNVNIVCDTSWVLSRMVKELIPRHQILLTHCCMPITIPHVAVNAVE

SEQ ID NO: 276819 - protein, 93 aa, Zea mays
  Clone ID: MRT4577_184041C.1.pep
HPVFSRFQPCSLWHVFPRISRCPVFNGISPAASMCASVVRSIKPPFWWSVLNKARMATQLPSRNQPQSIMVRMKFLTNYQLRVNTSSTTARAE

SEQ ID NO: 276820 - protein, 31 aa, Zea mays
  Clone ID: MRT4577_184042C.1.pep
LRPEMLARDSYIIRPTGEQIVEAYHSTYGTH

SEQ ID NO: 276821 - protein, 75 aa, Zea mays
  unsure (1)..(75): unsure at all Xaa locations
  Clone ID: MRT4577_184043C.1.pep
GGSGDGESPASMTPAGVCFXQNHLHMLLPPLFLSPFHLFLMYTDFLFFFYLPYLLLCAIFFNPLFIYVTIHLSLN

SEQ ID NO: 276822 - protein, 39 aa, Zea mays
  Clone ID: MRT4577_184044C.1.pep
PWNQVFYPPLRGPFRKFVGKTYTAQICESAVSAYQANVP

SEQ ID NO: 276823 - protein, 137 aa, Zea mays
  unsure (1)..(137): unsure at all Xaa locations
  Clone ID: MRT4577_184045C.1.pep
PILWLCAYLVCXPCLYXRLPIRSHSAHCPWSKAXGLXEENLVIPALPRNDSSDPRSITSSRSIDIPSXPTCLRGATTXPQVIPQQGPLSHGRHTATNPRFMGGSRGDIPLDNTRCWNYTFSADVXGLFPLLSFQVHG

SEQ ID NO: 276824 - protein, 103 aa, Zea mays
  Clone ID: MRT4577_184046C.1.pep
PLPVGNAPRDLHHRLLHQIVPALTQQVGANPVAYLQQLFPFNQRVGSNFGGAPQQRHQLLNPLAGANPLVAPFRQQQQQLFPNTRFSLMNPPLQQPIVGGPPF

SEQ ID NO: 276825 - protein, 85 aa, Zea mays
  Clone ID: MRT4577_184047C.1.pep
AVERRARPLSTVSFHLLIWSGLSLRHLVVRVHILLFVGSLRIFASVRRRRRVLGGGRRDHVVGLLVVFDIVLFVIFIPHLTLRVF

SEQ ID NO: 276826 - protein, 39 aa, Zea mays
  Clone ID: MRT4577_184048C.1.pep
GAKWHNVTVSQSATTRPVRRRRKREAESGRDVVERSAPG

SEQ ID NO: 276827 - protein, 43 aa, Zea mays
  Clone ID: MRT4577_184049C.1.pep
TGTKGRYELRAPSTCLHMSNFLRSHSVTPYLQKNFYFFKKQQK

SEQ ID NO: 276828 - protein, 49 aa, Zea mays
  Clone ID: MRT4577_18404C.1.pep
GLLKKRTTKLPKAKRHTRVILTNSCLGTNIDLRLGIRRLVPQGGTYYYQ

SEQ ID NO: 276829 - protein, 137 aa, Zea mays
  Clone ID: MRT4577_184050C.1.pep
PRGSCSPREAKLRWPRPKKPPSWGRPRPSLWGISPGPWCPTCPGARGTCSTPGGPWGFPCWGPPPRKSWPGTPPCSLWTGWGGPPGTRLESGWSSCPGCPGLCTPRRSARGGSRPSAGVGVRFGAMDPPPPLRRRFL

SEQ ID NO: 276830 - protein, 260 aa, Zea mays
  Clone ID: MRT4577_184051C.1.pep
MEGSADSFGSLTAPLAWHDFLERMRQPSAAEFVKSIKSFIVTFSNRAPDPEKDSTAIQEFLENMEGAFRAHTPWAGSSEEELESAGEGLEKYVMTKLFNRVFASVPEDVKSDEELFEKMSLLQQFVRPENLDIKPEYQNETSWLLAQKELQKINMYKAPRDKLACILNCCKVINNLLLNASIVSNETPPGADEFLPVLIYVTIKANPPQLHSNLLYIQRYRRQRKEMLLHFCGDVAQGERRRQVTGNKDPRGMTALERRQ

SEQ ID NO: 276831 - protein, 47 aa, Zea mays
  Clone ID: MRT4577_184052C.1.pep
PLFFFFLSHKRITLAGRCTYTVQTSSTTHHSVITSDVTWHHFQSQKY

SEQ ID NO: 276832 - protein, 433 aa, Zea mays
  Clone ID: MRT4577_184053C.1.pep
NDVMLKRVAAFSKRLLQVALQRPPQYACGCLFILSEVLKAKPPLWGIVLQNESVDDGYEHFEDILEIPEDSSVASAVLHKHNEKVAAHEKHNLGAADGIDSVKQVKLVDENNVSIDSSRQHALYDPRHREPSYCNADRVSWWELTVLASHVHPSVSTMARTLLSGNNIVYSGDPLTDLSLPAFLDKFMEKKPKGNRIAEGRWHGGSQIAPAKKLNLNHHLIGEELLELAENEVPPEDIVFHRFYLNKTGTVKRKTKQKDSVLDEDAGELLADNDADEASDESGDEILDLGDGLADDGEYDYDDLDSNAFEEEKDLLRDDSDVEFDDVSDDTASGDEGSENDDDIPILAGDSDGNLSDDEMVDAGKSGVSYTKKRRAGKKSGLSPFASLDDYEHLMVGDADATTAKRKHMATGRAGGEKKPKLRSRKKRSRSSE

SEQ ID NO: 276833 - protein, 84 aa, Zea mays
  unsure (1)..(84): unsure at all Xaa locations
  Clone ID: MRT4577_184054C.1.pep
MAKCDTRDGXYMDWCLMFRGDGSPKDVNADVATIDTILTMHVVYCCATSFKYGIIYQPAYVTPDGNLVKVHRARRMMYNSTNDA

SEQ ID NO: 276834 - protein, 191 aa, Zea mays
  unsure (1)..(191): unsure at all Xaa locations
  Clone ID: MRT4577_184055C.1.pep
RRAANSGGKRPRQAAGASASSSPTFLFNRAIESLAACGSLADVREMFDAMPRRDGGSWNAIISTSSRAGHPAEAFSLFADMNSLGIRPKDVMLASVLACCAAECLDLRGAQQLQVILGTALVDVYGKCLSLTDAXRRAFDDIXNPNDVSWNIIIXRRYRLAGMGDMALQMFXMMVRAGVRPVVYTVAHAML

SEQ ID NO: 276835 - protein, 230 aa, Zea mays
  Clone ID: MRT4577_184056C.1.pep
PRAGRESRPRKARDNWPPAAGLLVAAYYGDIRRLKEIAKIIDIEGKGLQDTLANTHFLGMYALHATCDSGCMPALQYLVEDLKIDVNKADTMRGFTPVMHAVLYGNLPALRFLVDHGADLHHQHKGMSLLHSAAESGRPEIAKFLLSKGVRVDVESSVLTPLIIATFRGYPSIVKILLEHGADPNERLNDKVTPLSMALKHSSVPCLKLLVQAGANGDWVLDLIIPWQEL

SEQ ID NO: 276836 - protein, 44 aa, Zea mays
  Clone ID: MRT4577_184057C.1.pep
GRMNIAGLVVRSQTIDMNIVCEPIEISVENVLPVHEVVIHRPVK

SEQ ID NO: 276837 - protein, 85 aa, Zea mays
  Clone ID: MRT4577_184058C.1.pep
KSLRFQSFKIVLVWSIVERSLCFCTSARWRMVFYMIWFYIARLICHEGLAQVVLLQKNIYVLPGRLSSNHCQGPMSLKFFLIMST

SEQ ID NO: 276838 - protein, 114 aa, Zea mays
  unsure (1)..(114): unsure at all Xaa locations
  Clone ID: MRT4577_184059C.1.pep
VRRSRRPGSVWAVCMVSIPLLYILISGLXKKKKKKKKKKGKKKKKKGTKERKNESKKSEMHRARRQLNKKNYQWRRTRRGGPEAHWPYKDRDYPGSLAVVLKLIEWENPGGGQR

SEQ ID NO: 276839 - protein, 49 aa, Zea mays
  Clone ID: MRT4577_18405C.1.pep
VLGTYPSSDLVRRGGGEHRPRDRRLRIQRHADERRPSGGRRAPLRAGLR

SEQ ID NO: 276840 - protein, 39 aa, Zea mays
  Clone ID: MRT4577_184061C.1.pep
LYTLPPPLALLGHLLNCYKQTFTWGETIFYPTNIILPRP

SEQ ID NO: 276841 - protein, 55 aa, Zea mays
  Clone ID: MRT4577_184062C.1.pep
RCLPAKNTRVAGQSQHHMPVPRNYEPYLCNSHPLICHGRAFSVFIPLLMHAGRLV

SEQ ID NO: 276842 - protein, 81 aa, Zea mays
  Clone ID: MRT4577_184063C.1.pep
LPQSFTYGGFIPQSCAPGHSSLSDNTTKEEPSMTFTGFQGCTVSGNGMPSSTVPIDDIYGYRGPRSHRILRTPMPSYGNDI

SEQ ID NO: 276843 - protein, 205 aa, Zea mays
  Clone ID: MRT4577_184064C.1.pep
GTSRPAGSAPLSALSSRSKRRRPPSTASLLVCSSDQRAARRLRHSPALSQPRVSRSKVANAAVLLLSGLPAVSRSKRRRPLLLSAQLLSPAGSGAGPASRVQRPRLGGSLPDGQPPHAAVRDQPEKKLAALNTADHAAVREEACREKLAPSALQSPLLATATALLSTALLSTADHRPPAVHGMKIQRVAPLHEQCVLCLLRDVSK

SEQ ID NO: 276844 - protein, 154 aa, Zea mays
  unsure (1)..(154): unsure at all Xaa locations
  Clone ID: MRT4577_184065C.1.pep
SIISFFICLVAHNRCWRADHLAKRGLNYXEKCLLCDQXQKXWDHLLVVCSFSRIFWYQFLQXNLGSLAPXRLPPPFLSWWEEVLDVVSGLTKXGLDSLIIMGAWIIWIHRNRCVFDGMSPSLTSILALADEERSRWETAGAKGICSLAASLAVP

SEQ ID NO: 276845 - protein, 200 aa, Zea mays
  Clone ID: MRT4577_184066C.1.pep
IVDFCVEAKKKKKKKKKKKKKKKKKKKKKKKKKKKKKKKKKKKKKKKKKKKKKKKKKKKKKKKKKKKKKKKFWGAKKDPPGPPPLGGKKTPLGGSKKGWRGRRTPPPPPPRGKREKTGPRGPPPGGGGGDPPPPGREERGPPPQKGGKFPSFPKRGKQGKKGAPGFLIFLKKKKTGEGPLMGARLKILKVWGKPRGALPQ

SEQ ID NO: 276846 - protein, 84 aa, Zea mays
  Clone ID: MRT4577_184067C.1.pep
CQSALNIVFFFPQVLPGNRRGGQGYRPQGQKSNDPMNQGRHDSVGRYRNSSWYSSGSRYQSAPTQASGNISERGQAHSAGTNGT

SEQ ID NO: 276847 - protein, 57 aa, Zea mays
  Clone ID: MRT4577_184068C.1.pep
VLVPVHDLFGLYMPIGFRRVKHKKFCQTNAPSPLHKQRTNTVPCRGCLCPCLLIVIR

SEQ ID NO: 276848 - protein, 142 aa, Zea mays
  unsure (1)..(142): unsure at all Xaa locations
  Clone ID: MRT4577_184069C.1.pep
SQHLQPQRAAGHPPIPHPHAPDPSPRCAIGAVTSPDVSPGXPPPRHPPPVSSXHGIRASPDPPRDLPPPRWPAPPPSSRRPPAHAPPPQTFGSWPPPSPPRHTGTSPVIYFLAGRMAGRSIWTAPLLRPSGAASPGWRSTCA

SEQ ID NO: 276849 - protein, 158 aa, Zea mays
  unsure (1)..(158): unsure at all Xaa locations
  Clone ID: MRT4577_18406C.1.pep
MTSAFQSLVRTSSVATSYLWAAAWQSSCHEDKHHHFCHHHXKDEEQPAGEYAYSETEVVTATGEGEYERDQKEEKEHKDKQHLGEDGAVAAGDFALYEKREARCVPERAHRDKITEDDAGAXTIATLSXRLHQHHLKTKDHQDGEDGRVENRDHHLLR

SEQ ID NO: 276850 - protein, 79 aa, Zea mays
  Clone ID: MRT4577_184070C.1.pep
RTCLPRVSCRTPAPPPRRTRLPPRAVSHASGTSVLRGSFGLVLLKVYEGCLSLSLCSVMSRRSCLVGPRTIQANWSWGS

SEQ ID NO: 276851 - protein, 168 aa, Zea mays
  unsure (1)..(168): unsure at all Xaa locations
  Clone ID: MRT4577_184071C.1.pep
QTKEDGTGWITPPPNGQTGGGGAGKQEAPQSPRGGGHKGGPGPHSPPRTGGPXLLTPGXLEAPPGPGFGSNXPGHTGGGGEKPGGPGGPKXGPGAGDGTGTPRAPAEXNPPTRCPPPKGAYGAGXTGGPFGPPKGGGGPFGAPKGPGKPGGAPKKKKKPWAKGGGVWF

SEQ ID NO: 276852 - protein, 53 aa, Zea mays
  Clone ID: MRT4577_184072C.1.pep
YTFQRNAHKYIELSFIACMITFNYTKFLPFYKLFNLQDNTFLYAIYSLFIAKQ

SEQ ID NO: 276853 - protein, 215 aa, Zea mays
  Clone ID: MRT4577_184073C.1.pep
MREWGQRGRRGAMPFVSECERRGGGSGSSSGSSLSARRGSDSRAGVLQWDEVEEIDGEVQSSYRGPFDTMDALQDALPNKRKGASKFYNGKTNSVADAAQPAKGTADPVNPSPKKRKGFLSFGFSWTKSWSRRGATSSSENFGKTLSAALTGMYSRGGGNEHRGCQDPAAHCLHLHRRSNTPGVSASPSGPGAHRPQLISVQSVSVVGACICTQA

SEQ ID NO: 276854 - protein, 47 aa, Zea mays
  Clone ID: MRT4577_184074C.1.pep
CFFNARAVILPKSRSVHPTLWLIFNHTRSISCCTNSYTYSYTHTHHF

SEQ ID NO: 276855 - protein, 95 aa, Zea mays
  Clone ID: MRT4577_184075C.1.pep
PNFFLMRSNSQWKPPFLKKIGTGLTIENPPRKTLTLKRPKWFFFLTPRKKPWRLETKFEIPFGPPPFFFFNPPFKTTGLFFEPRTPNQIFYLGPI

SEQ ID NO: 276856 - protein, 38 aa, Zea mays
  unsure (1)..(38): unsure at all Xaa locations
  Clone ID: MRT4577_184076C.1.pep
PTGVPARHPPLPPWSAVGTSPLSRGQPPPACCLARPXM

SEQ ID NO: 276857 - protein, 129 aa, Zea mays
  Clone ID: MRT4577_184077C.1.pep
TREQGSFEWFHGIMDEVAETDKKGIIELHNHCTSVYKDGDLRSRVIAQLQMLNQAKHNIDVISGTRVKTHFARPDWPNVYKHIAENHQNQRVGVFYCGGGPEPLKTLRELAKDFSRKTNTKFEFHKENF

SEQ ID NO: 276858 - protein, 100 aa, Zea mays
  Clone ID: MRT4577_184078C.1.pep
GYLEAGRAHPARSSAQAYHGASNSTTPSLAIGGSPTPLGAPPRRMTSPSKPLPRSQCQDYPHLHPSPEDRPLDVGRPTDSPPTPSTSLINQEFTRISTRP

SEQ ID NO: 276859 - protein, 106 aa, Zea mays
  Clone ID: MRT4577_184079C.1.pep
LRSSIRHSKMHRTTRMHLQPFSTLLVQSLRHGRLSNRQHRETGERGAKKVGRNGIEQSRFGQQICSIHPLDELRLVVHFPQKYTNLDSPRAYALVTWSRSRREARN

SEQ ID NO: 276860 - protein, 86 aa, Zea mays
  unsure (1)..(86): unsure at all Xaa locations
  Clone ID: MRT4577_18407C.1.pep
MVLRLTYRKRDRCATKSNQTRVVXTPGGEFVYQDTNKRAVCSKXAMSGEKIHGMGSMXXTGCKRRRVVRYRLTVNRALWEGAVAIC

SEQ ID NO: 276861 - protein, 30 aa, Zea mays
  Clone ID: MRT4577_184080C.1.pep
VRGLGVLKEKPFSSLAKARAPEVLAVPSGP

SEQ ID NO: 276862 - protein, 100 aa, Zea mays
  Clone ID: MRT4577_184081C.1.pep
QRPWGENTLNALGGGRLAESPRAGRGGRTDGASHDVRPHYGGWDAACGGALCAAFLAAAVVVSPPFVSALVAGLLAPVLSVFPLFFGVACVVFPRGVLLG

SEQ ID NO: 276863 - protein, 86 aa, Zea mays
  Clone ID: MRT4577_184082C.1.pep
CHTHKTNQPTSRLTTVPRRAHRTDTQNDYGRVGAAPDHQLPRTGPGLPRRRRLCRCSSRRAPPRHERSPEYMARTLIDLRILARTP

SEQ ID NO: 276864 - protein, 214 aa, Zea mays
  Clone ID: MRT4577_184083C.1.pep
MSKGSNAYDFLAKVLIIGDSGVGKTCLLLRFCENNFTTSHLATIGIDFKMKTIEVDGKKVKVQIWDTAGQERFKTITQTYYKGAMGIILSYAVNDRESFQNIENWMKQIRQHASDDVCKILVGNKSDMPDRVVDTEEGRRLADSYGIKFFETSAKEDLNVNDAFHTIAREIKEKIVHRESDKATAGGSGFTGGNGTKLDSKGKTDGKKAGCCPN

SEQ ID NO: 276865 - protein, 48 aa, Zea mays
  unsure (1)..(48): unsure at all Xaa locations
  Clone ID: MRT4577_184084C.1.pep
MSCAAMTTRFMKYRMKRGLVFDGHGRICXHRKHPGGRGIAVGLHHHRI

SEQ ID NO: 276866 - protein, 111 aa, Zea mays
  Clone ID: MRT4577_184085C.1.pep
NFAGRSHSIMPLHSSLCAYNPPGPAAECALAPAPGPIVACVASRWAASRASPSLVSWAIWSSVFLFPRAMSFSRRPPFFGASCLSESSTSSGRRRALEGASRRVQSPSSHG

SEQ ID NO: 276867 - protein, 90 aa, Zea mays
  Clone ID: MRT4577_184086C.1.pep
KGPKRDHQGGKPWTMALFFMGPLAPRFSPPPFVGGGKSSIHFFSLHTNFSPEKKKTGSKFYFLKPKKPRKGQGAKQSKRSPPHRISSAHP

SEQ ID NO: 276868 - protein, 59 aa, Zea mays
  Clone ID: MRT4577_184087C.1.pep
QHACRGLYIGGYPGRCVCSCMLPKGFPSFISPVVKWSIWQVWVRVFFFYTLFSDSPIIK

SEQ ID NO: 276869 - protein, 94 aa, Zea mays
  Clone ID: MRT4577_184088C.1.pep
NRRIRLIRPRTTRRINHHYIFPSRRNSLQRVTERLFLQTPELRPLMVMRLRLGVGRETNMTLPSLSHITLLMSTPVVRISDRHQAHKQAHKSAQ

SEQ ID NO: 276870 - protein, 63 aa, Zea mays
  Clone ID: MRT4577_184089C.1.pep
ASTVSCIKILSPQEVQQMGKQGLELLSSAPAARRLGSSCDGYVSRQESRSLSTGIASVGSVEF

SEQ ID NO: 276871 - protein, 53 aa, Zea mays
  Clone ID: MRT4577_18408C.1.pep
KEASSYQHVICGCRCTVQQKFRPVPTIVALASRLEVGPAHCVPGLKNVRSTAW

SEQ ID NO: 276872 - protein, 165 aa, Zea mays
  Clone ID: MRT4577_184090C.1.pep
SWVPYNQKMRREPLPPIFHPQASPPTPSTVRHNHCLSIVSRLPACSHTSTHRLCHSRLCKDPTHQDQEAASHMRLRDRLHLTQALLQHINIDLAIFDVTCAVDATITVYFTHSIDALCPNLKLLRCLIPYIDRAESSLTSVMHTGDATDAIYALLTYLRSLCTAL

SEQ ID NO: 276873 - protein, 110 aa, Zea mays
  Clone ID: MRT4577_184091C.1.pep
GRKPGPPGATFFLGGEGWFLMSPNQGMLGPRAWPRGFPLNKLFYGATKFGVFFSPSPGPGGCPQKNCPPPLGLFPETGTNPQLEPPRLKKFWFPALLAQKKTRSAPAHFI

SEQ ID NO: 276874 - protein, 65 aa, Zea mays
  Clone ID: MRT4577_184092C.1.pep
LNTPLLLHTIKLIIYTKDHFHSPDINLHDDRLITHCADINDWRIARAVYSHQRPSPYQRCYYCSS

SEQ ID NO: 276875 - protein, 55 aa, Zea mays
  Clone ID: MRT4577_184093C.1.pep
HSLHVYFNPMHFSLNIYSIFHNTIPPHKNLWNHYDCYLSTYEDTTYDDNNTCIPP

SEQ ID NO: 276876 - protein, 65 aa, Zea mays
  unsure (1)..(65): unsure at all Xaa locations
  Clone ID: MRT4577_184094C.1.pep
XAVVTTQSTFFLFFFFFFFLRNKHGPVLFFKTALLTCNGRLLMPGSPPNLRYLVATSGLGGVSSA

SEQ ID NO: 276877 - protein, 375 aa, Zea mays
  Clone ID: MRT4577_184095C.1.pep
FCQVTHIPLGIHTHLIWRAPLGTSLPRGNGRIIDGSKIQTGESNTVDCIQAKDHSAGRTEIAACLRVAQVAQVRVAAAESSIQIVYLSVNDKVELDIKYADELGYIFNEAHGVVPVKIETNYPDVVSVLMPRDFNGTYDTRERFVLQARSHGTALVRLHTNNVPNKVDFIMVSVGAQIYPRDVILHSGQHLNFTVIGDSMDMCGHGHWLSSNGKIVHINRVTGEAQARSEGVAEVIFKGSNFKLQTTITVLKVNQIVVDAPAETLTNAAGLPDGYMFSVRFSDSIEHSIGSSASPINVPFECKVDPSFVGFVEPWTEHATKKSYCLFHPYSPAQLLPVKLDPNEGTLHILVRANLKEDPKVTGSAHALFVKGFYI

SEQ ID NO: 276878 - protein, 35 aa, Zea mays
  Clone ID: MRT4577_184096C.1.pep
SPPRTCPLTLGLVKSCRVMCVPHRSYLLYGISWRP

SEQ ID NO: 276879 - protein, 92 aa, Zea mays
  Clone ID: MRT4577_184097C.1.pep
VVLAFVGPLVSLSCVSRCTTCTHRRECAQHDARRSSHPRPADPRRMELTCRGARQRVEGNRAGADVQVLNQFLQCIESIWHELLDQFEFPFS

SEQ ID NO: 276880 - protein, 38 aa, Zea mays
  Clone ID: MRT4577_184098C.1.pep
SSKDTLAGGANVGSILDELICKTICIISMAIYQVPRLY

SEQ ID NO: 276881 - protein, 33 aa, Zea mays
  unsure (1)..(33): unsure at all Xaa locations
  Clone ID: MRT4577_184099C.1.pep
ADKQSDRVQVRLHPKVLKSAKSPLGXVQQRGDH

SEQ ID NO: 276882 - protein, 64 aa, Zea mays
  Clone ID: MRT4577_18409C.1.pep
PFHSWKGRLNLRVYILTTKGCTFYGVTTEGTFQAKAAGEHSKRGPLGSLALFSLLYRYLTRGPT

SEQ ID NO: 276883 - protein, 91 aa, Zea mays
  Clone ID: MRT4577_1840C.1.pep
MGLGSLEPTFETLVESFVFLDKNKDGYVSKSEMIQAINETIGGERSSGRIGMKRFEEMDWDKNGTVTFKEFLFAFTHWVGINNEEDEDEEE

SEQ ID NO: 276884 - protein, 77 aa, Zea mays
  Clone ID: MRT4577_184100C.1.pep
AAQRPRAPKAVSKGEALFYSDRHGADKSWDRRLPPPIRSVIDGNGGTGKTYISEEASNWRDRERNTIQPPVWYFIPW

SEQ ID NO: 276885 - protein, 79 aa, Zea mays
  Clone ID: MRT4577_184101C.1.pep
SPLCVSLSLFYHCSSFFRKYLMCWLFILNPFILAEIRGGGVDQGFWCGVSPLPLGPNRSCRVVFRHSPLRRGGWEEEAR

SEQ ID NO: 276886 - protein, 126 aa, Zea mays
  Clone ID: MRT4577_184102C.1.pep
HPIRRQTSPPLPRRHHPSQTPHLVTSTSGGSRGRRPTAPAAAPPPQRRPPNPSQGHRKPDLWTSTTSMIIFMKTARHKGAKELQKLSPRQFWKGCTETPRVDPRSCSIYTCWSWRSLAEPLVSSLL

SEQ ID NO: 276887 - protein, 94 aa, Zea mays
  Clone ID: MRT4577_184103C.1.pep
LWAVGSILGATQKVDMRYTRKMGVVRILVDVTDVNHISESAEIVVGEGLYEIFSKLIRFSKMGGGLIMILREIKMGMIRLKVRTKIILRSMILI

SEQ ID NO: 276888 - protein, 73 aa, Zea mays
  unsure (1)..(73): unsure at all Xaa locations
  Clone ID: MRT4577_184104C.1.pep
PPKKGMDKFDLFFXCPFCNPGGSFWCRIYIKNFFGEAFFRICQENFGPPVYAPPGPFYIKSEWIYGGGGVPPF

SEQ ID NO: 276889 - protein, 108 aa, Zea mays
  unsure (1)..(108): unsure at all Xaa locations
  Clone ID: MRT4577_184105C.1.pep
MDSTFSGDEXAXFFXFLGAAAALVFSCMGDAYGTDKSGVGVVSMGVMRPELVMKSIXPXVMVGVLGIYGLIIXIIISTXYQXQGQXLYXXFXXYXQLSXWRLRTWRCY

SEQ ID NO: 276890 - protein, 508 aa, Zea mays
  unsure (1)..(508): unsure at all Xaa locations
  Clone ID: MRT4577_184106C.1.pep
MELAVGGGMRRSASHTSLSESDDFELTRLLSKPRINVERQRSFDDRSLSDVSHSGGYSRGGFDGMYSPGGGLRSLVGTPASSGLHSFEPHPIVGDAWEALRRSLVLFRGQPLGTVAAVDHASEEVLNYDQVFVRDFVPSALAFLMNGEPDIVKNFLLKTLLLQGWERKVDRFKLGEGAMPASFKVMHDAKKGVETLHADFGESAIXGRGAPVGXSGFWWIILXLGAYTKTTGDLTLAETPECQKGMRLILSLCLSEGFDTFPTLLCADGCCMIDRRMGVYGYPIEIQALFFMALRCALQMLKHDNEGKEFVEKIATRLHALSYHMXRSYFWLDFQQLNDIYRYKTEEYSHTAVNKFNVIPDSIPDWLFDFMPCQGGFFVGNVSPARMDFRWFALGNMIAILSSLATPEQSNAIMDLIEERWEELIGEMPLKICYPAIENHEWRIVTGCDPXNTRWSYHNGGSWPVLLWLLTAACIKTGRXQIARRAIDLAERRLLKDGCPEYYDGKLG

SEQ ID NO: 276891 - protein, 559 aa, Zea mays
  unsure (1)..(559): unsure at all Xaa locations
  Clone ID: MRT4577_184107C.1.pep
MELAVGGGMRRSASHTSLSESDDFELTRLLSKPRINVERQRSFDDHSLSDVSHSGGYGRGGFDGMYSPGGGLRSLVGTPASSALHSFEPHPIVGDAWEALRRSLVFFRGQPLGTVAAVDHAVEEVLGNDAXLASGFCXDARKGVETLHADFGESAIGRVAPVXGCVVDHTRFKLGEGACXGSFKVMHDAXKGVETLMLXFGESALGGXAPVDFXFWWIILLRAYTKTTGDLTLAETPECQKGMRLILSLCLSEGFDTFPTLLCADGCCMIDRRMGVYGYPIEIQALFFMALRCALQMLKHDNEGKEFVEKIATRLHALSYHMRSYFWLDFQQLNDIYRYKTEEYSHTAVNKFNVIPDSIPDWLFDFMPCQGGFFIGNVSPARMDFRWFALGNMIAILSSLATPEQSVAIMDLIEERWEELIGEMPLKICYPAIENHEWRIVTGCDPKNTRWSYHNGGSWPVLLWLLTAACIKTGRPQIARRAIDLAERRLLKDGWPEYYDGKLGRYVGKQARKFQTWSIAGYLVAKMMLEDPSHLGMISLEEDRAMLKPVLKRSASWTN

SEQ ID NO: 276892 - protein, 74 aa, Zea mays
  Clone ID: MRT4577_184108C.1.pep
ELDTRAGSHQPSLSSRHGARGRGPLPRTACDDRGKWVLQTLLRPATGPSSLLPPPKTRGSTPLPLRTPRQLPLL

SEQ ID NO: 276893 - protein, 92 aa, Zea mays
  unsure (1)..(92): unsure at all Xaa locations
  Clone ID: MRT4577_184109C.1.pep
GAGVFCAIIKQPADNLVSFLNNAKGATLGDPVNKRGLWGLFTRRRRGRIVIIGTLTGAHWGIYHAFKLIVXLPTTGGVTPAPSAYAEFKATP

SEQ ID NO: 276894 - protein, 68 aa, Zea mays
  Clone ID: MRT4577_18410C.1.pep
KKKKFYKKKNLKKKKRRNQSKEKQNTKNRKSTTYNIISTQHTHITTVQKITTKGTPLNLPPSFQLPSP

SEQ ID NO: 276895 - protein, 255 aa, Zea mays
  Clone ID: MRT4577_184110C.1.pep
TRPAGTVDHASAIFWCTVLPIRHQRGRARQGRLSRHKSPSSFLPICSPPSTLSMEVESAMLASSLNPAPTLSASATTRFPASSTPNRRPGSLHGRRVCDSPISVEGVSSSPDRRPGSLHARDSLLSMEGESAMLTWIGYPAPALSMEGVSPIAASSLANRVRHGNTGEAVGSLVDAHHGETNGGKGKGYIFHPGRMLERVFKLCDPGECARSLVFRGFSAWVSLLWWGIGSLEAKFGEISLFSVSSTLTRHALDS

SEQ ID NO: 276896 - protein, 54 aa, Zea mays
  Clone ID: MRT4577_184111C.1.pep
SILISKNQWHLATGPVAASAAAAPVAAPAAAAVAILAAAAAALPPRHRSNEFEL

SEQ ID NO: 276897 - protein, 100 aa, Zea mays
  Clone ID: MRT4577_184112C.1.pep
HCCSCCTPYQRFTRGYCIGLVVIDCERRHRLAHPPLRTRGTSHSRGRLRLARALHRRHLVVRMPVPTAISYNLTLTLVVRNPNVGHSNTTFRSLEVYYLF

SEQ ID NO: 276898 - protein, 48 aa, Zea mays
  Clone ID: MRT4577_184113C.1.pep
RKGLSNSEGRCRILNALRFYTPEGISRLELFRLTKYTTCIIFLRQSNK

SEQ ID NO: 276899 - protein, 62 aa, Zea mays
  Clone ID: MRT4577_184114C.1.pep
DLASYISTSSDGPVYPQYYVDGCELIFIKAHVESLIGHQLVVVVAMISNLGALGCYLSSKYT

SEQ ID NO: 276900 - protein, 51 aa, Zea mays
  Clone ID: MRT4577_184115C.1.pep
LVRRRAGIFLKGTTQAREEGHEVADQNVSCRKLGVGLTLSHHGHTLFLRNA

SEQ ID NO: 276901 - protein, 103 aa, Zea mays
  unsure (1)..(103): unsure at all Xaa locations
  Clone ID: MRT4577_184116C.1.pep
RAVRVVDKSGDRIVYFGVEYIGIAHGHWGLSVCEAPFLYRALQNKFLATFPFPFTKRGLLIKFKLLGXGGSLMKFVRASAYXDILWIKKGPQRXPHPVPPAKI

SEQ ID NO: 276902 - protein, 52 aa, Zea mays
  Clone ID: MRT4577_184117C.1.pep
MVLVVASSWHMRGAGVQGAAAEGCVLASGFKERTRYSSPGPLLRRVPRGTQP

SEQ ID NO: 276903 - protein, 83 aa, Zea mays
  Clone ID: MRT4577_184118C.1.pep
RDFQPAPKPWSTAPSATRPPETKTQRQPPETCASAPKMWRPIRRGDIQGREIYASFGELLMLSRCPLPLLLASSLITNSFHSC

SEQ ID NO: 276904 - protein, 178 aa, Zea mays
  Clone ID: MRT4577_184119C.1.pep
MASNGHLDLNDEEDDTLDDIIDLPPPHASIIGGLHLHPVEAIIGPHEELTDFSARAIDVLQEIRFSNPTLAPKHPGCEKMNDPDMTNAFRACERQGMKRIMTMQYSWNVEVFAQFYATLWIKDVDEEVDDNGYPVMYFYLPGIWHRGCVHAPFIMKMIEVVTQVRYEKDVKHTLYILY

SEQ ID NO: 276905 - protein, 103 aa, Zea mays
  unsure (1)..(103): unsure at all Xaa locations
  Clone ID: MRT4577_18411C.1.pep
GLLFQVLXIPMLGGTTYHKVVDENLEKLKKALEVYEARLTKCKCLAGDLLSLPDLNHVCDTLCLLRTPYACELDAYKHVKDWWYVMMERPSFQKVDALMKLSA

SEQ ID NO: 276906 - protein, 54 aa, Zea mays
  Clone ID: MRT4577_184120C.1.pep
TRSTSRSTRTSMSISTRRRAPPLTTQTMTKSPITLRRRSFLEENIHCIMFSEEA

SEQ ID NO: 276907 - protein, 77 aa, Zea mays
  unsure (1)..(77): unsure at all Xaa locations
  Clone ID: MRT4577_184121C.1.pep
RDDQQSFLYTXSNCSTIDGEAAIYYRSSASFPSSSPNSEETSLKTEVADDGKIIGTEDEMETSYLGNDCVDEVKKLS

SEQ ID NO: 276908 - protein, 85 aa, Zea mays
  Clone ID: MRT4577_184122C.1.pep
AWDVISSCIGSPRFIAVAAVLDLRYVGKRLGLRPLNWLVESRLILGWRFSEHAGTDCAYPMMGAHLGGQWVRQRCDGTLSAALEL

SEQ ID NO: 276909 - protein, 61 aa, Zea mays
  Clone ID: MRT4577_184123C.1.pep
FLEESPGGGGVEAFSYYSSINVGGAPLTIVTQISSVISPLRNVTRVMVIELIISSLEKSLQ

SEQ ID NO: 276910 - protein, 64 aa, Zea mays
  unsure (1)..(64): unsure at all Xaa locations
  Clone ID: MRT4577_184124C.1.pep
SLSHLTSPEYKXYLKYFQSLVSESQRNTXYGITLHXYSVSHLNRKKKITSASSYHNHGHGHKYF

SEQ ID NO: 276911 - protein, 92 aa, Zea mays
  Clone ID: MRT4577_184125C.1.pep
LKPGAPQRKKIKKKKKKDPKKQKNTKYINPLKRGNCTLGVPMVIDVYCAKLGCAHKKKKGPRGPHTPTFLPFLRRELPPFSCNGLTGPLGEN

SEQ ID NO: 276912 - protein, 49 aa, Zea mays
  Clone ID: MRT4577_184126C.1.pep
ELKLFHYHLRMRIQVSVFARGIVIINQEMKRTLSFPSNKLSSSKKVALI

SEQ ID NO: 276913 - protein, 454 aa, Zea mays
  Clone ID: MRT4577_184127C.1.pep
MAPLTPRLVVPIDVKKQPWEQKVPLHNRWHPDIPPVADVTEGELFRVEMVDWTGGRVRDDNSADDIKSLDLTITHYLSGPLRIVDSEGVPASPGDLLAVEICNLGPLPGDEWGYTAIFERDNGGGFLTDHFPTARKAIWYFEGIYAYSPQIPGVRFPGLTHPGIVGTAPSAELLNIWNEREKRLAETSPQTLKLCEVLHQRPLANLPTPENCLLGKIQEGTAGWHKVANEAARTIPGRENGGNCDIKNLSRGSKVYLPVFVEGANLSTGDMHFSQGDGEVSFCGAIEMSGFLELKCEIIRGGMKEYLTPVGPTPLHVNPIFEIGPVEPRFSEWLVFEGISVDESGKQHFLDASVAYKRAVLNAIEYIARFGYSKEQVYLLLSCCPCEGRISGIVDSPNAVATIAIPTAIFDQDIKPKHLRGRPGPKLIRLPDLLSCSNNGHIPVTQDQSGTRAS

SEQ ID NO: 276914 - protein, 78 aa, Zea mays
  Clone ID: MRT4577_184128C.1.pep
IKPAKNLGPPFFFKKDKPWGAPWVFWGGPPVGGAIGAFFPQKILRGGAPKAPGSFRKNPLLTGVGFGTKGGAPRGGGP

SEQ ID NO: 276915 - protein, 77 aa, Zea mays
  Clone ID: MRT4577_184129C.1.pep
ECCSYNTHTYKVCNTYNGACLQHQPTVLWNSRYNINSGKYVLRNMNESRSFCMENVITPTLQLQALYIIHWFCTVLN

SEQ ID NO: 276916 - protein, 65 aa, Zea mays
  unsure (1)..(65): unsure at all Xaa locations
  Clone ID: MRT4577_18412C.1.pep
MSAYCGKYADXLIKNAAYIGTPGKGILAADDSTGTIGERLSSINGENVDENRRALRELRICCPGC

SEQ ID NO: 276917 - protein, 103 aa, Zea mays
  Clone ID: MRT4577_184130C.1.pep
ASVAYKRAVLNAIEYIARFGYSKEQVYLLLSCCPCEGRISGIVDSPNAVATIAIPTAIFDQDIKPKHLRGRPGPKLIRLPDLLSCSNNGHIPVTQDQSGTRAS

SEQ ID NO: 276918 - protein, 42 aa, Zea mays
  Clone ID: MRT4577_184131C.1.pep
KTWGGNCLGCGDYSGMSKQVSPRQFGQWHLFPENSQRRPDFS

SEQ ID NO: 276919 - protein, 462 aa, Zea mays
  Clone ID: MRT4577_184132C.1.pep
SKVSRDCVRLNFSHGTQEDHRKLFNLVKSLSVKYQHQVSIMCDIQGPKIRTGRMEKPFEIRAGEKIDVTPEDVLGTPQLIQIKYATMLKDLDAGDVIFINDGIIKLTVESKSEKALHCVCNAGGQISDRKGCNIPSGNISLDVVTPKDDKDLQLIAELNPEYVASSFIGTAEDVLKVKKVLAGYGNTNIKIISKIERPVALENIDAIIEVTDGLMVARGDLGVEIDTWDVPSAQKMLCQKANAAGKPVIVATQMLESMTQNSRPTRAEANDVYNAVLDGADAVMLSGETATGKYPIAAIQVMDKIVEAAEGHMPERLSTNFLSTKVGMTETIALSVYETAKNFTRIGRKCKIIVITYPPSAYTARMVSKFRPPADVITITSDLRIAREINLLWGVRSVHFPELSEENNMEVRNLTAIKKLIEVGLVQLDNYVICVSRSLFGKHTGACSNVYCLPVLKEEGLL

SEQ ID NO: 276920 - protein, 60 aa, Zea mays
  Clone ID: MRT4577_184133C.1.pep
GQPYQPPQGGFYWDDPLTKDTQLTLPTMIRLLHRLKRHRLQNPATTLASNSIVEWQHSPS

SEQ ID NO: 276921 - protein, 139 aa, Zea mays
  unsure (1)..(139): unsure at all Xaa locations
  Clone ID: MRT4577_184134C.1.pep
LRGAGRGGTQPKLFCSFYCSRRPSAPRGIGAWGSGGRXGTRQEQLICFFCGEDKGRGGGSCFVSPHTQKEIAKAAXQQSQANPALPQASGHPAHIAECVGNHPTASVAXSASRPAASWQQXPELPPERSCGRVTEGRPQ

SEQ ID NO: 276922 - protein, 48 aa, Zea mays
  Clone ID: MRT4577_184135C.1.pep
MTMIPLAGFTALSAAGLLLIFSSFLLRTQAGGASSSEEERYVPGRRVA

SEQ ID NO: 276923 - protein, 117 aa, Zea mays
  Clone ID: MRT4577_184136C.1.pep
SPDWPTLACQKGGEKKKEWNSGVFRLWACSLRLYSSWGCGFSSIFSLGISPAPVFCNCNNGFCRPAERARFSRWVLVAMSSQSELPCVFFHVGQGTALVLFVNPKPKLAAVVSSHAW

SEQ ID NO: 276924 - protein, 67 aa, Zea mays
  Clone ID: MRT4577_184137C.1.pep
MFICPIFRGMYGLLLTTPRWPVRKHCIKVFSSRLKGSPLLVAYESAVGWIPLQYRKFIGFKKLLSDC

SEQ ID NO: 276925 - protein, 88 aa, Zea mays
  Clone ID: MRT4577_184138C.1.pep
RWTTPGHEERPKGYLFNRPPPPAGETRKWEDWELPCYITSFLTVVILGVGLNAKPDLTIETWAHEKALERLKQQELAAVSGGGDADAE

SEQ ID NO: 276926 - protein, 212 aa, Zea mays
  Clone ID: MRT4577_184139C.1.pep
MADAAGATPLLPGLPDEIAIWEILVRLPLKSLLRSRAISPAWRRATSTRGFLLSHHARQPALPLQYTHSNVADGGESLDVVPFNHRAGVAAADRFQCVARLKTAPVLTSSCVRAPRFYLEASCDGLLVLSIEFDDICICNPATRQYAALQQVRGFRPVELYPHPSTGDYQLLLYQDEDQGAIYMFTVGSGQAPRHIGRPDPNELENCRGLLV

SEQ ID NO: 276927 - protein, 78 aa, Zea mays
  Clone ID: MRT4577_18413C.1.pep
SYNHSVLPYYRDAAPNAGTLLQLHHLLPYNSTWSATPMGGLPERSYGWRPSFRCMDRVMSAIVRGASCRLRLPINKKQ

SEQ ID NO: 276928 - protein, 120 aa, Zea mays
  Clone ID: MRT4577_184140C.1.pep
MRAISTAAGGMLRARLRSSSRVRGGGDGAGRWTTPGHEERPKGYLFNRPPPPAGETRKWEDWELPCYITSFLTVVILGVGLNAKPDLTIETWAHEKALERLKQQELAAVSGGGDADADAE

SEQ ID NO: 276929 - protein, 97 aa, Zea mays
  Clone ID: MRT4577_184141C.1.pep
TFPPPSFIDHVELAFAQEYRSHLPRLQDGPNKHPSKCNSYMCIFTSLFLDDVKLEFPQVLRSHFHWLLERRNNVTNKSNPHMNKRAGRRHVSVCNRE

SEQ ID NO: 276930 - protein, 268 aa, Zea mays
  Clone ID: MRT4577_184142C.1.pep
DGSMWWKEVGVERRPDGVVCKWTVIRGVSADGAVEWEDKYWEASDRFDHKELGSEKSGRDAAGNVWREYWKESMWQDYTCGVMHMEKNADKWGQNGKGEQWQEQWFEYYDSTGKTEKWADKWCSLDPNTPLDVGHAHVWHERWGEKYDGLGGSEKYTDKWAERSEGDGWSKWGDKWDEHFDLNGHGVKQGETWWAGKHGDRWNRTWGERHNGSGWVHKYGRSSSGEHWDTHAPQDTWYERFPHFGFYHCFENSPQLRSVKRQPPPPRK

SEQ ID NO: 276931 - protein, 89 aa, Zea mays
  Clone ID: MRT4577_184143C.1.pep
RLAVHNGLVQHSSFSYQSVRSTPMVSRTRSALGLGATSTMGFRVTSSRRLGGCGRSARRPSSGGSWRNRGLLVENMHRLGEREPSRTAQ

SEQ ID NO: 276932 - protein, 70 aa, Zea mays
  Clone ID: MRT4577_184144C.1.pep
PWALLLTRRITRLSSLPSSSAARRLVTESLVVARADATAVDVDSTGAVIAVTTPVITMIVGMTRADTISG

SEQ ID NO: 276933 - protein, 122 aa, Zea mays
  Clone ID: MRT4577_184145C.1.pep
RGGGEFLFFFFIFFLWWVVFFFFKKTGSITPWDTPGGATPFNFKRRGAYGDYIPLSLEPVDKLFLDEGFFPPLSALLKPKNLGSGLSFKKKICPDNSWETPPPPFRHKPPLFLRRKKMAFLF

SEQ ID NO: 276934 - protein, 70 aa, Zea mays
  Clone ID: MRT4577_184146C.1.pep
STAGHQAVSSKSLYARSFSQGWFRRHVLMFLLSMSWGILKMASLYFRGGFQLDCLPWMMSQNMLSVLYPH

SEQ ID NO: 276935 - protein, 134 aa, Zea mays
  Clone ID: MRT4577_184147C.1.pep
MTGGGKSGGKASGSKNAQSRSSKAGLAFPVGRVHRLLRKGNYAQRVGAGAPVYLAAVLEYLAAEILELAGNAARDNKKTRIIPRHLQLAIRNDEELNKLLGHVTIAQGGVLPNIHQNLLPKKTGKTGKTSSMEL

SEQ ID NO: 276936 - protein, 49 aa, Zea mays
  Clone ID: MRT4577_184148C.1.pep
GSASTGRSTYSMCTAVSCARGAACFKGSPAYGCCCEEQNDQNRGPGRVG

SEQ ID NO: 276937 - protein, 120 aa, Zea mays
  unsure (1)..(120): unsure at all Xaa locations
  Clone ID: MRT4577_184149C.1.pep
PVRLVPFAWVRLGLAGRLPWLSRLRRVCFRXSFLGGLSFVGVLPRCCRCGRCAGLPPLSLGGRLLRWWRPRPPPSPACRRSPLRLLAVCRACAGSRAGLRRALPPAVLGGAASPLCPAAP

SEQ ID NO: 276938 - protein, 209 aa, Zea mays
  unsure (1)..(209): unsure at all Xaa locations
  Clone ID: MRT4577_18414C.1.pep
PVRVHGPIPASLGNASHLTLLDFASNXFTGXIPSSLGNLTKLNYLRLEQNNLEAKDNEGWEFKDALGNCMWLQYLVLSDNQLQGAIPDSVGKLSNSSLQYLYFGKNNLSGAVPESMGNLIALNELVLGQNNLTGPIGSWVGKLNNLVKLYLSDNNFSGLIPSSIGSFTNITNLYLQNNXFEGPIPPSLGKLQHLQELNLXYNNLHXPIT

SEQ ID NO: 276939 - protein, 276 aa, Zea mays
  unsure (1)..(276): unsure at all Xaa locations
  Clone ID: MRT4577_184150C.1.pep
TSRPGXTGTPYMLYKDTCSRKSNQQNLGTIKSSNLCTEIIEFTSPTETAVCNLASIALPRFVREKGVPLESHPSKLVGSSDSKNRYFDFEKLAEVTSTVTYNLNKIIDINYYPVETAKRSNMRHRPIGIGVQGLADTFILLGMPFDSLEAHQLNKDICETIYYHALKSAAELAVKEGPYETYEGSPVSKGILQPDMWNVVPSTRWNWPSLMETISKAGIRNSLLVAPMPTAFTSHILGNNDGFEPYTFNINSRRVLSGEFVGVNKHLLNDLTEMGI

SEQ ID NO: 276940 - protein, 541 aa, Zea mays
  unsure (1)..(541): unsure at all Xaa locations
  Clone ID: MRT4577_184151C.1.pep
QPRCYVFNARYVYDQGGGKRXAFAVYLERWHADIFEFLDLRKNHGTEENRARDLFYALWVPDLFMQRVQNNGEWSLFCPNEAPGLADSWGEEFDNLYKKYESQGKAKKVVLAQTLWFDILKAQIETGTPYMLYKDTCNRKSNQQNLGTIKSSNLCTEIIEFTSPTETAVCNLASIALPRFVREKDVPLESHPSKLVGSSDSKNRYFDFEKLAEVTSTVTYNLNKIIDINYYPVETAKRSNMRHRPIGIGVQGLADTFILLGMPFDSPEAQQLNKDIFETIYYHALKASAELAAKEGPYETYEGSPVSKGILQPDMWDVVPSNRWNWPSLRETISKVGIRNSLLVAPMPTASTSQILGNNECFEPYTSNIYSRRVLSGEFVVVNKHLLHDLTEMGIWTPTLKNQIIYDDGSVQKIAEIPDDLKAIYKTVWEIKQKTLVDMAVDRGCYIDQSQSLNVHMEQANFGKLTSLHFHAWSKGLKTGMYYLRTRAAADAIKFTVDTTLLKENGNGVSDGKPAEEDVDAKMAQMVCSLNNREECLACGS

SEQ ID NO: 276941 - protein, 248 aa, Zea mays
  Clone ID: MRT4577_184152C.1.pep
MSLRRSSAAALAALLALAVLLGTSADDGGQGQPIVARVSKDASTSLYTIAIKVGGVPLLVDLAGPMLWLANCPTPHRIIPCVSHDCDDVSTTYRPPGCPKPNLRGDGPCACPAYPRNPVDGRCRSDDATTITLAANATDGQNPLYPVTFRAVGSCAPGELLESLPAGAAGVAGLSRLPLSLPTQFASLLKVANEFALCLPSGGDGVAVFGGGPFQLLAAPPVELAERLRENPLPLLKHPYNGGYYFGI

SEQ ID NO: 276942 - protein, 47 aa, Zea mays
  unsure (1)..(47): unsure at all Xaa locations
  Clone ID: MRT4577_184153C.1.pep
GLPLGGRCDLGLLLILFVPYCIVGGIPCVQECNLSIKSMVLVRQKXK

SEQ ID NO: 276943 - protein, 92 aa, Zea mays
  Clone ID: MRT4577_184154C.1.pep
IYNNSHQFLHKSFTNDIRTVMYFLCSQLRKFQPSSFVSLPFWACSRSCCFQPSSLLLTHRRSAFVHFFSRSLASSTSENIPEIHLLMPKQYV

SEQ ID NO: 276944 - protein, 88 aa, Zea mays
  Clone ID: MRT4577_184155C.1.pep
VLRCLTCLEMSKVSYTDIPFRSRHVMSITGMISISRFTYYSQALIWGNMSLVNRPFQCQLDDRLPLYLNVELVGRKEHMMQTGSSYRH

SEQ ID NO: 276945 - protein, 58 aa, Zea mays
  Clone ID: MRT4577_184156C.1.pep
GVRFFFIFFFFFLGPWAGLTHSNSDNPTGSHFGKRIQDEGGQHTHKWAFFYWYRKHGR

SEQ ID NO: 276946 - protein, 66 aa, Zea mays
  Clone ID: MRT4577_184157C.1.pep
SRRTSSSPSRPARAPLPHRRRRAGPGGALSPRTPGPSLSPSWPPSPLGRSRNRARLASSSSVADGR

SEQ ID NO: 276947 - protein, 46 aa, Zea mays
  Clone ID: MRT4577_184158C.1.pep
DKTRVGVVLNIHKFQNQNGVLGSSSKHQKRGGFFYILPPPHITRIT

SEQ ID NO: 276948 - protein, 1626 aa, Zea mays
  Clone ID: MRT4577_184159C.1.pep
MAAADVAVSLPALAGSLVVMTQEIARAFSPRTSQLVSEARRHPSRSRIQAGGSVAVKRWREVADTAPNKPSAQARHLVAAMEDVEKRLAEKFQQALDSSATTLMELSKKMDGIGVLASKLGEIESRQMESDKMVQYLQAKMDLSMKSLAQVSQEQTKLANMVTNAARGMASTSKSPAGDGLMGAHPIGPQVWQNVPPKQTLNVEGGFKRVEDLGNIGEVDSANKRVWLPKMDFPIFEGEDARVWIDHCEAYFALYSIPEEFKVSAAYLHLKGRAAHWFQSCRESVELFEWFQFRLAVLNEFEVSTHADKMLELLTLKQTGTALEYKIQFEKLVYHIRLFDKSISETFLVTQFVLGLKMELRACVEVQFPKSVSMAAQLALKHEAFQSRQGTGNKRFGLVKPAFVSHVNNRESSDLHGEVWKAKQLKEYRRVNGLCYKCGEKFVPGHKCKTAVQPQLNVIAIEEGGDGGPILDDEVLDYLETGIHQDGDEVTLSLNAMRGTDNSKCIKLRALINNQVILQLLDSGSSNTFVSNMTLARLHCELQQIEPVDVKVANGQVLRCTQKAIQLEWWSCGRTFHADAFVIPVAAYDMVLGMDWLEQYSPMLCAWDQKWVEFYYEGSIIRLQGEKDKRNKEILEVSGDQIQGWTKRNDIWAMALLQKVEVEEKKNAETVPPVVEDLLEQFSGVFKVPNSLPPYRDYDHAISLLPGSAPVNCRPYRYSPLQKDEIERQVKEMLQTGLITRSVSPFASPVLLVKKKDGSWRFCVDYRKLNDITVKNKFPMPIIDEFLDELVGATCFSKLDMASGFHQIRMAAGDEEKTAFKTHHGHFQFRVMPFGLTNAPATFQCLMNAIFQHCMRKFVLIFMDDILVYSSSLEQHVNHLQEVFSVLQKHQLYAKRSKCSFAVKHIEYLGHVISENGVSTDPSKTAVMQKWPIPTSHTDLRGFLGLTGYYRKFVQHYGILAKPLTMVLQQKQFVWPPAAQEAFEALKAAMATTPVLALPNFAETFVVETDACDKGVGAVLSQKGHPIAYYSKALGVQNSKLSIYEKEFLAILMAVDKWRCYLQRGLFIIKTDHKSLTHLQDQTLATELQKKAMAKLAGLQFKIQYKKGAENKVADALSRVAPNMELTAISVGTPVWIQEIVKSYELDVQSQNLLRELAVQSPNSQGFRLKDGLIYKNHQLMVGQNVGLQTKLIAAFHSSAVGGHSGIQATYQRIKRLFYWQGIKNDVETFVKQCQVCQRAKHEHCKYPGLLQPLPIPQNCWQDISMDFIEGLPKSSGYSVIMVVVDRLTKYAHFIPIKHPYTAHSIAHTFFSNVVKLHGLPKSIVSDRDKIFTSLFWQELFKLTGTQLHLSSAYHPQTDGQTERVNQCLEMFLRCAVHDTPSQWAKWLDSAELWYNSSYHTSLKCSPFKALYGVDPNVGMMPFEMGERENDASITFQNRHHYLEMIKAHLAAAQNKMKYYADQNRSFRQYQEGDMVYVKLQPFAQSSVAHRPCAKLSFKYFGPFQILSRIGSAAYKLNMPESAAVHPVFHVSQLKTHVPNNTPVYSQLPSAAFAEGVSPEPEVILDRRLVQKGAAAVVQVLIKWVGLPAEMSSWEDYTVLKDRFPDAIIWSPDAARGGENVMTQGA

SEQ ID NO: 276949 - protein, 92 aa, Zea mays
  Clone ID: MRT4577_18415C.1.pep
PRGFRWSHRRPPLQTPTLMLLSYVQQPPPVGTGSMVTSRSMLWAAPFVLQSVQPPLLGGAPAGRVVQEHRRGGWVRALVAKEAPQSVAVVSG

SEQ ID NO: 276950 - protein, 206 aa, Zea mays
  Clone ID: MRT4577_184160C.1.pep
MAFDCNKERGVSSPDSCSRICTEGTLVQANPLSHYWKPKRLENFNKLENQKSSYESAPSGSDPKQDAEASDEATASLCGFRCFTDLPASLVCEVLARLDAKDLGIVSCVSTLLHALATDHQGWKKLYCERWGLPDLPTTLNGPLLPGVPLDGKFWKTFFVEREFRSKSFMGRFNLDILRGHNEDVRAVSLLVSANLIFTGGRRQVS

SEQ ID NO: 276951 - protein, 98 aa, Zea mays
  Clone ID: MRT4577_184161C.1.pep
WVLGDSLVFISALASGMLLFLVLSCAPVTCYRGNIDQLCGGPCGYSVSPLNKKIRSPRLSGRLFTVRVEKKPVFVTTSTGSRFAKTKPRIKQNTNDSQ

SEQ ID NO: 276952 - protein, 152 aa, Zea mays
  Clone ID: MRT4577_184162C.1.pep
ERTRTAPTQQAKRPLPTPVVGLCYLPAPPLHLLFVPQPLRLFIPPHCTAPRPPSADVDAHAASAAFLPPHPISSLQARSPRGSLIKAVSAIGHHHIFFLRLFVLRHCCDPAPWTWGDRETEGRRLHPAASGQSPPSVPSSYWFCSYWFRVMW

SEQ ID NO: 276953 - protein, 139 aa, Zea mays
  Clone ID: MRT4577_184163C.1.pep
MGYSSSDSLEHHSNRYCTGLLHQHGHQCCDSMGLASTPKLSSISGAKTETSSMDASMRTSSSPEEVDRSGELTVSISNASDQEREWVEEDEPGVYITIRALPGGTRELRRVRFSREKFSERHARLWWEENRARIHEQYL

SEQ ID NO: 276954 - protein, 73 aa, Zea mays
  Clone ID: MRT4577_184164C.1.pep
PTKCARSVKDGAPLDTLCICSLQVVRDYQCRVVLVILVCTEGIIMQAPTLVARSGCCHKSTGVLSLEPNSELT

SEQ ID NO: 276955 - protein, 276 aa, Zea mays
  unsure (1)..(276): unsure at all Xaa locations
  Clone ID: MRT4577_184165C.1.pep
MTPEATGGCGGKDDDAKEWVAQVEPGVLITFVSLAEGGNDLKRIRFSREMFNKWEAQRWWAENYDKVMELYNVQKFNQTVPLPATPKSEDESSKEDSPVTPPLDKERLPRTFHRQGGGAMGSSSSDSLEHHSNHYCTGRHHHHHHHGHQCCDSMGLASTPKLSSISGAKTETSSMDASMRTSXRHPEEIDRSGELSVSVSNASDQEREWVEEDEPGVYITIRALPGGIRELRRVRFSREKXARCMPGCGGKRTERGYTNNTSEKRRPTPSAARAHE

SEQ ID NO: 276956 - protein, 83 aa, Zea mays
  Clone ID: MRT4577_184166C.1.pep
RDLLIRQIVEQTEGNDNLLAMMKDQYANYVVQKILETCNENQRELLVSRVKGHMQALRKYTYGKHIVSRVEQLCGDGTAEPDS

SEQ ID NO: 276957 - protein, 78 aa, Zea mays
  Clone ID: MRT4577_184167C.1.pep
EHAGTPGQPCQGPHASIEEVTYGKHIVSRVEQLCGDGKFHCRLALTPRFSLKLLGAVSRAHDQRLRICHRNHRAGFLK

SEQ ID NO: 276958 - protein, 51 aa, Zea mays
  Clone ID: MRT4577_184168C.1.pep
MELSHSRNLIEESIISQELICAGSISYKLKELKAFNGMFGHVATHHIYNFN

SEQ ID NO: 276959 - protein, 76 aa, Zea mays
  Clone ID: MRT4577_184169C.1.pep
FVTMNAPKIGLGIVETRVIRVCGLSHLRVEDHRVEDLGFPMVRRIIDARYVGISSILYSILSIKHRFWGYHEIKKH

SEQ ID NO: 276960 - protein, 173 aa, Zea mays
  Clone ID: MRT4577_18416C.1.pep
CSGVVITTRTLLCLRSSLSSMYLISMEDLAVANHSSLLSRHVGSKVRRYYHGDTCLTVTVAAEEAVESYLCNAPVNALVPRSFGHQPESHVGRQYRSHTSVSALGYHFCRDVHGRCTPFMMLLIRGEPTAVGENMGEAGGSWGTALSARRLARVRQTPVSSVISVPAGLEVPN

SEQ ID NO: 276961 - protein, 82 aa, Zea mays
  Clone ID: MRT4577_184170C.1.pep
SRVIRYMFWNQCSDDKLQTKHPFALYLYFFFAIAMRVKYIINVSPRHINKKKNEHTKKRNIKKHLEQKGKRPIAICTKNKKH

SEQ ID NO: 276962 - protein, 275 aa, Zea mays
  unsure (1)..(275): unsure at all Xaa locations
  Clone ID: MRT4577_184171C.1.pep
LSENLQXMEMQVKEMLGLVEEEGECSAEKAEVYCQERPVLVAHIKKFYCMYRALAERYDNVTGELRKNIPSSLQPHGSFGAPESDSETQSPPSTEQKPKTRSDCFDVSIGSGVSSDVSKKGSDGSSSSSESESELDESKEENGNSMFYALSQRIIELEVELHEARGKLDALEEKNTISEVSEHDEKLREDLEEVNSEKEALEAALLANKNETDVLKEAMASAAKQFEIELAHRDLELDKCKQELGELSAKYLHDKSALEAEIGMLQGVITNFEGE

SEQ ID NO: 276963 - protein, 133 aa, Zea mays
  Clone ID: MRT4577_184172C.1.pep
SDYATDYADALLDPGEPGCAIETTDDAITEHHLNDENRCGPASPPTLTEGGHLQHSNQNYHTNAFILHVVCLSKKYLTYLWSGYQKNSKLILGIPAVYQTCVEQDMYAIYNEGRFMVSIYHAVRSRDTSSPMG

SEQ ID NO: 276964 - protein, 73 aa, Zea mays
  Clone ID: MRT4577_184173C.1.pep
LYLLQSAEEPDRHHEGVARCPRSPGSRCERHLHAYKALQPLTATDDGSSTDATIPLPYTTATASGSAQVTAIS

SEQ ID NO: 276965 - protein, 62 aa, Zea mays
  Clone ID: MRT4577_184174C.1.pep
MASWFIEVLPTAPIEIFALARAFREDSFAEKVDLGIGAYRTDEGQPWVLPVVREAEISIAND

SEQ ID NO: 276966 - protein, 119 aa, Zea mays
  unsure (1)..(119): unsure at all Xaa locations
  Clone ID: MRT4577_184175C.1.pep
MTLPVPHDRNRLLQFPPDTHTELHEILGKVDEENVSAYTIAAAXKGEMRKTSTDNSFDMETIPAVHTIRTDALXPVMLSXRTMPSCILNIIDTPXCIECEYINEQVVDIIKRFLLRKTI

SEQ ID NO: 276967 - protein, 386 aa, Zea mays
  unsure (1)..(386): unsure at all Xaa locations
  Clone ID: MRT4577_184176C.1.pep
MAGWYEEAAGLLLRRSALAEMAVDVLLCAVPIWAAVMIGLFIGWAWRPRWTGLIFLGFRSRLRLLYVPPGLGARRLXVLXTALSACSVATKLISSAFRRCRGKHQDRASPDDDAAATRDGGCRADXQEGPIMYCSRTIFEDATPELVRDFFWDGDFRLKWDPMLAYCKSLDEFPQNGATIVHWIKKFPFFCSDREYIFGGRIWESGKTYYCVTKGVPYPSLPKKEKPRRVELYFSSWRIRAVQSPKHVGQQSACEVTLVHYEDMGIPKDVARVAVRHGMWGAVKKLQSGFRAYQQMRHTETTLSHSVIMARMTTKISITASNDPLDHDLSVADKISDENDSSNAVQHGFDWKWLVVGGAVAAVCVLNTGLVGKAVLLGAARRQAKK

SEQ ID NO: 276968 - protein, 49 aa, Zea mays
  Clone ID: MRT4577_184177C.1.pep
MPLLTTYLFKTDLHNLPEVHAFYNFQILFTTLSHPHHLIYYLSLKNIHS

SEQ ID NO: 276969 - protein, 438 aa, Zea mays
  Clone ID: MRT4577_184178C.1.pep
MAGWCEEAVALLQRPAAAEMAVDVLLCAVPIWAAVMIGLVVGWSWRPRWTGLLFLGLRTRLRIIWLPPGLGARRLWFACTALSACSVAPRLLSSAFRRCRGKQQDKASPEDTAAVARDGGGCADGRTNFEGEHDTVTEKDLELLLQLLDNKESGDTAWQNLMERTTSNMTYKAWRREPEEGPIMYCSRTIFEDATPELVRDFFWDGDFRLKWDPMLAYSKSLDEFPQNGATIVHWIKKFPFFCSDREYIFGGRIWESGKTYYCVTKGVPYPSLPKKEKPRRVELYFSSWRIRAVQSPKHVGQQSACEVTLVHYEDMGIPKDVARVAVRHGMWGAVKKLQSGFRAYQQMRDTENTLSHSAIMARMTTRVSITASNGGLDHDLSIADKISGENDSSHAVQHGFDWKWVVFGGAVAAVCVLNTGLVGKVLLLGAARRQAKK

SEQ ID NO: 276970 - protein, 105 aa, Zea mays
  Clone ID: MRT4577_184179C.1.pep
NLLDCPVCTGLYGELTTSAPTVGSMISAQSTGDAWPEPIVTRPHRTVRCAPDTVRCAKGTMAATVGFAKQGKKSCTVHVRWCTRLSDVPPNRRQELPNKWSSNGS

SEQ ID NO: 276971 - protein, 55 aa, Zea mays
  Clone ID: MRT4577_18417C.1.pep
YLEPAGCVAFSSDLRPDELPSAPISRYDTSDHFIPADGRRHLVVLVFAGALRGGG

SEQ ID NO: 276972 - protein, 202 aa, Zea mays
  unsure (1)..(202): unsure at all Xaa locations
  Clone ID: MRT4577_184180C.1.pep
DPSNWLTGPTPSCVKELRSFLGLAGYYRKFIRHFGVISQPLTSLLKKGIIFVWTPDHDVAFQTLKQALVTAPVLALPDFSTPFMIETDASDTGIGAVLMQRGHPLAFLSKTLGPKSRGLSTHEKEYMAILTAVQQWRPYLQQSEFVILTDHKSLSQLNEQRLHTSWQHXVFTKLLGLQYTIHLPQGTENRVADALSRRATTE

SEQ ID NO: 276973 - protein, 52 aa, Zea mays
  unsure (1)..(52): unsure at all Xaa locations
  Clone ID: MRT4577_184181C.1.pep
ISLQELSYLCQGFSAVGWENAQNLQGVHVPGLLASEDKRKSYSPVDLIGRXG

SEQ ID NO: 276974 - protein, 56 aa, Zea mays
  Clone ID: MRT4577_184182C.1.pep
ARYWSYAPHSPAGAAAVAARSYPTSSSGQLLRQMLMHQCSVAHRKRATTPSSTEIL

SEQ ID NO: 276975 - protein, 44 aa, Zea mays
  Clone ID: MRT4577_184183C.1.pep
EDIRVNCVVSGIINTDFSNVFHGNESLWKTFKAHHQLPRIGESE

SEQ ID NO: 276976 - protein, 114 aa, Zea mays
  Clone ID: MRT4577_184184C.1.pep
FCAWSWSLCAPSFVAVLLFPLGGLRPLRVRVPCAALFVLVVAGSGALLLVVVVGVCVCRRRSGSVGRRRGVLGGAVPSVLCPGRGCGGLARGLVAAPLGFAPRRGVGQWLGAVG

SEQ ID NO: 276977 - protein, 54 aa, Zea mays
  Clone ID: MRT4577_184185C.1.pep
WLTFHCLRVFETTGHFYGVTSILSNQCNLVFLSLAEYVSLLTSTMPFKCSLPTQ

SEQ ID NO: 276978 - protein, 208 aa, Zea mays
  unsure (1)..(208): unsure at all Xaa locations
  Clone ID: MRT4577_184186C.1.pep
MTVFHFLNCAVLTFGPHVVYYSATPLSEYDTIGTSVKAAVVYLGAALVKXESKLVVRASEGCMPLXLVCLATFLKVPDANDSFDPYQELMKILIGFIDVAGLYFALTQLTHRNISQNHKFQAVGLGWAFADSVLHRLAPLWIGARGLEFTWEYIFQGLEANANLVMTLSLAALGSLMWLRKNXPRTLIPIIYACALLLATMPSITSYL

SEQ ID NO: 276979 - protein, 228 aa, Zea mays
  Clone ID: MRT4577_184187C.1.pep
MTVFHFLNCAVLTFGPHVVYYSATPLSEYDTIGTSVKAAVVYLGAALVKLVCLATFLKVPDANDSFDPYQELMKILIGFIDVAGLYFALTQLTHRNISQNHKFQAVGLGWAFADSVLHRLAPLWIGARGLEFTWEYIFQGLEANANLVMTLSLAALGSLMWLRKNKPRTLIPIIYACALLLATMPSITSYLRRSLEWQTPKVVGFELFSSLVMAFISWQLFSACQRPM

SEQ ID NO: 276980 - protein, 72 aa, Zea mays
  Clone ID: MRT4577_184188C.1.pep
VILEHFPPPAFPQVLSFLLFTLIILSSIVYLFSRSSFPPLFLNFPFFLFTVKQKYLLMSLYNFFCLYYFYSP

SEQ ID NO: 276981 - protein, 233 aa, Zea mays
  unsure (1)..(233): unsure at all Xaa locations
  Clone ID: MRT4577_184189C.1.pep
MGEGAGDRVLSRLHSVRERIGDSLSAHPNELVAVFTRLKNLGKGMLQPHQIIAEYNNAIPEAEREKLKDGAFEDVLRAAQEAIVIPPWVALAIRPRPGVWEYVRVNVSELAVEELRVPEYLQFKEQLVEEGPNNNFVLELDFEPFNASFPRPSLSKSIGNGVQFLNRHLSSKLFHDKESMYPLXLNFLRAHNYKGMTMMLNDRIRSLSALQGALRKAEEHLSTLQADTPYSEF

SEQ ID NO: 276982 - protein, 46 aa, Zea mays
  Clone ID: MRT4577_18418C.1.pep
FMEPGRVEALSYEGAQSDSILNTTTRPDGNISIIWQLSLRINTSYR

SEQ ID NO: 276983 - protein, 145 aa, Zea mays
  unsure (1)..(145): unsure at all Xaa locations
  Clone ID: MRT4577_184190C.1.pep
CPPFPGGIPPEDLLIVGKTTPPPGEEKFPFGGPEFPELPVNFXKGLFKFLGQRGVTLSVSHFLPDFMGVKQAQGYLRGMIKLKDFVAQGGTPLCFGTLFWLTYPYHGFHPSRNPWVPPNWPPSPKKQKRGGLVFVSKFLFQRAKP

SEQ ID NO: 276984 - protein, 33 aa, Zea mays
  Clone ID: MRT4577_184191C.1.pep
WHGKPSRFKMTTKMNHVLSAPLRKNISEKISPQ

SEQ ID NO: 276985 - protein, 65 aa, Zea mays
  Clone ID: MRT4577_184192C.1.pep
KPGTCNMTPRSIMVCWLKSAPLTGHSHHSLYCWGDSRARQSHVVGSPSAFMQPPPFVGSPRRQRK

SEQ ID NO: 276986 - protein, 70 aa, Zea mays
  unsure (1)..(70): unsure at all Xaa locations
  Clone ID: MRT4577_184193C.1.pep
MAGKLTCLHSLRERLGATFFFHPNELIALFSRYVHQGKGMLHRXHQLLVVFDALFDCDKYKYAPFVDIFF

SEQ ID NO: 276987 - protein, 47 aa, Zea mays
  Clone ID: MRT4577_184194C.1.pep
CRWQLSPHPFACFPLVPLSKYPHECLMQVLHTAPPVHSCQYLMRNSS

SEQ ID NO: 276988 - protein, 65 aa, Zea mays
  Clone ID: MRT4577_184195C.1.pep
CTHLCCTRVYGWAESLAESSSSSGCLSTRASQSKLNLTVVVSSGYIYLVHRLFILLGVSVLPMEA

SEQ ID NO: 276989 - protein, 75 aa, Zea mays
  Clone ID: MRT4577_184196C.1.pep
GCKGSLSSRCSAFQLSQPSIHASVFIVHRMQPCSHQRRMTPMPQMPQLHSRRMTPTPHASTSYPDPSLLPTPLSH

SEQ ID NO: 276990 - protein, 131 aa, Zea mays
  unsure (1)..(131): unsure at all Xaa locations
  Clone ID: MRT4577_184197C.1.pep
RGSSCGCGXSCXCGGGVPGLXETSTAAQATVVLGVAPVKKAAPEFVVAAAVSGEAAHACGCGXXCLCERCXCCSSTALGLIIIYLACGGGWPLLCVAGLAALPCVVCACVGDTEFFSLLSLSLPVWRPSLC

SEQ ID NO: 276991 - protein, 82 aa, Zea mays
  Clone ID: MRT4577_184198C.1.pep
PKNPGTPPQSLPSYHIFILFTPFTIYFHIFFLYYIDKPLQSHTSYQPLTLNLKPYIPINLPNLHSFLYPHCPISHFKTCQSL

SEQ ID NO: 276992 - protein, 86 aa, Zea mays
  unsure (1)..(86): unsure at all Xaa locations
  Clone ID: MRT4577_184199C.1.pep
GKGSAELLLSTQREATNIYTGLCTIKALHAIIVEVHNNNMCLTGINESYDTQQPRVGHGRAQTAGHMXYGNAPNSGHRKNIGSLRA

SEQ ID NO: 276993 - protein, 52 aa, Zea mays
  Clone ID: MRT4577_18419C.1.pep
WRGCSWRCGVSGRPWSRVVRRLSSGSLHPTPPSRSGLPRCRTPEILTNPEPN

SEQ ID NO: 276994 - protein, 90 aa, Zea mays
  unsure (1)..(90): unsure at all Xaa locations
  Clone ID: MRT4577_1841C.1.pep
GSVSLRYIPVSFLQLIKSFTLATTVLLQSLLWSQHFEWRLCSSLVPLVXGGISLPSVTESTFHISGFCAAMVRRLATSTYTILAESLLPG

SEQ ID NO: 276995 - protein, 94 aa, Zea mays
  Clone ID: MRT4577_184200C.1.pep
ITNRFYIRLSSAPGGFWALTRWTACWLGTFCPVGPAKPFAFFQKVVKGLGGSVFLGTLFPLWWLIPGKGKKKKKKKKKKKKKKKKKKKKNLERG

SEQ ID NO: 276996 - protein, 116 aa, Zea mays
  Clone ID: MRT4577_184201C.1.pep
KAMHNTDGSLLFGSLYAHVQRGVTHSLLSCQRFLSVQYAYVTHMHGLLIMPHRLLTWVLAYLKALKAGVVASPPWTRPVTGGGYTGGMAKLSSFVSGGTSHTSGIKPSWLPTATTL

SEQ ID NO: 276997 - protein, 113 aa, Zea mays
  unsure (1)..(113): unsure at all Xaa locations
  Clone ID: MRT4577_184202C.1.pep
MTPTESLLLPVPALVSICDVRRLQLPPSGGHRPRPCWKGLECDSVQTLKVYSFVRSITRRRNVICAFLGAGRAPQPLLIEAVXLXVVGPTXLAEVARNLLKTFRAFQPTIIEI

SEQ ID NO: 276998 - protein, 62 aa, Zea mays
  Clone ID: MRT4577_184203C.1.pep
LLEQACPLFLDISLFYFSYYYFLLCLFLFNFSVIKAHSISQVTDPRSHTALGNPWYTLCILN

SEQ ID NO: 276999 - protein, 72 aa, Zea mays
  Clone ID: MRT4577_184204C.1.pep
YFAATLLISAPDYLAPETAINYDSLIAIFVPMLYAVFRCSICGLKSSTGGKSADLSCNLQVIQNHFERRQDR

SEQ ID NO: 277000 - protein, 31 aa, Zea mays
  Clone ID: MRT4577_184205C.1.pep
CMLHIVQHGCSVGCSITAFVACTINLRMCFV

SEQ ID NO: 277001 - protein, 133 aa, Zea mays
  unsure (1)..(133): unsure at all Xaa locations
  Clone ID: MRT4577_184206C.1.pep
MESQFSAAVPRFHGLRGYPAPRSPVGGLPSLRGGRKKSSSQGIRWEXIGSATNLIMGTTTTLMVFPGRFGLGPSANPKGKGGFKLEGRESRLQKGDPPGFTLPHTLAWGAVGHILGVGIGVGFKNTGAPHQII

SEQ ID NO: 277002 - protein, 68 aa, Zea mays
  Clone ID: MRT4577_184207C.1.pep
TRITTSLTTSSFCSPLSLPTLLFLCGEGHNPPLVRTSHLALDPHKKCVLITHKPIDHLERITISLLVL

SEQ ID NO: 277003 - protein, 69 aa, Zea mays
  unsure (1)..(69): unsure at all Xaa locations
  Clone ID: MRT4577_184208C.1.pep
MVSLKLQKPLAPSVLKCGKGKVWLEPXESGRTSLVTXRPTIRNWVKVGLLFRNPQKVHFRSRPGRAHEA

SEQ ID NO: 277004 - protein, 144 aa, Zea mays
  Clone ID: MRT4577_184209C.1.pep
MAASASTVSGLAGASLASRPAFSTSFTRGSRVSARNPLMSRNLERNGRITCMTFPRDWLRRDLSVIGFGLIGWMGPSSVPAINGNSLTGLFFSSIGQELAHFPTPPPVTSQFWLWLVTWHLGLFIVLTFGQIGFKGRTEDYFEK

SEQ ID NO: 277005 - protein, 100 aa, Zea mays
  Clone ID: MRT4577_18420C.1.pep
MCHHPGIVIDQDTIYFCIGVQQNDLVEIIGNDQSNRTIQSYVSYTGCRCQIMDAVKNHAEMNPINTIFDFKRIIGRRFSDAYAQSDIKHWPFKVISGPDD

SEQ ID NO: 277006 - protein, 113 aa, Zea mays
  Clone ID: MRT4577_184210C.1.pep
MAASASTVSGLAGASLASRPAFSTSFTRGSRVSARNPLMSRNLERNGRITCMTFPRDWLRRDLSVIGFGLIGWMGPSSVPAINGNSLTGLFFSSIGQELAHFPTPPPVTSQFW

SEQ ID NO: 277007 - protein, 90 aa, Zea mays
  unsure (1)..(90): unsure at all Xaa locations
  Clone ID: MRT4577_184211C.1.pep
MVHKPLIQHAHSRAEEVATSDIHGXLGRSYAIIGVVLVVVQAVYLMPSSSAIGSCSLCGGSMLQMLPRSTLGRPIPHHRVQMCLKXLSHC

SEQ ID NO: 277008 - protein, 144 aa, Zea mays; identical to SEQ ID NO: 277004
  Clone ID: MRT4577_184212C.1.pep

SEQ ID NO: 277009 - protein, 144 aa, Zea mays; identical to SEQ ID NO: 277004
  Clone ID: MRT4577_184213C.1.pep

SEQ ID NO: 277010 - protein, 121 aa, Zea mays
  unsure (1)..(121): unsure at all Xaa locations
  Clone ID: MRT4577_184214C.1.pep
RTRGRVISAVLPXGAPTVDPLTHWLKNSLPLVALVALSVLPVCDSIVPXSLLAPQPVLGQGXSEHTFNAGTEQVNDLIHTLLLYLGYNELQHILVKLTYLSXEHVRLHVXGYILTVLSYND

SEQ ID NO: 277011 - protein, 103 aa, Zea mays
  Clone ID: MRT4577_184215C.1.pep
SLLILRTRSIARFPRDWLRRDLSVIGFGLIGWMGPSSVPAINGNSLTGLFFSSIGQELAHFPTPPPVTSQFWLWLVTWHLGLFIVLTFGQIGFKGRTEDYFEK

SEQ ID NO: 277012 - protein, 45 aa, Zea mays
  Clone ID: MRT4577_184216C.1.pep
QYLINYNKINSLIHTTVAFIKPLDDISRSISMRYKSTSCKPTDQI

SEQ ID NO: 277013 - protein, 144 aa, Zea mays; identical to SEQ ID NO: 277004
  Clone ID: MRT4577_184217C.1.pep

SEQ ID NO: 277014 - protein, 46 aa, Zea mays
  Clone ID: MRT4577_184218C.1.pep
EHRQGILPSMLTSTYGERKQLCQSVLSKSVVCWCAKFSSGGIDVHS

SEQ ID NO: 277015 - protein, 305 aa, Zea mays
  Clone ID: MRT4577_184219C.1.pep
MAMQAARRLASLKLQRRLLLPSQAESPSISIPTAAAAAAFLHSHATSFGYKQVREEDKSKLVGNVFSSVASSYDLMNDLMSVGLHRLWKDRLISKLNPFPGMKHLDVAGGTGDVAFRVLEIVKSVGHRAMQGTLTETEEGTHIYVCDINPNMLNVGKKRAAERGYSEEHCLSWIQGDAEALSFEDGSMDGYTIAFGIRNVTHIEKALSEAYRVLKQGGRFLCLELSHVDVPIFKEIYDVYSFSMVPAIGELVAGDRQSYQYLVESIRRFPNQEKFAQMIQEAGFQRVEYENLVGGVVAIHSGLKL

SEQ ID NO: 277016 - protein, 64 aa, Zea mays
  Clone ID: MRT4577_18421C.1.pep
PWESWRNSMDKAKVPCGSAFIPPKLHQRRARIYQATAASLLSPLARGQKFEEAAAITLTSLGSF

SEQ ID NO: 277017 - protein, 50 aa, Zea mays
  Clone ID: MRT4577_184220C.1.pep
KSTAASDHSLLTFYTRSPLCPLDAPDLFGLFLQVLLTNSNDAMSVLLTTL

SEQ ID NO: 277018 - protein, 59 aa, Zea mays
  Clone ID: MRT4577_184221C.1.pep
GDYNITRLLQLGYPKLKPLAFQSNAMTNCVNQRVPIMLGRFTISKLTFTSMQLNCFTTV

SEQ ID NO: 277019 - protein, 50 aa, Zea mays
  Clone ID: MRT4577_184222C.1.pep
IKVPLNFFFFENWKRPLNIFPIYINARAFLTGTIQILLLKEIIPFEHFLA

SEQ ID NO: 277020 - protein, 194 aa, Zea mays
  Clone ID: MRT4577_184223C.1.pep
MASAKWSETAMLVIDMQKDFVDPAMRSPMLVAGGEAVVPAVAGAVAVARERGIFVIWVVREHDPSGRDVELFRRHHYSGGKGPTVKGLKGAELADGLVIKEGEYKLVKTRFSAFFATHLDSVLKTAGIKNLVIVGVQTPNCIRQTVFDAIALDYEKVTVLIDATAAARPEIHLSNIRDMKNIGVDTPTLEEWRR

SEQ ID NO: 277021 - protein, 55 aa, Zea mays
  Clone ID: MRT4577_184224C.1.pep
HSLPERDNISLYDFFDLRCTHDCVIPRSSVNRPHRYRAHTPRYKISRRTIIVKIE

SEQ ID NO: 277022 - protein, 70 aa, Zea mays
  Clone ID: MRT4577_184225C.1.pep
RTDVTYYHHTFIFPPTTLSHRSGTQQVGSLPAVMTKTPHQKLLTRAQQPFDPLTHYLLCHLHLFNLIVPQ

SEQ ID NO: 277023 - protein, 159 aa, Zea mays
  Clone ID: MRT4577_184226C.1.pep
NKKKKKKKKKKKKKKKKKKKKKKKKKKKKKKKNKGKGKKKKKKIGGALFKGPNFTSPSFQRNTFFLGPPKSISLPVFFHRAWKTPGFPHFISFARHPLFPMWVITKRPPTIPLSKHFPTLIGIWTPPFSGPLTAGVLLFPPILTCTFASPLTPVPLGFF

SEQ ID NO: 277024 - protein, 126 aa, Zea mays
  unsure (1)..(126): unsure at all Xaa locations
  Clone ID: MRT4577_184227C.1.pep
FLGLPTRPPTLRIKLMKSYGFTIYHAKSLLQXGRGDRYKPDPSXVHRTKRXATVEVVLDLKTSLELTLPATLKDYIQKPLYDQLVIDRKWPVHVGDHRKYLHIMLGKLNPSSTEKDRDSLSWDTTV

SEQ ID NO: 277025 - protein, 66 aa, Zea mays
  Clone ID: MRT4577_184228C.1.pep
AAISEQKHDALPLAEAMVFRFKSLYYSGPLIRIRLLNKISSTLQLRVSKLGFYRPPPRRLFSLQRL

SEQ ID NO: 277026 - protein, 100 aa, Zea mays
  Clone ID: MRT4577_184229C.1.pep
SFHFFLFFICLFFWGWFFIFYIGNKNQNFIIEIPFFWAIPQKKKGLLQPPFSTFEKRGGIRGKFPILTNTLVGLKMNYQPPRRGSSTWEDEPGKLHHCPV

SEQ ID NO: 277027 - protein, 84 aa, Zea mays
  Clone ID: MRT4577_18422C.1.pep
CEILEAFELNAGVEDQHKWGLDQSSIYSSQSAYNRFFLQFSISGKKIMFGPLRRLNVVFVPFAWCHRLWRRAMRYASFPCRARG

SEQ ID NO: 277028 - protein, 224 aa, Zea mays
  unsure (1)..(224): unsure at all Xaa locations
  Clone ID: MRT4577_184230C.1.pep
RNIHSEIHYQHLITNGRQHIAILALLALXSSVATVTLIPQCSQHYLFPVTAVRICNTTXYQIPTVLTSRXSANTAYCTERRRICTRSQPTHLCSISANTHISVMXLFLQRIGAQQLQQQLLPTINQLVATNLAAYLQQQQFLPFNQLAGVNPAAYLLAQQLLPFNQLVRSPVVLITEKQKLPFHLQGAANIAVFLQQQQHXLPLYPLAEGNINAFLXQQQLLPF

SEQ ID NO: 277029 - protein, 77 aa, Zea mays
  Clone ID: MRT4577_184231C.1.pep
ASFHIVPSWPPLLPTNLTPCKLRLIQIHDLAPKKPVPQQCSTLSFHAILGIDLHRISVYEAVFEHNRCRPLCRLWPQ

SEQ ID NO: 277030 - protein, 71 aa, Zea mays
  Clone ID: MRT4577_184232C.1.pep
EHVSPGMMMLILLLLRIKTTFLKPCIVLVHVQYVGQPFLFELLKKNFSSMVKRFHVSPTFFDQCTNKQTFV

SEQ ID NO: 277031 - protein, 114 aa, Zea mays
  Clone ID: MRT4577_184233C.1.pep
MASEGWPLKRLAVGSLSGHELQPVHIYVNSRFQCPKKKKKKKKKKKKKKKKKKKKKKKKKKKKKKKKKKKKKKKKKKKKKKRGALFKGPIFTTPGWQIKTFFIGPPNYIHWPAF

SEQ ID NO: 277032 - protein, 156 aa, Zea mays
  unsure (1)..(156): unsure at all Xaa locations
  Clone ID: MRT4577_184234C.1.pep
FWEWVRHMXGLRHSTFHQHALDRASPSYSIDIDANPXAFGDFTTIQXAVNSLPDMNLVRGVIRVNPDTYTEKVSIXRCCAIITLEGXGPDRTIVQRGYTAYSSTGAXGXRTLMTIDSASFTVNAQYFLVRNITFYNTTPESRSGSTGNDVAWLRLY

SEQ ID NO: 277033 - protein, 63 aa, Zea mays
  unsure (1)..(63): unsure at all Xaa locations
  Clone ID: MRT4577_184235C.1.pep
NQCKNASGGXRISMGDRAIRAAPLALQRVAQCNTSWINDSIQYXQILNINVGVHTEYPMFVPV

SEQ ID NO: 277034 - protein, 122 aa, Zea mays
  unsure (1)..(122): unsure at all Xaa locations
  Clone ID: MRT4577_184236C.1.pep
XAXXXDPGDKGQADPSHXSKSXQGGXQXXEEKXTXKXXXERXXTXTGXXXGXXKXXXNGERRETRRXXEKXXAPKXRTXASTXPXAXEGEPXSKGATAATDRARGSRPPKPPEAKKRGKAAG

SEQ ID NO: 277035 - protein, 241 aa, Zea mays
  Clone ID: MRT4577_184237C.1.pep
MSCPINVEEAQRSRAITVADSAPGDATPAVTEISATGKRGIPVLVAPLHSQRECDGSRGRRASAEEMMSMGFQGFLLLEEKDDDDPVAQRKKWFKEMRGWLMVLATVAASVTYQAGLNPPGGFWQDGDRAGNPVLRDRHWSRYMIFYYLNATAFVTSLVILVLLMNERFYHTETKVVALMLTTFIDLISLIGAYIAGTTRFFSSCIYIIVITCVAFAGVIYFGRVMAEICTREKDALHAPT

SEQ ID NO: 277036 - protein, 235 aa, Zea mays
  unsure (1)..(235): unsure at all Xaa locations
  Clone ID: MRT4577_184238C.1.pep
MLSVRVAAAVARALPRRAGLVSKNALGSSFVGARNLHASNTRLQKTGTAEMSSILEERILGADTSVDLEETGRVLSIGDGIARVHGLRNVQAEEMVEFSSGLKGMSLNLEPDNVGVVVFGNDKLIKEGDVVKRTGAIVDVPVGEELLGRVVDALGNAIDGKGPIGSKTRRRVGLKAPGIIPRISVREPMQTGIKAVDSLVPIGRXQRELIIGDRQTGKTSIAIDTSSPXTXNDGT

SEQ ID NO: 277037 - protein, 574 aa, Zea mays
  unsure (1)..(574): unsure at all Xaa locations
  Clone ID: MRT4577_184239C.1.pep
MTGSAASLGLRSGSYGSLAAAVGGGRKAGAAAACRPLRGEKDRLQLLHRALRLGGRRRAGVLLLLAVVSAAVFSSLFAVVKDDSNSISIVNNYEVPNAIQKSVYPSTTRPLMMSGNQYSTSVVNKIELPNRLHLTYANFTHPCEGFSVPPPLVDKKRTGPRPCPVCYVSVDQAFALMPLQASPSPVVKNLNYVSEDGVTANLSNLGSGFGGHPSLEQRNKSFNINESMTVHCGFVRGKKPGQGTGFDIKDDDLLEMEQCRELVVASAIFGNYDMIQHPRNISEFSKANACFYMFVDEETEAYVKNSSSLYNNNKVGLWRLVVVRNLPYEDPRRTGKIPKLLLHRLFPNVRFSVWIDAKLQLVVDPYLLLERFLWRKNTTFAISRHYKRFDVFEEAEANKAAGKYDNASIDYQIEFYRNEGLTHYSPAKLPITSDVPEGCVIIREHIPITNLFTCLWFNEVDRFTSRDQISFSTVRDKIRARVGWMPEMFMDCERRNFVVQAYHRELLEQMIASGRMPPSGAVXGDRRSTISESPGRXSRKATPSKKPSVKRKKEKKSSSRRRLPKPVAGGLGAM

SEQ ID NO: 277038 - protein, 103 aa, Zea mays
  unsure (1)..(103): unsure at all Xaa locations
  Clone ID: MRT4577_18423C.1.pep
RPLTLFYSKRQKTPIDTLRVLLVDLALLALAGNANFTHTSGGCGCQPPXPVHLPPPVHLPPSVHCHLGHSTAPLRASLHASGARIARHASITPLAIQPPAASD

SEQ ID NO: 277039 - protein, 249 aa, Zea mays
  unsure (1)..(249): unsure at all Xaa locations
  Clone ID: MRT4577_184240C.1.pep
MWSHSKDLLEIEPLELRFPFETKKQISCSMQLTNRTDDYIGFKVKTTSPKKYCVRPNSGIVPPRSTSDVIVTMQAQKEAPPDMQCKDKFLVQSVVVAEGTLVKDITGDMFTKESANVVDEVKLKVVYIPPPKPPSPVHEESEEGSSPRPSLSDGINLNYQETQQRGNLMXLLFSAVKTHIDQKDYTSETSALISKLTEERNSAIQQNNKLREELDLTRREASKQNGGFSFVVVVAIALLGMLLGYIMKR

SEQ ID NO: 277040 - protein, 113 aa, Zea mays
  Clone ID: MRT4577_184241C.1.pep
KQHIALSLGAISKEERAQYTVTLLNSRTFDDVQLIEYSTNDYLPATGAKHATYLPQSLGGYSKKRLQREQCSIVERLTNWLMMQGHNNGMKVMAVPNMNHTLEIIHMLTDSNA

SEQ ID NO: 277041 - protein, 136 aa, Zea mays
  unsure (1)..(136): unsure at all Xaa locations
  Clone ID: MRT4577_184242C.1.pep
TENASGERQKRWHAAVVGPALGVXDXSATYYCVGVRMHDRVEIIANYQGNRATPSHAVLTDSERVIPDAAKXWDPSNPINTVYDAQRIIGRRDIDASVHNDNMLCCFEDIAEPGENPVIRSQHTGEDKRFASEEIY

SEQ ID NO: 277042 - protein, 75 aa, Zea mays
  Clone ID: MRT4577_184243C.1.pep
TRTDEHKTKFDAGTTIVIANHAATFLDSDHRMYIRLALAQNFRQYYIATASSRTRSSNSRATSNSVGKKGNSEGE

SEQ ID NO: 277043 - protein, 148 aa, Zea mays
  unsure (1)..(148): unsure at all Xaa locations
  Clone ID: MRT4577_184244C.1.pep
MGKTRGMGTXRKINTHRTNQRWPDQAYKXSHLRNEWKXPFAVSSHDKGIVLENIRIEAKQPNXSPIRKCARAQLAPNGKKIDAFVPNDGCLYYIEENDEVPTAGFGRKGHAVGHIPEVMLKDVKVSGVSLLALFKENKEKPRPYITFR

SEQ ID NO: 277044 - protein, 127 aa, Zea mays
  unsure (1)..(127): unsure at all Xaa locations
  Clone ID: MRT4577_184245C.1.pep
MAVFSDLHTADGLKSLEAHLAGKTYVSGDSITKDDIKVFAAVPSKPGAEFPNAARWYETGSAAVASKIPGKGCCVKLACGSSSAGTSSADEAXKINXYLDPFGDETEEDQKATXNRXAAKGFSKKKE

SEQ ID NO: 277045 - protein, 142 aa, Zea mays
  Clone ID: MRT4577_184246C.1.pep
TAQFQSQFPGGGLILIQFLAIGEKKNGGGSSKPPKGGPLGVHFGGPRQGNLGGVHVHLRGDPGVLEPAPVKPFPLAQFVVPPAGLLKELEHHARVAVLLGLRLGLHHARQGERQLGGVEAGWVQEKLALQRVGKKVTWGAGG

SEQ ID NO: 277046 - protein, 94 aa, Zea mays
  Clone ID: MRT4577_184247C.1.pep
MAVFSDLHTADGLKSLEAHLAGKTYVSGDSITKDDIKVFAAVPSKPGAEFPNAARWYKTVSAAVASKFLVKAVVVNLPAEPLLPELVLPIKPKI

SEQ ID NO: 277047 - protein, 97 aa, Zea mays
  unsure (1)..(97): unsure at all Xaa locations
  Clone ID: MRT4577_184248C.1.pep
PPIHSPALPRRPRSPAPAHPPDTSCSPILPIGVGDALPEGQLGWRDEKDQLHNVSVHDIDAGKKAILFRVPAAXYTPTCRNQHVPGCITQADQLPAK

SEQ ID NO: 277048 - protein, 43 aa, Zea mays
  Clone ID: MRT4577_184249C.1.pep
TNYLRPGIRRGGFSDQEDRLIVHLQALLGNRWAAIASYLPDRT

SEQ ID NO: 277049 - protein, 119 aa, Zea mays
  Clone ID: MRT4577_18424C.1.pep
RHHTPPTSSRTTHPSHRDRAAVTMMACFGVSAAGAPWRRGTWREAVRQVLVAPTPALAACYAWPGCAGRPPAMLRGYCPGQYSHDTRRLRHDPPTVRNHRGQEEIHCRLPMHAHLQRLA

SEQ ID NO: 277050 - protein, 98 aa, Zea mays
  Clone ID: MRT4577_184250C.1.pep
VFIYRSTVGSGQCRARSVEAHRANGPARHDFSLCVPGLGMSLGTWASPIRPEASTGHVWPGPIRTGPKRVQAGSVSGGPFGHLYTYVYFKLVIDLEMS

SEQ ID NO: 277051 - protein, 106 aa, Zea mays
  unsure (1)..(106): unsure at all Xaa locations
  Clone ID: MRT4577_184251C.1.pep
SENPSIAQLNSSFLRCLSLAARRTMTSLRLSCPNLHHVNADGXDHLQRAAXCSSGRVESLEVGPGPKLPGPHNEARNMSILAPKACGXXSKVRINWAGLTTRDASF

SEQ ID NO: 277052 - protein, 53 aa, Zea mays
  unsure (1)..(53): unsure at all Xaa locations
  Clone ID: MRT4577_184252C.1.pep
QTLQFKSNLKGRGGDSIXKGTYEQTVEGGLLSGGGGNTLFGQILLHEWGHKAT

SEQ ID NO: 277053 - protein, 169 aa, Zea mays
  unsure (1)..(169): unsure at all Xaa locations
  Clone ID: MRT4577_184253C.1.pep
EADEEQEKSEDDKDSDHNSDNPDGPDTSSFRAFMISFLSPSSSFNDSREIIPEQSEEMGYPTLTPVGKATKGKTGLLSRGKHSIGKIINKAARMSGFKQNSEPKTDKEVASHAESAAPALELEGPNEVNSLTNMPAMSEPSVLLSETMRSTLYSSLPYLXQGXSXVLLY

SEQ ID NO: 277054 - protein, 106 aa, Zea mays
  unsure (1)..(106): unsure at all Xaa locations
  Clone ID: MRT4577_184254C.1.pep
VVAGYKNGKPFLGYTDLLGSNFIDETMATGYGAYLAQHILRKFVDEKGGVDNXVXNAKDLLEKCIKVLYYIYAKSFNKMQLATVSDSGITISEPYSLPTECTFKGF

SEQ ID NO: 277055 - protein, 161 aa, Zea mays
  Clone ID: MRT4577_184255C.1.pep
MDTIEECGDGGRHLLLGLGTRILVGVPDNSRGCSELLSWAIGAVAKPSDSVVAVHVLGGRGRKRRLQKANAFVIYMLGEFVKACEAKQINLEAKVICSSNIGRALTQEAALTDGNILIVGRSRNAYHRSHFEIANYCFMHAPKNCSVIAVGRQGVHRVVLG

SEQ ID NO: 277056 - protein, 85 aa, Zea mays
  Clone ID: MRT4577_184256C.1.pep
AVPTATGVAAKPADGTQLAVRTVWVLRPHGTYVSTDPAIPAAGVLHAVPTEASERWPAPGKRTPSSTASCTLVETAQATSCRTTT

SEQ ID NO: 277057 - protein, 97 aa, Zea mays
  Clone ID: MRT4577_184257C.1.pep
SFAKLASIDPELKPAHNLLKILSLSEGPLFLADDVFPQTSFLPSAWLVLPALGVGTFINMLKCQRRQDAIRALEGLPPFSYCCYHQAADTDLAAGPH

SEQ ID NO: 277058 - protein, 68 aa, Zea mays
  unsure (1)..(68): unsure at all Xaa locations
  Clone ID: MRT4577_184258C.1.pep
GAQRVVLLLLHRADGRLRRSGSTPWWYEDGDXGDWMLVGDVPWEMFVSSCKRMRVMRSCEARGLSSNA

SEQ ID NO: 277059 - protein, 433 aa, Zea mays
  unsure (1)..(433): unsure at all Xaa locations
  Clone ID: MRT4577_184259C.1.pep
MAASARDSTDAAERVVDDHDGWASDAEMDVEMDVVEGDADRRDGGADGDDEYLLLTRIRDTSAAEARAGKDIQGIPWERIHIARQDYRKARLEQYKNYENFPQSGELMDKLCKQVEKSSKYYEFQHNTRSVKPSILHFQXSHWSSLSHKLSEVLDFSGHVAPAEKYPGSLLEGFSGVQVSTLAVNEGLVVAGGFQGELIGKDVEGCSVKFCMRTTLSDNAITNAIDIHRSMSGSLHITVSNNDCGVREYDMERYQLVNHYRYNWPVNHTSVSPDKKLLAVVGDDRDALLVDSRNGKVTSTLVGHLDYSFATAWHPDSRTFATGNQDKTCRIWDTRNLSTSLAVLRGNIGAIRCIRYSSDGRFLVFSEPADFVHVYSVAADYKKRQEIDFFGEVSGITLSPDDESLFIGVCDRVYASLLQYRMIRGFDYLDSYV

SEQ ID NO: 277060 - protein, 109 aa, Zea mays
  Clone ID: MRT4577_18425C.1.pep
TGTQPTQDTTRWIRGRNGAHARTDDRGPTFIAPLRTLYIAHVSGSPHLARPRDRHCLFLNGVRTTHTYTHTERRQSPFYHCYRKIQKCYRHGRDCKDYPSTRGTPIPWG

SEQ ID NO: 277061 - protein, 35 aa, Zea mays
  Clone ID: MRT4577_184260C.1.pep
YDDQGNYTSQMIKTNVHSALQQCRSGQFMIILKAC

SEQ ID NO: 277062 - protein, 73 aa, Zea mays
  Clone ID: MRT4577_184261C.1.pep
SSYALLQSNSCSRAVLASGITLSVSRGVRIGRGMGQGIIVCTLGRLGEGDQDVRSTVSVQAAPSIGIAQGGRR

SEQ ID NO: 277063 - protein, 453 aa, Zea mays
  Clone ID: MRT4577_184262C.1.pep
MAASARDSTDAAERVVDDHDGWASDAEMDVEMDVVEGDADRRDGGADGDDEYLLLTRIRDTSAAEARAGKDIQGIPWERIHIARQDYRKARLEQYKNYENFPQSGELMDKLCKQVEKSSKYYEFQHNTRSVKPSILHFQLRNLLWATSKHDVYFMSNSTVSHWSSLSHKLSEVLDFSGHVAPAEKYPGSLLEGFSGVQVSTLAVNEGLVVAGGFQGELIGKDVEGCSVKFCMRTTLSDNAITNAIDMHRSISGSLHITVSNNDCGVREYDMERYQLVNHYRYNWPVNHTSVSPDKKLLAVVGDDRDALLVDSRNGKVTSTLVGHLDYSFATAWHPDSRTFATGNQDKTCRIWDTRNLSTSLAVLRGNIGAIRCIRYSSDGRFLVFSEPADFVHVYSVAADYKKRQEIDFFGEVSGITLSPDDESLFIGVCDRVYASLLQYRMIRGFDYLDSYV

SEQ ID NO: 277064 - protein, 58 aa, Zea mays
  Clone ID: MRT4577_184263C.1.pep
VFNLKHLLICTFTLHTNDLLKYHLCIRFAVKSGGYRIADYVISADFKADTTYKTTLSI

SEQ ID NO: 277065 - protein, 190 aa, Zea mays
  unsure (1)..(190): unsure at all Xaa locations
  Clone ID: MRT4577_184264C.1.pep
MAASARDSADAAERVVDDHDGWASDGEMGMEMDVEGEFHDRDADRRDGGVDGDDEYLLLTRIRDTSAAEARAGKDIQGIPWERIHIARQDYRKARLEQYKNYENFPQSGELMDKLCKQVEKSSKYYEFQHNTRSVKPSILHFQLRNLLWATSRHDVYFMSNSTVTHWSSLSHXISEVLDFSGHVAPXEKH

SEQ ID NO: 277066 - protein, 453 aa, Zea mays
  Clone ID: MRT4577_184265C.1.pep
MAASARDSTDAAERVVDDHDGWASDAEMDVEMDVVEGDADRRDGGADGDDEYLLLTRIRDTSAAEARAGKDIQGIPWERIHIARQDYRKARLEQYKNYENFPQSGELMDKLCKQVEKSSKYYEFQHNTRSVKPSILHFQLRNLLWATSKHDVYFMSNSTVSHWSSLSHKLSEVLDFSGHVAPAEKYPGSLLEGFSGVQVSTLAVNEGLVVAGGFQGELIGKDVEGCSIKFCVRTTLSDNAITNAIDIHRSISGSLHITVSNNDCGVREYDMERYQLVNHYRYNWPVNHTSVSPDKKLLAVVGDDRDALLVDSRNGKVTSTLVGHLDYSFATAWHPDSRTFATGNQDKTCRIWDTRNLSTSLAVLRGNIGAIRCIRYSSDGRFLVFSEPADFVHVYSVAADYKKRQEIDFFGEVSGITLSPDDESLFIGVCDRVYASLLQYRMIRGFDYLDSYV

SEQ ID NO: 277067 - protein, 151 aa, Zea mays
  unsure (1)..(151): unsure at all Xaa locations
  Clone ID: MRT4577_184266C.1.pep
PQXPQGVQGASGNASGCGKHIQEEVQLQATQGQMRCSGTCHVIGSKQAKVCCTKSERGQCRGQTSRVAVPYCRRSPGTSHVEGSIRENVGAAVSEKNHILYRCGTCSCRRTTCRQSSDQTTIVDSSCTTSSQAHHMQKCRVFFFYLISLQS

SEQ ID NO: 277068 - protein, 78 aa, Zea mays
  Clone ID: MRT4577_184267C.1.pep
LPWLWRGNPPFFQLKSEKKCFPKGLLPRHSPGLSWLFLKRPRGFWVWSPPALSLSGVPFWPRDFLGFQVPPLSSFNYQ

SEQ ID NO: 277069 - protein, 79 aa, Zea mays
  unsure (1)..(79): unsure at all Xaa locations
  Clone ID: MRT4577_184268C.1.pep
MDPLKLYXAVMQSNVTRCATALYDAASHYXILPINLATADHKSPDLPIRNPFGYDPALHDCDWXLFXSRTICIYAARKN

SEQ ID NO: 277070 - protein, 121 aa, Zea mays
  Clone ID: MRT4577_184269C.1.pep
YSRSTGRVAAGSITIAQIQWRPHAQHGGTLPEKPPVCFRLPNINSYFLGFIQLYSTIPFGNSENCFRHSNAYLFYLRFNHYTQSSDFLHQTSFFQACVFFCSSANHPHSTTDDMIFIKHSA

SEQ ID NO: 277071 - protein, 97 aa, Zea mays
  Clone ID: MRT4577_18426C.1.pep
LRNGSVSNPWFQLRVRVPQTKGIATLNIYSHRSMRNKILDKHGFYTQNRLLLELKPTISNQVLTSKSTTVTKSVVVLPALHCSYHHHSFTTIYRLLW

SEQ ID NO: 277072 - protein, 68 aa, Zea mays
  Clone ID: MRT4577_184270C.1.pep
AFLCCVLRVIRYGFSNIQAEWHRVLLVLVRTWLIAWTRVRTLWTALFQCIKVGGQSALGPVNIMSVHI

SEQ ID NO: 277073 - protein, 47 aa, Zea mays
  Clone ID: MRT4577_184271C.1.pep
MSMVIVDEQHGLLIVISDTDCYRLQLNVISLVIIAMHLAQKLVYLHM

SEQ ID NO: 277074 - protein, 87 aa, Zea mays
  Clone ID: MRT4577_184272C.1.pep
SPALGQAGTEEALEFFMFDVDRVLRARGLLWIDSYVCHSDERRQLLVRLIGRFGYKKLKWVTGEKAGTGSAKPAMYLSAVLEKPARS

SEQ ID NO: 277075 - protein, 39 aa, Zea mays
  Clone ID: MRT4577_184273C.1.pep
TLFYLFIFFFFFFCLFCVIEVRRSSSSTYFYLRYFNTEE

SEQ ID NO: 277076 - protein, 97 aa, Zea mays
  Clone ID: MRT4577_184274C.1.pep
LPPPSARASLPSRSRGVASPRAPPQATVLTQFRRPIDGFAPVQPPPQRGGSGAVWTLCRWLLPTVSGRSDPCALCAREARALVLGALAGAGPPACPA

SEQ ID NO: 277077 - protein, 69 aa, Zea mays
  unsure (1)..(69): unsure at all Xaa locations
  Clone ID: MRT4577_184275C.1.pep
ITMRCTDKSGPQSMGYFSHDRPKYLGPYSEQTPSYLTGEFPGDYGWDTAGLSAXDPETFARNRELEVIH

SEQ ID NO: 277078 - protein, 66 aa, Zea mays
  Clone ID: MRT4577_184276C.1.pep
AHHNSLGLNRMGIGTLTLGGPRAGGFPHCAGSWESRSLSPKPYPHNMHRLGLKPGTFRLQTGELGH

SEQ ID NO: 277079 - protein, 128 aa, Zea mays
  unsure (1)..(128): unsure at all Xaa locations
  Clone ID: MRT4577_184277C.1.pep
LRLADVVPLRRVDQPDHGQRLRDQHPGHSPHPPPRFPPRSLRETRHVIRHIRQSPAMLTLDPRRRGPGXRPDRAVPIRRGAHVELRGCVPRPASSPSCRRGRRKRRRRRTTTTTPATAHSWAAPRRRW

SEQ ID NO: 277080 - protein, 58 aa, Zea mays
  Clone ID: MRT4577_184278C.1.pep
INQTKHEALITFSKNKTPQTTNYICKPNRDASSTQKLLRLLLPTEHQTPQSLKPYLPC

SEQ ID NO: 277081 - protein, 337 aa, Zea mays
  Clone ID: MRT4577_184279C.1.pep
MVSSSSSPSATAAAVVLAVALMTTTCFHGATAQLCEDYYDSTCPDAYDIVKQVLVDAVQSDTRIFASLIRLHFHDCFVQGCDASLLLDSVPGMPSEKTSAPNNGSARGFGVVDAAKAALESACPGVVSCADILAIAAEISVELSGGPSWGVLLGRLDSKTSDFNGSLDLPEPTDNLTILQQKFSNLSLNDVDLVALSGGHTFGRVQCKFITDRLYNFSGTNMPDPTLDASYRAFLTQRCPRNGDPTALNDLDPTTPDTFDNNYYTNIEVNRGILNSDQELKSSPLAQGTTAPIVDQFAASQDDFFASFAQSMINMGNIKPLTDPSRGEVRTNCRRVN

SEQ ID NO: 277082 - protein, 53 aa, Zea mays
  Clone ID: MRT4577_18427C.1.pep
KKKKKKKKKKKKKKKKKKKKKKKKKKKKKKKKKKKKKKKKKKGRAGFEREPRV

SEQ ID NO: 277083 - protein, 48 aa, Zea mays
  Clone ID: MRT4577_184280C.1.pep
LSCNREIMTGDYIDFLDWPCREKKHFFFLFFFYIHTPEELVKLQTERS

SEQ ID NO: 277084 - protein, 115 aa, Zea mays
  Clone ID: MRT4577_184281C.1.pep
KKSFSRPGGAHFPPGFFFYSPKGGNAPPPPQNWGTRAVFPPPLGEKKKPPPRCLVPGRINSELETRGPLPPFGECWDFNCFSSRGLCCCPPGRELKVRFFFPLDQRALVGNHPWG

SEQ ID NO: 277085 - protein, 49 aa, Zea mays
  Clone ID: MRT4577_184282C.1.pep
MQSPIVGQSAGSPDDAFASFAQSMINMGNIKPLTDPSRGEVRTNCRRVN

SEQ ID NO: 277086 - protein, 65 aa, Zea mays
  Clone ID: MRT4577_184283C.1.pep
LPQRRTVPEQLHYQMIPTINQAVAANLAAYLQTQQSFASNQLAGVNPAANSPAQPLLPLNQLVRS

SEQ ID NO: 277087 - protein, 48 aa, Zea mays
  Clone ID: MRT4577_184284C.1.pep
IALTHFFIQGSNFYKKPIFLPIPKKFGNSNSAMIYSSLILTNIRRGLH

SEQ ID NO: 277088 - protein, 165 aa, Zea mays
  Clone ID: MRT4577_184285C.1.pep
EAGPRSGALSLAGDDWASGATQRQVFVKTIAGDEFQPGTIDAKELNVAMRALGFEMTEEQIRQMIADVDKDGSGAIDYEEFEHMMTAKIGERDSKEELSKAFRIIDQDGNGKISNIDIQRIAKELGVNLTLDEIQDMVQEADRNGDGEIDFDEFIRMMRRTSFGY

SEQ ID NO: 277089 - protein, 64 aa, Zea mays
  Clone ID: MRT4577_184286C.1.pep
LSSYRYHINPRGVLLVPKFGICDSLFTHSNEEVESCIRVYVAERGAKSVVSSPSVEELLVHVCM

SEQ ID NO: 277090 - protein, 172 aa, Zea mays
  Clone ID: MRT4577_184287C.1.pep
MSFNQSTVKGQARRERPRARPHGLTQQRRQEIKEAFDLFDTDNSGTIDAKELNVAMRALGFEMTEEQIRQMIADVDKDGSGAIDYEEFEHMMTAKIGERDSKEELSKAFRIIDQDGNGKISNIDIQRIAKELGVNLTLDEIQDMVQEADRNGDGEIDFDEFIRMMRRTSFGY

SEQ ID NO: 277091 - protein, 177 aa, Zea mays
  unsure (1)..(177): unsure at all Xaa locations
  Clone ID: MRT4577_184288C.1.pep
LNGLGRDRRVAASVALLSDDVKLEVANHPLISTDYMTYMCKYNTAHGQRNHHEVKVKDSKTLVSGEKEAAGIGCTNPEEIPRGSVDADYVAEXTAVDTDHEKDSAHLQGGATKADLSDNMKDAAMYAGGGYHKEYHXDSNIGYNATXKSQXLDAVGKVINDKVHVREGLMTTAHDIT

SEQ ID NO: 277092 - protein, 172 aa, Zea mays; identical to SEQ ID NO: 277090
  Clone ID: MRT4577_184289C.1.pep

SEQ ID NO: 277093 - protein, 188 aa, Zea mays
  unsure (1)..(188): unsure at all Xaa locations
  Clone ID: MRT4577_18428C.1.pep
MSRRYDSRTTIFSPEGRLYQVEYALEAISHAGTAIGILAKDGIVLAAERKVTSKLLEQDTSAEKLYILNDNMICAVAGMTADANILINYARQAAQRYLLTYNEDIPCEQLVRRLCDLKQGYTQHGGLRPXFGVSFIYAGWDPRRQFQLYLSNPSGNYXXWKATSAGANNASAQSLLKQDYKEDCTFEE

SEQ ID NO: 277094 - protein, 68 aa, Zea mays
  Clone ID: MRT4577_184290C.1.pep
KTVSYLVAPQIEEKSNPGCQILLLTDSDYNVNVNFRRQKKQKKKKKKKKNDYSSNKSKVTGLLHSSSY

SEQ ID NO: 277095 - protein, 96 aa, Zea mays
  Clone ID: MRT4577_184291C.1.pep
EEPTWTHHRPKRIYTPTPFFSPTPRATEGSYIKSTPTYRPSSLQCIQFFLRHEQIYRYILLCYSGQKGSTLEPFWMKDQLNIMIQLTTIITVLSYS

SEQ ID NO: 277096 - protein, 80 aa, Zea mays
  Clone ID: MRT4577_184292C.1.pep
PQNKTHTHYNSIRSNHKQFHVHTSLETELANKQLGNRNLLSSLISLDRPFKFYTNNLLVTTGNLHEHSKIELGNLHPYFT

SEQ ID NO: 277097 - protein, 106 aa, Zea mays
  Clone ID: MRT4577_184293C.1.pep
HLAWSTTIRSTRRSWESTQPCITKQQTPSPHCNPGALLSHDSYHHLLLTLAPHLSIKPQLSDSSTISVKANDTTDKMLCTKLYLRLLPMLSTTNEQMTTTQVIIYK

SEQ ID NO: 277098 - protein, 14 aa, Zea mays
  Clone ID: MRT4577_184294C.1.pep
MKVSTSSISKNTAR

SEQ ID NO: 277099 - protein, 136 aa, Zea mays
  Clone ID: MRT4577_184295C.1.pep
GINRKKQSGSFNIEQSVDLLSLVWEHWTMGTIVEIMDPSLRGKAPAEQMLKNVHIGLLCVQDNPVDRPKMSTVNIMLSSGTMPLQSPLKPAFFIPKSGYYSTVHSESYPIASRSVDNGKPGAISPNEVSITELEPR

SEQ ID NO: 277100 - protein, 110 aa, Zea mays
  Clone ID: MRT4577_184296C.1.pep
VLKESILGSLLLHNIIEAPRLSSAMRPFSHAKSIRVLLHCLLCMVCTLKLLLLTLPAFSNTPHFLLFYMLLLAHKLLSSFLYPLLVHCIPLLKILQSLLVFLVDFYVNSH

SEQ ID NO: 277101 - protein, 144 aa, Zea mays
  unsure (1)..(144): unsure at all Xaa locations
  Clone ID: MRT4577_184297C.1.pep
MGGVRMTAWTAHDAEEVYVAPSGSVRADRRVGPMSWDDTVAAYAQSYAAQRQGDCQLIHSGGPYGENLFWGSVGADWSACDAVGSWVSEKQYYXHDFNRCXEGQACDHYTQVVWRDSAXIGWARVVCHYNAGVFIVCRYDPPAG

SEQ ID NO: 277102 - protein, 551 aa, Zea mays
  Clone ID: MRT4577_184298C.1.pep
MEDLLNTEIGKNDYDWLLTPPGTPRDPTLDAAEKAPSPIVTKHTVTRSSSTTRASRLSTYETENGHLTFPTRPARSISVSCRAVQSTPNNIRSSILNANISSVNSRSTTQSKRTATLTASKPSVASSRPVPTRSSTPVEARLSTPTHTHPPTPVKKRPSVSNSMANSAVPKNTSAPCSRSSTPTSRSRTLSSPSSSSTSTVSRPSSSSGKVPTISRTSSSSSTVPSVSRSSSRSSTPTRQPAMRSSTPSAGRISGKSNMTSSGRPLASSGRSSAPSSAPSSRPSSPNTRTRAPVRPLDIPDFPSETPPNLRAKLPERPLSARRVRPGITSGVRSTPNPEPVLSVTVKKMSVPAITRSKFSDVQSKTSLTNSHQSRPSERSLLEGQTTRTSRSVAAADNGFGRTISRKSLDMAIRHMDIRQNLGGIRGASLFPHSIRSTTTKSRPARASDPGHCISNGDRCFTDNGSSNGHFSGDSNGTLSHNGGSSIGSPDSGKKEVLSELDIYANSRYDAMLLKEDSKNMSWLHSVDDKSDQSPVFDHRFEPLPEPFGPL

SEQ ID NO: 277103 - protein, 288 aa, Zea mays
  unsure (1)..(288): unsure at all Xaa locations
  Clone ID: MRT4577_184299C.1.pep
MADHQYSAWTTSAARHRVFSCALMALVSFVAAGRPMVLADAIVFHVANRCPFPVWPASAPNTGHPVLAGGGFYVPQGKSRRVVAPANWNGRFWARTGCNFTANGMGVAGCLTGDCEGRLACNGSVGAPPATLVEVSLHEDAPKGSSYDVSLVDGYNLPVAVSAKPATGGADPNKCAIAGCAKNVNAVCPPELQVTATGSGGGKTVVACKSACLAFGLDAFCCRGAYATPATCRGTVYSRLFKDACPAYYSYAYXTPPPXASGCYAQEYIITFCPSRWGDEPGDRAAQI

SEQ ID NO: 277104 - protein, 63 aa, Zea mays
  Clone ID: MRT4577_18429C.1.pep
VVPHLIHYWAMDSFIFYHARRNRNRCPRSLLLSFLTYLQMDLSVKVPYSLGRLRVLVDSTHLT

SEQ ID NO: 277105 - protein, 13 aa, Zea mays
  Clone ID: MRT4577_1842C.1.pep
MAIGQHVSEDIIL

SEQ ID NO: 277106 - protein, 134 aa, Zea mays
  unsure (1)..(134): unsure at all Xaa locations
  Clone ID: MRT4577_184300C.1.pep
PSYLILSVVHHRRQVQSSPSPQPSATACAHHAAAPPLVNGFVHPIHRPRPPPPSPQPSSTTRAHHAAALGGGSGSVHPIHQPCPPPHSPHPSSASRAPLAGTPRRRXSLLPLGSXIRGLVLFGLASRASAGAPP

SEQ ID NO: 277107 - protein, 92 aa, Zea mays
  unsure (1)..(92): unsure at all Xaa locations
  Clone ID: MRT4577_184301C.1.pep
MKLNISFPATGCQKLIEVDDERKLRTFYEKRIATEVAADALGXEEWKGYVAXISAGNDKQGFPMKQGVLTHGRVRLLLSKGHSCYRPRRTGE

SEQ ID NO: 277108 - protein, 220 aa, Zea mays
  Clone ID: MRT4577_184302C.1.pep
LHRHQEVKKHGGDAPSNNLSDEESRQLDKRSRQIQSEIRTVGYIRHRNLLSLAAHVPRPDCHYLVYEYMKNGSLHQALKADNAEAEDGSSGSGTGAGAGGLSWPARLRVAVGVAAGLEYLHVSHQPQIIHRDLKPANILLDDDLEARIADFGLAKAMPDSHTHVTASNVAGTLGYIAPEYYQTVKFTAKCDVYSFGVILAVLATGKDPSDKFSAHAEKVV

SEQ ID NO: 277109 - protein, 52 aa, Zea mays
  Clone ID: MRT4577_184303C.1.pep
QARVPLGVRLGGGPPSLGLLARDAAAARLPFPADPCQRLATWGVPAPPSYPP

SEQ ID NO: 277110 - protein, 133 aa, Zea mays
  unsure (1)..(133): unsure at all Xaa locations
  Clone ID: MRT4577_184304C.1.pep
MLELRLVQGSLLKKXLEAIKELGTDANFDCSGTGFSLQAMDSSHGALVALLLRSEGFEHYRCDRNLSMGMNLGNMAKMLRCAGNDDIITIKADDGSDTVTFMFESPNQDKIADFEMKLMNIDSEHLGIPDSEY

SEQ ID NO: 277111 - protein, 176 aa, Zea mays
  Clone ID: MRT4577_184305C.1.pep
TLNPNINLNAYQKFGTLEHATLRYIAFANHLMILISSIIVTGLASWFLAKYDYRGVDIVYQEVIAVITLGFWLVGSILPLIGRYRGYLAPMNLVFSYLWLTSFIFSSQDWSSGKCGFGKPGQGHCSRKHAIDAFNFLAFFFLLCNTIVEGILLRAEYANKAAVPVNKELSSGANNA

SEQ ID NO: 277112 - protein, 265 aa, Zea mays
  unsure (1)..(265): unsure at all Xaa locations
  Clone ID: MRT4577_184306C.1.pep
MENANWCAKEVQSYTDEKGCWAAAEDCWAQSDVCYDSAPPTGGKNCKLWQDKCTDIGAQCKAGNWVGPPNKGKDLTPAKKSIDVGLIMPNQVQPGAPSKNTSAPSSEKEQEEPESTPAPKPETETKPEDSEYQPAPAPAKPVVEAPKPTPTPDAPAAPSNDXRQPSLSWSPHKTPGGSPLQPPPSSPXPSAKPPSPPSPLPLHRSXPKPTQPPCPKGYRCVYVTDLVVVTTTVYVTGAAPTATPTPSSSYMKRAHLPPRERLHMA

SEQ ID NO: 277113 - protein, 153 aa, Zea mays
  Clone ID: MRT4577_184307C.1.pep
ADQDTFEMTHLADYLRGNPHQQVCRPSQSSWGYKGFHEYWLNDTNAWIYPHLHKAAERMIELSHREAVDELEEKALNQAARELLLAQSSDWAFIMRTGTMVPYAVRRTRSHLLRFDKLFDDIRANKVDAGWLEKVEVMDNIFPKIDYRVYRPL

SEQ ID NO: 277114 - protein, 83 aa, Zea mays
  Clone ID: MRT4577_184308C.1.pep
SSLFALTFLRVGLQVARGQWIGPPPPLDILLGGGLLCIPFGLDRWAYFFNLLVAPPPFPTVVSKPYGSPGAKAVKCRKFTNAI

SEQ ID NO: 277115 - protein, 176 aa, Zea mays
  Clone ID: MRT4577_184309C.1.pep
MDAFSAVMDKVKSHPEMMEKVSAVMDKVKKSHPEAVEKVKDEVMSLADALHLRRHGSKDKEPESEEKAEEGEAAQSVEEEEGTSADKTAEPNVLEQAVQEIQAVAAALQQTAPETETEIPVETAAAAAPETSAEGDKPEDTNREVEKDDPKKRLDFAGFFAMLFERFCSPANKKKD

SEQ ID NO: 277116 - protein, 95 aa, Zea mays
  Clone ID: MRT4577_18430C.1.pep
MPTSSALSKRGGDGGDGILAALSRSQVAAHGREAAAVAKKLLRSTGKAAWIAGTTFLVLVVPLIIEMDREQQLNDLELQQQTLLGGAPPPPPPTK

SEQ ID NO: 277117 - protein, 103 aa, Zea mays
  Clone ID: MRT4577_184310C.1.pep
LPLLFYTADCYYVLWQTSGTKNLIYSLPLLAIILGILHSRILRLRTTTASLSLRKATYRPLPGDLVHISERTTWNTTTFKTKPYSRISSVERQLSPQTTNMRI

SEQ ID NO: 277118 - protein, 152 aa, Zea mays
  unsure (1)..(152): unsure at all Xaa locations
  Clone ID: MRT4577_184311C.1.pep
APLKTKXPIQFVERGPPGFKCGNKYQAPTXVVSGSDLHKVRRPVXIFSKNTRVGKVFFRINSKFDLMXAKGAFVPFFVGEGKKKGEFSQAREDLAALEKDFXEVPPKGGNNNGSEEGENCFACKNLFGRRARFWFLKTFVWVLAPQGKKKEI

SEQ ID NO: 277119 - protein, 74 aa, Zea mays
  Clone ID: MRT4577_184312C.1.pep
ISTTYHSRANTFGSKPPLATHFYIEGGHKQKPTHGFMPTYFGGGNMHPQYTVYKLGRRLLNTINDLGQAPLDLA

SEQ ID NO: 277120 - protein, 49 aa, Zea mays
  Clone ID: MRT4577_184313C.1.pep
YTRMSLLLYSKACLYSNPEDIALIPPCVWQKFENMRTSTGSLGYMEEDL

SEQ ID NO: 277121 - protein, 209 aa, Zea mays
  Clone ID: MRT4577_184314C.1.pep
PAGRQGTTASIASFASRATSRSGAGYGRLASPVPEVPPVNYGEQPLSRTTTMNSQGNHGQYPANQPMADPMQFMPGRYTESPAPMHPNNAPFYPPPARAPSARPMDTFTQPMGSFAPTQAPPPGPRGYQAYNPGGRTSTATSVTSHQNGPAMQRQFNPPVRSATGPMPLREPPRRNLTNPMPPRSASARPERAPPYYYDVESQRGGYGW

SEQ ID NO: 277122 - protein, 128 aa, Zea mays
  unsure (1)..(128): unsure at all Xaa locations
  Clone ID: MRT4577_184315C.1.pep
MMRQAMLDAVGTQEDSAVMEQRRHEGGSETSVVRCGTLSGHSLFELRKTVLWQASPMSIRRSPRGISFGQKSLAWSWSSGTAGIICRRVEGLRRTSDHMLTEMATLAGGEELGEWWGTXXLPPRFVKI

SEQ ID NO: 277123 - protein, 70 aa, Zea mays
  Clone ID: MRT4577_184316C.1.pep
GSVFNLVAKSVGFMLKAFPLPPRSSKFLRYEEKSCPACACDYVWSPQGAGRDPRPVVSFVWISALRRSPC

SEQ ID NO: 277124 - protein, 156 aa, Zea mays
  Clone ID: MRT4577_184317C.1.pep
FFSLRFSCSLSDVVNPFPGTTRRRNASLPRHHSPERIPSQPLMALTRQRASLPTVDGPDPPVDCAPHRPAWPYFAFVPVSACERLILLSRPIVTGPRTLRCGDTRTAFEARHVVWRNNLTWYHALEGHARCGRACRWVSHGSGFLVWASSITELRS

SEQ ID NO: 277125 - protein, 105 aa, Zea mays
  unsure (1)..(105): unsure at all Xaa locations
  Clone ID: MRT4577_184318C.1.pep
WVPRGGPGPNLVCSGGTTQQIPQITRRHLRFKMQIFVKTLDWQDITLEVESSDTIXDNVKAKXQDRRGSPQNQQRXILXAGKRLXDGRTLADXNIQKESTLHLGA

SEQ ID NO: 277126 - protein, 78 aa, Zea mays
  Clone ID: MRT4577_184319C.1.pep
PAMNYIQFITIALIYVRRPPFSISFQLAVPKQAMCRALPHILASIQGKTSSRYVGSWAIPFRKFLQLASVSPKSLTST

SEQ ID NO: 277127 - protein, 103 aa, Zea mays
  Clone ID: MRT4577_18431C.1.pep
SIAWLMERSVTRHTATVLLRIPIPRGPTSAGRWWCKESRVVRRSIIGPLSRLQNIMARKETRVAQWGYTGRWWVGVLDDVYQIQDQVHDFVWLPGVWQLSWGG

SEQ ID NO: 277128 - protein, 152 aa, Zea mays
  Clone ID: MRT4577_184320C.1.pep
YHHCRSRVLAHILYRVVSSHLVVLPHPCRPAVEVQSGCLARFTIVALHEPGAGQWNSAHGAQWHEQRRPEVVVGPAAATQDCVLRARGLSRVVEVGRRIRRGMEREPTRRSPLAARREWQPAVLRLSRPGVSPAACVRARHRHDAPFPFDAR

SEQ ID NO: 277129 - protein, 554 aa, Zea mays
  unsure (1)..(554): unsure at all Xaa locations
  Clone ID: MRT4577_184321C.1.pep
SDFPASCSDLCGVPCFGTNLRXIRYWGKCRGVYSNVMGFLGGINWAILVGRICQLYPNASPSMLVSRFFRVYSKWKWPNPVMLCHIEEGYLGLPVWDPRRNYRDRGHQMPIITPAYPCMNSSYNVSVSTRYVMIQEFTRAFEICQAIDEGKADWDALFEPYPFFESYKNYLEVNITARNEDDLRNWKGWVESRLRTLVLKIERYSHEMILAHPYPKDFSDKSRPLHCFYFMGLWRKQTTQAQEAEQFDIRGIVNEFRNTICAYQHWKEGMDIEVSHVKRKEIPLFVFPGGVRPSRSSRTAHKKSRTIPTCDVSADDQVGNLLGVASCSDAQPVPCKGSYTKQPDPNCAGGFQLPGSTSVLPPSLPNEVVLNGSANFHEESVEREHPEHYQESKFATVQNAVCHVAKQPNSLLPNSNNGWQLYGSDSSLNNSQRECSGSAANNLLNLSPAIPATPDELDELVSSNQIKANQEDVNAERRPSLEIGSENNLEQICSLRPQDSNDNLKRKANQELEPLELAAPSTVAAAQSTGTAPRKPLRLRLTTLGKPKPAEGTT

SEQ ID NO: 277130 - protein, 126 aa, Zea mays
  Clone ID: MRT4577_184322C.1.pep
SDSSLNSSKRECAGSAANNLLKLSPAIPATPDELDELISYQTNQKDVNAENNLEIGSENNLEQICSLRPQESNNNLKRKANQELEPLELAVPSTGAAPQSTGTAPRKPLRLRLTTLGKPKPAEGTS

SEQ ID NO: 277131 - protein, 83 aa, Zea mays
  Clone ID: MRT4577_184323C.1.pep
QMIPMTAEYVKLTCEHIIIYNDKYVAHCITPLIYLCTSSITSHCGAKPSLIKSTPDYKAYYMTINTSELMYHTVIYMNAKYLR

SEQ ID NO: 277132 - protein, 49 aa, Zea mays
  Clone ID: MRT4577_184324C.1.pep
LLLMFLYYICIVVFGFFFFFRVHGKVQITFYLIVLDLKRKISKITFVLV

SEQ ID NO: 277133 - protein, 70 aa, Zea mays
  Clone ID: MRT4577_184325C.1.pep
GPIATQAEQGGGRGIGPGPLAITPPGEKGMWGQAKKDGKRQGFPSHPGCKKTARAPKLGGTKKKTKTSQA

SEQ ID NO: 277134 - protein, 50 aa, Zea mays
  unsure (1)..(50): unsure at all Xaa locations
  Clone ID: MRT4577_184326C.1.pep
WPGSRSFQRSSEHRAITRLCQAALSSSSSFKRRGRPAPAVGGKKRWKVXG

SEQ ID NO: 277135 - protein, 55 aa, Zea mays
  Clone ID: MRT4577_184327C.1.pep
ILLLTFKLVSLTKKMTINSIIATLKNNHVYIWDLKCTKYYNLLWAEKTSINMPIY

SEQ ID NO: 277136 - protein, 76 aa, Zea mays
  unsure (1)..(76): unsure at all Xaa locations
  Clone ID: MRT4577_184328C.1.pep
RPRVRFPSLNNSGNTXTMTSMXQAYFWEGNLHKMGAIDYITILNHRINNQNEVCMEDTPKMLDDVNGGSLIFYKGI

SEQ ID NO: 277137 - protein, 113 aa, Zea mays
  Clone ID: MRT4577_184329C.1.pep
GFTHAFLAAATDGAAGGGSTAGSGSWWAAAAAGQRRRPGCWPGCRGGSACPSAAGGRRRCWTPPRCGWCTWWRPSCWASRSPASSAAAAARYDSLITRFIYLVISLPNYICYY

SEQ ID NO: 277138 - protein, 94 aa, Zea mays
  Clone ID: MRT4577_18432C.1.pep
MPTPSALSKRGGDGGDGILAALSRSQVAAHGREAAAVAKKLLRSTGKAAWIAGTTFLVLVVPLIIEMDREQQLNDLELQQQTLLGGAPPPPPTK

SEQ ID NO: 277139 - protein, 291 aa, Zea mays
  unsure (1)..(291): unsure at all Xaa locations
  Clone ID: MRT4577_184330C.1.pep
EERGQQDHYGIFGIQDSMVRDIGPYKNLVRFTTSAGSGSGSGSGSLDLHLLSRGFSASPLVSKLREMLEALQQVDVRSLNHHQRLAFWLNIYNTCIMHGILQHGLPSNSDKLLALKNKATINVSGQTFNALVIENFILRQPSSVKQELWQCDVDVEEDRRSGRFXVKTSEPNILFALCCGIRSSPALRIYKADRVLVDLDKAKLEYLQASLVVTSTRRLMIPSLLHSXXXXXXXXXXXXXXXXXXXXXXXXXXXXXEVDCLAXXAITNNKLEEVVVDVIPLDYDFQYLLPM

SEQ ID NO: 277140 - protein, 220 aa, Zea mays
  unsure (1)..(220): unsure at all Xaa locations
  Clone ID: MRT4577_184331C.1.pep
ATINASGQTFNALVIENFILRQPSSVKQVRIFDMHAHAIAVRRCYSICMNEXQQELWQCDVDVEEEQAVREVYGLKTSEPNILFALCCGIRSSPAXVVCMYVLYWHSINAYNTMQLRIYKADRVLVDLDKAKLEYLQASLVVTSTRRLMIPSLLHSNMHDFAKDTESLLRWICEQLPTSWSIRKSMVDCLAAITNNNNKLEEVVVDVIPLDYDFQYLLPM

SEQ ID NO: 277141 - protein, 186 aa, Zea mays
  Clone ID: MRT4577_184332C.1.pep
MVILCAAQPAPSVHSEFLSRWLSLNSPKMPYALNSTATKLRKQNRRRRIITYAKSSSLQDSVASVKPSRLLPTVEPKTFPNSVPDEILLKLRLEESDAFYILELCTSRELSSSLLDKNSAILVCLIDVDGDSLLQRVPAIYGDQPAHVTKPLQFLPFQSGSVDIVTFKGPKLQTIKEIWIGLESGS

SEQ ID NO: 277142 - protein, 134 aa, Zea mays
  unsure (1)..(134): unsure at all Xaa locations
  Clone ID: MRT4577_184333C.1.pep
MASEMKQSNLLREIKEDXMVLIIFVGGSSILNLDLKKGLNQLYLKTAVYGHVGSADPDFTWEVGKTINCYNPGGCGRLLLLPESGLKVMGSKLLTRNFSDTGCFRFGIQNTFYLWIKFDPITGIYGMDLYVPLE

SEQ ID NO: 277143 - protein, 86 aa, Zea mays
  Clone ID: MRT4577_184334C.1.pep
FGGAPSRSKYVVGTLVLKNLLKPTPLELPDCSSPPKRNRPITWFVSVKKSNVLRGVINQGPGNSFFLLLLPLNGPLIYGNVLCLGF

SEQ ID NO: 277144 - protein, 64 aa, Zea mays
  Clone ID: MRT4577_184335C.1.pep
PGGTKTPGNGKRLTPPALFLFVKNPPLLVRDPRRRNYFSPKTLWEGPPRGGGTAKQHGNPFPFL

SEQ ID NO: 277145 - protein, 404 aa, Zea mays
  unsure (1)..(404): unsure at all Xaa locations
  Clone ID: MRT4577_184336C.1.pep
MAHPSAAAAAVSSTAPAANPSSGAREEGGARSPPSPSPSQRGRAKVVIVMGATGAGKSRLAVDLAAHFAGVEVVSADSMQLYRGLDVLTNKAPLHEQNGVPHHLLSVIDPSVEFTCRDFRDRAVPIIQEIVDRGGLPVVVGGTNFYIQALVSPFLLDDMAEEMQGCTLRDHIDDGLTDEDEGNGFERXEEIDPVAAQRIHSNDHRKIKRYLELYATTGALPSDLFQGEAAXEEFFAVLVCSACIMSSLCHEHEQTFASQGFLFCFVSLIEXTCWEFLVIMSEQKWGRPSNSRLYCCFLWVDADLQVLDSYVNKRVDCMMDGGLLDEVCSIYDADAVYTQGLRQAIGVREFDEFFRAYLARKESGEGSCASLLGMHDDQLKSLLDEAVSQLKANTRRLVRRQVST

SEQ ID NO: 277146 - protein, 62 aa, Zea mays
  Clone ID: MRT4577_184337C.1.pep
GIPYFSNGSGEAKRDPVTTLKQYPVLGGKFRNESFFLTNLAKTKTSETIAKNPPSFVSERNV

SEQ ID NO: 277147 - protein, 481 aa, Zea mays
  unsure (1)..(481): unsure at all Xaa locations
  Clone ID: MRT4577_184338C.1.pep
MAHPSAAAVSSTALAANPSSGASEEGGARSPPSPSQRGRAKVVIVMGATGAGKSRLAVDLAAHFAGVEVVSADSMQLYRGLDVLTNKAPLHEQNGVPHHLLSVIDPSVEFTCRDFRDRALPIIQEIVDRGGLPVVVGGTNFYIQALVSPFLLDDMAEEMQGCTLRDHIDDGIGLTDEDEGNGFERLKEIDPMAAQRIHPNDHRKIKRYLELYATTGALPSDLFQGEAAKKWGXLVTPDSTAVSRGCIQXSRLYCCFLWVDADLQVLDSYVNKRVDCMMDGGLLDEVCSIYDADAVYTQGLRQAIGVREFDEFFRAYLPRKESGEGSCASLLGMHDDQLKSLLDEAVSQLKANTRRLVRRQRRRLHRLSKDFGWNLHRVDATEAFFCATDDSWQKKVVKPCVDVVRRFLSDNSTVLPSTSASDPSSRELWTQYVCEACGNRVLRGAHEWEQHRQGRGHRKRVQRLKQKSLRPWPSLLPQDRS

SEQ ID NO: 277148 - protein, 230 aa, Zea mays
  Clone ID: MRT4577_184339C.1.pep
SRPAGQSFDLHRPPPMTVAGAIRRRRAPRPHLPLFVLVLLFSTLTPRTSALRVPLRQAATLVSLSHSLLSRVAITRAARGDAAAAARVRRIASLLSSRGAWGLGWDYLRHYAFSSATGCGLSCAAAASRLIAAAAEASRLRSATDAAQWMRLHYGDIRDAAAQLLNGLLLAFSEEGPLREVFMDIKWEVEEGELLKDCLEVGAKDLKGLLVIAKDLFAGVSRTSTQHSEL

SEQ ID NO: 277149 - protein, 54 aa, Zea mays
  Clone ID: MRT4577_18433C.1.pep
WKLKLKISCTLHQQVGMAMAPFPYLWRGIPPLGYIWIPYYSRQYTWVEEDLGAN

SEQ ID NO: 277150 - protein, 94 aa, Zea mays
  unsure (1)..(94): unsure at all Xaa locations
  Clone ID: MRT4577_184340C.1.pep
FMYAQSSSTHMLWRTAFTRIHTNTSSKQATSPACFVCAYTLHITKSQIYAFRHIDTQTRSYIYIYMTVTLAVVDDAGHRIFIYSFALKDPSSXG

SEQ ID NO: 277151 - protein, 108 aa, Zea mays
  Clone ID: MRT4577_184341C.1.pep
ASSFEPPKEGVLAGPPKAGEQNGQKGQIMPVASLFSLWVYAEHRFKLWVGFDFSSPQIMVFKASFSVSGSVSYFGSFGTVGCVVFPLPKGKLFLNFKTMDTWVMAKQL

SEQ ID NO: 277152 - protein, 128 aa, Zea mays
  Clone ID: MRT4577_184342C.1.pep
RRWRRIHAGGDQHDAPQLGRDHHDAGVLRTPPPPAVAAVVGRAARNTSSASHSRSRRRRRRAIGVSATSQGQVLLSSKYLKAAQELLDEVVSVSKVVVDDASKTAVAAARSLAAAKKEEDCEGISPED

SEQ ID NO: 277153 - protein, 181 aa, Zea mays
  unsure (1)..(181): unsure at all Xaa locations
  Clone ID: MRT4577_184343C.1.pep
MAVHLLLSGRHLLGRPVQSIVSTTADRKVTLRLTVSSMPPAMQGDDRXLWIPSMQYLSYLNGKLPGXYGFHPMGLSDPEGTXGGFIDAKWLCYREVINAXYTMLGATVAITPXLLKDAXIIPPETNVXCSMTEIITTVLMYNYCSDSYTLFDFNMMLMSYAEQRRLQDCNNAGCMRKQYFL

SEQ ID NO: 277154 - protein, 45 aa, Zea mays
  Clone ID: MRT4577_184344C.1.pep
KSTIRFYFFMNHCVHPAFEPHGKTLASLTSMDLCLHLTIWLHLIA

SEQ ID NO: 277155 - protein, 273 aa, Zea mays
  unsure (1)..(273): unsure at all Xaa locations
  Clone ID: MRT4577_184345C.1.pep
KYSSEYDGRNTRSLPPGWEERFDSVTGKSFYIDHNTRTTTWEHPCQEAPQKPWKRFDMTFDQFKGSTMLAPVNQLAELFLLAGDIHATLYTGSKAMHSDILNIFKEETGKFSKFSAVENVKITVLRRYQNFMNDSSRQKQLEMFLGLRLYRHLPXIPMFPLKVLSRPSGCMLKPVPSIIPMADGGSSLLSFKRKDLIWVCQQGADYVELFIYLXEPCHVCQLLLTVSHGAEDSSYPATVDVRSGSSIDSLKLVVEGACISTCSNGTNXLIPVT

SEQ ID NO: 277156 - protein, 52 aa, Zea mays
  Clone ID: MRT4577_184346C.1.pep
EADAPRRGGAKDMGAKVARTEDGGVETQSSMVCATTPLSVLISQARPARAAH

SEQ ID NO: 277157 - protein, 105 aa, Zea mays
  Clone ID: MRT4577_184347C.1.pep
QKIPDVRIDVASLYNRSTPRCPLTRPRSSLIACAMCMHIDQEPERVAAAEDGGLEEDPGLRLRAAVRGLADMWTLDDIVDNLICRPPPRKFATASFLYLRLPSLI

SEQ ID NO: 277158 - protein, 57 aa, Zea mays
  Clone ID: MRT4577_184348C.1.pep
LFIHLHCADELLMRGMVDLSHPEISSTLEVHCCRSIVTFSWKGFTDYSDWYNCCKLL

SEQ ID NO: 277159 - protein, 240 aa, Zea mays
  Clone ID: MRT4577_184349C.1.pep
MAQFLRGKAAAAATGAAALRASSPAPWRRTASASYHHTIQAVPRETAGPRAAARERRHGRVPAVLLTLAGAAPGNGIAHRHLLTADRRQLAEMLKQSPYFLSTPVRLQVRAGERSNAILHAGTVLPIKVHRDENSGNILNLVMVKADEGTMLKVDLPVEFKGEDACPGLKKGGFLQKIRTSLVYLCPAEHIPPKIEVDLTNLDVGDRVLMHDIPVHPSLKLLSKNETMPVCKILASKPDE

SEQ ID NO: 277160 - protein, 108 aa, Zea mays
  unsure (1)..(108): unsure at all Xaa locations
  Clone ID: MRT4577_18434C.1.pep
YFLKIRGLLPSTIASMADSSLVDLHDASMSDDKDDLDSLPSISTDDIYSDVSDSDAQAEWERSLEQLQLILTMMIVPWMGKYFGRKFAYWSWSRYMEWAHXRRCSINR

SEQ ID NO: 277161 - protein, 81 aa, Zea mays
  Clone ID: MRT4577_184350C.1.pep
RSRRVRPVRSFGFVHTTPFNSHGHKVFVQSPLIPGHGDGSNVPVMDDTGCDMPGKNSARPRSPSDHRKRNAGFYVQQRSSR

SEQ ID NO: 277162 - protein, 57 aa, Zea mays
  Clone ID: MRT4577_184351C.1.pep
KKLKSPISSISFNNRLPPIKASKYLFLWLTSNINTINVNTTKKYNMHRLNYLKVIYS

SEQ ID NO: 277163 - protein, 108 aa, Zea mays
  Clone ID: MRT4577_184352C.1.pep
YLEAGRVKEGEEVSLESLKAKGVINPSGRERRLPLKILGEGELSKKLTLKARAFSTSAKEKLENAGCSLTVLPGRKKWVKPSVAKNLARADEYFAKKRAMAASEPASA

SEQ ID NO: 277164 - protein, 57 aa, Zea mays
  Clone ID: MRT4577_184353C.1.pep
KKVSKALRLFAVNWHTYLTRGDHYALLMEQSAYVDNDLRRCDLLTLTLLGVTTLPLL

SEQ ID NO: 277165 - protein, 73 aa, Zea mays
  Clone ID: MRT4577_184354C.1.pep
RRRTHHTPMMREYWAPHRDPETRAQRTDDRTRIPKQHRLAKLRDLNLPLQAQAKRQEVSCRHRVLLPGAHWQG

SEQ ID NO: 277166 - protein, 38 aa, Zea mays
  Clone ID: MRT4577_184355C.1.pep
NDVRGGRRSLERYGTLSLKNLRKDLYIVKPKLTESPKT

SEQ ID NO: 277167 - protein, 77 aa, Zea mays
  Clone ID: MRT4577_184356C.1.pep
HRPPAVHQLHLHCSSAGCQGQIQGPQGSNRKVTGKVACMHQLVTICAICQTGPDFTHVHRVDQHRAPYSEGRKGKVF

SEQ ID NO: 277168 - protein, 110 aa, Zea mays
  Clone ID: MRT4577_184357C.1.pep
MDWYAWLCRVGLHPDVALEYALLFARNQLGAADVRHLDHEFLLSMGVAVAKHRLEILKLARKESLSSHRKAAAAIRRPAVARHQAARRGGAPVRALGARSPSRLSGPEPG

SEQ ID NO: 277169 - protein, 137 aa, Zea mays
  Clone ID: MRT4577_184358C.1.pep
SFQFTLVLGNPSGRSAARYDRLAAYVAYRGEAVTAPTPMPPLAQDAGTAVAAAPVLGAGVAAPVPVSPDAAAALAADVANAVLPLRVVLLGRVRFVHEPFHRGWRSLYARCDLLLGVRKIRDRERRRRRCAPGAASW

SEQ ID NO: 277170 - protein, 53 aa, Zea mays
  Clone ID: MRT4577_184359C.1.pep
PAFGDSPVPWQDCLPSVTLPVARPRLSQARPRIKRGPQLWRATSSLDWPDVVG

SEQ ID NO: 277171 - protein, 54 aa, Zea mays
  Clone ID: MRT4577_18435C.1.pep
RLKALPGCPREVQRGFPPPLVPEAECNLAPLSGVPECPWILGGGAIPPKSLAKA

SEQ ID NO: 277172 - protein, 33 aa, Zea mays
  Clone ID: MRT4577_184360C.1.pep
RAQTRYFYRRDLRSDSHSSLLAKEILQRIASKR

SEQ ID NO: 277173 - protein, 53 aa, Zea mays
  unsure (1)..(53): unsure at all Xaa locations
  Clone ID: MRT4577_184361C.1.pep
MNPLTQVNRTQIINQKEALMGIGEDASWHSXXKDSAXVYVGGVPFGLTEGDLL

SEQ ID NO: 277174 - protein, 71 aa, Zea mays
  Clone ID: MRT4577_184362C.1.pep
MNQSAQNYFSVQKPSETSSGPYTSPPPIGYPTRDAVVGDPPAAAVETNSKGVNPEGCCAAICCCCVLDACF

SEQ ID NO: 277175 - protein, 77 aa, Zea mays
  unsure (1)..(77): unsure at all Xaa locations
  Clone ID: MRT4577_184363C.1.pep
FPPVSLNPGAIGHAGGGLRTTTGHLIYKLGGIDKRVIDRIEKEAAVMNKRSLKHXWVLAKPKADRARVITIVICFAE

SEQ ID NO: 277176 - protein, 68 aa, Zea mays
  Clone ID: MRT4577_184364C.1.pep
AFADRNCLIYIYRYRSHWLPPALHDQNDVYERRGETEEESADLVKPKQNGSHCLIEIENPYLVKLKNI

SEQ ID NO: 277177 - protein, 247 aa, Zea mays
  Clone ID: MRT4577_184365C.1.pep
MADFSSSNGVPPGFRFHPTDEELLLYYLKKKIGFEKFDLEVIREVDLNKIEPWDLQERCRIGSAPQNEWYFFSHKDRKYPTGSRTNRATTAGFWKATGRDKCIRTSYRKIGMRKTLVFYRGRAPHGQKSDWIMHEYRLEEIDEAQGGTSEDGWVVCRVFKKKCFFKIAGGGEGSSSQSADAGAGHMAVSSPLGGHDHADRAAMASHYMHGMHPQYHPQHASSFYYSQMQPPEAYSHHVQVQDLLTTT

SEQ ID NO: 277178 - protein, 187 aa, Zea mays
  Clone ID: MRT4577_184366C.1.pep
MDPPPSSISAPAINAAAPLTFHRRGSSNHRPPSSIRHRDPLLDAIHLPTELLSAGVADLLLGASPPIPPALPPPHNRYALHGRSGTPWKVVYFRSASPTCSFVNPVRRAAEPRDRADPPFSRPHPDTRSPPALTNLRPRSPHRPPPHPRPPHPPHSQQSSCSPRAVSASAMTGIHDRYPHPGFFLPV

SEQ ID NO: 277179 - protein, 402 aa, Zea mays
  unsure (1)..(402): unsure at all Xaa locations
  Clone ID: MRT4577_184367C.1.pep
MTALSQCDHGEDAIKLFVQMLRKGLEPDSFVLSSLLNACASLSAYEQGKQVHAHLIKRQFTSXCIFAGNALVYAYAKCGSIEDADMPFSGLPERGIVSWSAMIGGLAQHGHGKRALDLFXXMLDEGVAPNHITLTSVLSACNHAGLVDDAKKYFESMKETFGIDRTEEHYACMIDILGRAGKLEDAMELVNNMPFQANAAVWGALLGASRVHRDPELGRMAAEKLFTLEPEKSGTHVLLANTYASAGMWDEMAKVRKLMKDSNVKKEPAMSWVEIKDKVHTFIVGDKSHPMTRDIYGKLAELGDLMNKAGYVPNVEVDLHDVDRSEKELLLSHHSERLAVAFALISTPSGAPIRVKKNLRICRDCHVAFKYISKIVSREIIIRDINRFHHFTNGTCSCGDYW

SEQ ID NO: 277180 - protein, 168 aa, Zea mays
  Clone ID: MRT4577_184368C.1.pep
NSARGRERERERERERERERERERERERETWRHGPRRLSLCSPKSSPLPPCRPCATVLHAVEVTSLIPPMQSPTPPPPLLRSSRTATATRRDVSCQQRPPLNNVATSSWAKPPPSLLPVEMHNTARSIHLLQHPHPRSNGVAMSATNSAPSPLSNNVATSASSVRNDE

SEQ ID NO: 277181 - protein, 75 aa, Zea mays
  Clone ID: MRT4577_184369C.1.pep
IKFGVFAWEFFLNKSIFFFPFNAGVPPQTIIILAWGLGSIVPKTLFKGRNRGRFFYMLFRHRFFWHLTLSQHHFF

SEQ ID NO: 277182 - protein, 105 aa, Zea mays
  unsure (1)..(105): unsure at all Xaa locations
  Clone ID: MRT4577_18436C.1.pep
PAEYYKSVPPINKEPGTLCFFTTGLCPLPMEAPXFLYLDYPKLCNMFERGRLLTRHEPLAPLSRKLGIRLMMQSTGGVTLQQXGSHNQTGAFLWMMIHGAISLPA

SEQ ID NO: 277183 - protein, 106 aa, Zea mays
  Clone ID: MRT4577_184370C.1.pep
RALVSNTVSSTSPDLASGEWDAWLGRGSGRGGWHMLSSPLLPSPLSVLRLHPDPGPGVLRPLMACALIQPAPFRGKWCCPLSFCLHTEVGAVILWDGPFFLPLLFI

SEQ ID NO: 277184 - protein, 65 aa, Zea mays
  Clone ID: MRT4577_184371C.1.pep
RPRQDVGRLGLDKTIFKSSNCNNWGGGVRLYGPRINLLVEHSDVMNLERLWCFNMRIIYLTLLFV

SEQ ID NO: 277185 - protein, 77 aa, Zea mays
  unsure (1)..(77): unsure at all Xaa locations
  Clone ID: MRT4577_184372C.1.pep
MSSNSSTGPRPRPSPSPPPPKSSPSPSHSTAPPPSADSSSPGPSLPSDSSPXPAASRSHGAXAXSPAKPHSSREQPS

SEQ ID NO: 277186 - protein, 150 aa, Zea mays
  unsure (1)..(150): unsure at all Xaa locations
  Clone ID: MRT4577_184373C.1.pep
FEKDXVXCLYNEKNHRXKEKLAELEKEHLIHGDQEVPEAIKQDSTEICLRDIEVEPCTSPRRSNANDSRYDELVKLDSSLEQTSCVLKEMNNKNMDRSSSLSRNEQEKQLECILVSIMKLSKDFVEIEKKMSAERTENRSKELSDHCNHM

SEQ ID NO: 277187 - protein, 93 aa, Zea mays
  Clone ID: MRT4577_184374C.1.pep
GTKNFGCYITGDPWPDKPPGRSMGARPGQKRGPERKKNPPRRVQTSPESYHSKPYELHWGVAKGKGKANSQRPTELTHIIKQVPGWLTSPTQT

SEQ ID NO: 277188 - protein, 89 aa, Zea mays
  Clone ID: MRT4577_184375C.1.pep
GSSTVNPHRVAHTPKKRSRTLAPPPAPPSPAAAVPAVLAPWYTRPSRSPSPYKGRQKQMSRSRSPVVQSQPRSPSPDPRAQARSRSRCP

SEQ ID NO: 277189 - protein, 77 aa, Zea mays
  Clone ID: MRT4577_184376C.1.pep
HAADVDTLPTSPKSESKSNPPMLRTRRHAPSTSSRIRSGMVAAVRILLPSLASNKLRPYEFCSLNGVSKAIILACTV

SEQ ID NO: 277190 - protein, 135 aa, Zea mays
  Clone ID: MRT4577_184377C.1.pep
MAAAAKIAPSMLSSDFANLASEAERMVRLGADWLHMDVMDGHFVPNLTIGAPVIESLRKHTKAYLDCHLMVTNPSDYVEAFGKAGASGFTFHIEVARDNWKELTQSIKAKGMRPGVSLKPGTPVEDVFPLVEAET

SEQ ID NO: 277191 - protein, 37 aa, Zea mays
  Clone ID: MRT4577_184378C.1.pep
TRPKSRRKFIAPFFSPPRGDLRGHHKYLRRNLPRSSQ

SEQ ID NO: 277192 - protein, 165 aa, Zea mays
  unsure (1)..(165): unsure at all Xaa locations
  Clone ID: MRT4577_184379C.1.pep
MNEQQHYCVKELIIDESAADNAWLLLKVAHEGYLDNYITTIELDHEERTERLFFLHAPPQIXDTAGQEXRLRTIRKSYYRGAHGIIRVYDASEQHTYNNVXXWVNEIDRYASEDENKLLQLNXCDLGENKGFSXEDDKGLADDIXIRFLENSVMDETHEEKELMN

SEQ ID NO: 277193 - protein, 52 aa, Zea mays
  Clone ID: MRT4577_18437C.1.pep
NFQKWAAVVVPSGEEQRYTCHVQHEGLPKPLTLRWEPSSQSTIPIVGIVAGL

SEQ ID NO: 277194 - protein, 123 aa, Zea mays
  unsure (1)..(123): unsure at all Xaa locations
  Clone ID: MRT4577_184380C.1.pep
YQHTLPTINXAAAANLAAYVQQHLLLPFNLLSGVNLDIYLQAQLLLPYNXRLXSPHAFLLLQQLMPFHLQTVAHIDAYLRHQHSLTFHQQVVLNIYAFMQQLQLLLFYPXNVTYIVPLLTTAA

SEQ ID NO: 277195 - protein, 75 aa, Zea mays
  unsure (1)..(75): unsure at all Xaa locations
  Clone ID: MRT4577_184381C.1.pep
QLLYPPQGYRDGGDVFEVTKLWPGRVALIGXPXAGNVTLVTMLTGTHFAAAXYDFTSLTCIPGIVHRRDXKVQLL

SEQ ID NO: 277196 - protein, 100 aa, Zea mays
  unsure (1)..(100): unsure at all Xaa locations
  Clone ID: MRT4577_184382C.1.pep
LLLAPLAGAGEMSIVCYXERIEHDALMMYADLMAEHGRTYNFFCEEEGKFEVFRDNLQYVDAHNGGCDWGVHSXRLXGLNRWGHLRNDEYRATYLRVGSM

SEQ ID NO: 277197 - protein, 99 aa, Zea mays
  unsure (1)..(99): unsure at all Xaa locations
  Clone ID: MRT4577_184383C.1.pep
LSPALRLXLFFFFXLXCLPXXPXSXXAPGGGGGSRPPGALSXXXXPXQXKXVWSXADHAYXDYNSGGEAARFSSWAAPGSLAVTRGILVSFFSSAYLYA

SEQ ID NO: 277198 - protein, 101 aa, Zea mays
  Clone ID: MRT4577_184384C.1.pep
PLLPTTPPTPHNKNSTNTTHSIYTSPTLIPLTITNHPTTSISSSPTTLTISRTPSTPPSSHSTPTISPILTISITILMISITFSTPLYPKFTNALFPTFYS

SEQ ID NO: 277199 - protein, 58 aa, Zea mays
  Clone ID: MRT4577_184385C.1.pep
SPTIGGHEACGHHVRPRVSWCLDRCIFSTPQTISWRVPAREYRKRVRDRELHVHPPPR

SEQ ID NO: 277200 - protein, 79 aa, Zea mays
  Clone ID: MRT4577_184386C.1.pep
AHSTPNLCNHTVDLLESDLSTFLSYDCVVLIRELSLTPDLSTFLCVFSTPLLTPNLVVIICVRWERLQFVEISHNRILI

SEQ ID NO: 277201 - protein, 142 aa, Zea mays
  unsure (1)..(142): unsure at all Xaa locations
  Clone ID: MRT4577_184387C.1.pep
LPNNYSDIYHFFKXXHFNRHLXFSLLIVIIVVVVHLLXVGKRRQRVXGVNXALDPXGYLHQQRRHGEDGHGVHEGRLSQLHGQHARERPQVGLKLHAPPCSCPPPRSPGPGRRTSTWWRRSATPPRAPARTVRPPRSTRRRT

SEQ ID NO: 277202 - protein, 76 aa, Zea mays
  Clone ID: MRT4577_184388C.1.pep
RRSNHLSGVGCIDRSRIKILVRDMRQDPENDILAEEGIYLLPTRRPRKPSEKGPASMIRTENKAMMDLQNSCDSRL

SEQ ID NO: 277203 - protein, 129 aa, Zea mays
  Clone ID: MRT4577_184389C.1.pep
MSLVISNVSTVGLLPTGTAVLWTCFLQILALRMNKMLSNDCLGTQEPHTFCKTTETLEHSHLQEITLDKTAAGSTLISHQNGRVCIVSSVIYLARFILIFPTVNELCISCLEIIYGQSSSTKDNLYYML

SEQ ID NO: 277204 - protein, 104 aa, Zea mays
  Clone ID: MRT4577_18438C.1.pep
CLSYAGIAPSGHTSIYIIITISCATAHLSKVDGIRAPLRPVEDAAPPPSICCLRRMYHVPDHVVVPIRPVSRVWLGAPHRRVHPPRSARIPCPPPGAHPLDGCA

SEQ ID NO: 277205 - protein, 138 aa, Zea mays
  unsure (1)..(138): unsure at all Xaa locations
  Clone ID: MRT4577_184390C.1.pep
VAQRPIQFRSAKRQCVERILQQNNLKKGIGLVVCPALSASNASSMQMPCPCAGLQGLYSACARLGTIIGARGLYPYAEYLRQPQCSPLAAGPYYPXCGAANAMFQPVRQQCCQQXMRMMDVQSVAQQLEMMMQLGAWP

SEQ ID NO: 277206 - protein, 213 aa, Zea mays
  unsure (1)..(213): unsure at all Xaa locations
  Clone ID: MRT4577_184391C.1.pep
IYFPTPIAGKIPLPPALTAIAPSRPPXPSPQLHPHPSPPFAPRLSHLSPPSPXSTTEPVPPVPANPGXPSRTTSSPPAASPDPRPSRLPLNSPASSHPPSPTPSSPSSPASASRAPTSPPSSPLTRGCSAPXVDTLTXPMSRGSPAWACRVLRSLSSLCSAALSSAANPSSPGCTTTCPSSDPRRNSFPFSRRTPTSCHPTSTRWVEPNAVFL

SEQ ID NO: 277207 - protein, 89 aa, Zea mays
  unsure (1)..(89): unsure at all Xaa locations
  Clone ID: MRT4577_184392C.1.pep
KTTXGTKGKPNRRGRKGPTXXRPPXXNPTRGGRGQHFFLNQTXQKAPSSTGRGPKPPPRPPPXXXXPTRPGGXPPETKTTEPTGGGRKT

SEQ ID NO: 277208 - protein, 144 aa, Zea mays
  Clone ID: MRT4577_184393C.1.pep
AQNIGAQQLQQFVLATLVAYFQQQRFFPFTHLGSLTSAFYLQHHQLPFSRLPVAPPQQFFPFTQLAALNSPAYLQRHQLLPFTQLGGVSPAPFLTHPQLLPFSQPVGPNAGPLFQLHQLLPFTPLVLPTPAVFSPPPPMGGAPF

SEQ ID NO: 277209 - protein, 50 aa, Zea mays
  Clone ID: MRT4577_184394C.1.pep
YISSPPTNENNIVSIYSIPVSACALASTCNGNLYIFFYEEKGSIFDPAGY

SEQ ID NO: 277210 - protein, 360 aa, Zea mays
  unsure (1)..(360): unsure at all Xaa locations
  Clone ID: MRT4577_184396C.1.pep
MIRHLAAKHNDRGNANEANDVTEESDVDDQGDSEYGFVLRIVLLLVLAWMTLLIFNAGMIVIPISLGRLVFEGVPRLPITHGIKCNDLFSFSIGCYILWSVAAGTRYAIDYITSRQLGFLVQQICKWCSIVLKSSVLLSIWIFVIPVLIGLLFELLVIVPMRVPIDESPVFLLYQDWALGLIFLKIWTRLVMLDQMAPLVDESWRSKFERVRDDGFSRLKGLWVLHEIIMPIVTKLLTALCVPYVLARGIFPLLGYPLIVNSAVYRFAWLGSLIFSALFFWGKRFHVWFTNLHNSIRDDRYLIGRRLHNFGEDXLSGVNLEQXGSDDQDQDLVLRDQEEEVGLRMRRNNMHANQQPRLAF

SEQ ID NO: 277211 - protein, 71 aa, Zea mays
  Clone ID: MRT4577_184397C.1.pep
CSVKRYLQSARTTTGMGVATSSYNHQPLQLSPGSIVEQSLDYFLSLTHKLTLQRPLQSTSRTCRPKLIPWL

SEQ ID NO: 277212 - protein, 98 aa, Zea mays
  Clone ID: MRT4577_184398C.1.pep
VYRFAWLGCLIFSALFFCGKRFHVWFTNLHNSIRDDRYLIGRRLHNFGEDTPEPSESGATIGSDDQDQALVLRDQEEEVGLRMRRNNMRANQQPRLAF

SEQ ID NO: 277213 - protein, 79 aa, Zea mays
  Clone ID: MRT4577_184399C.1.pep
MLFHLLRYGFVLRIVLLLVLAWMTLLIFNAGMIVFPISLGRLVFEAVPRLPITHGIKCNGNLHVILPELVLYKFNLLCL

SEQ ID NO: 277214 - protein, 53 aa, Zea mays
  Clone ID: MRT4577_18439C.1.pep
FASLLHKLPRRMSTRTSPTPKYTFPNSTPPGALCRTHPDSSALIERVDLDSVP

SEQ ID NO: 277215 - protein, 51 aa, Zea mays
  Clone ID: MRT4577_1843C.1.pep
TRVLAFWFNPELVRFGLKKKKKKKKKKNPKKKKKKKKKKKKKKRKKKKKKR

SEQ ID NO: 277216 - protein, 107 aa, Zea mays
  Clone ID: MRT4577_184400C.1.pep
TWSARLICFCGVLKDLFSIGIFTPSDELAKEVAAASEVSGEKFWRLPLEESYCESRQSGVADMVNTVPTQGGCVQDALFLLNKKHTPLVSQCLSMRFFFLLFCATIP

SEQ ID NO: 277217 - protein, 70 aa, Zea mays
  Clone ID: MRT4577_184401C.1.pep
NSQRKEFNSLVILVSWRLWKQRNACVFDGVPAVSATFCKRFMRMLSFGELDSCGLNLDGVVEGRPFPIDS

SEQ ID NO: 277218 - protein, 223 aa, Zea mays
  Clone ID: MRT4577_184402C.1.pep
MEVVDLSPTSRPLSPLLSTAPARRLRLLPPRCFFGLRASPRTRGLGCVGGSLSRRHSFCKNGFFATSSSSASVEPATQELGTADAVEWSGDAIRRRFLEFYAARGHKILPSSSLVPDDPTVFLTIAGMLQFKPIFLGKEPRRVPRATTSQKCIRTNDIENVGRTARHQTFFEMLGNFSFGDYFKKEATTWAWELATKEYGLPAERLWISVFEDDIEAFNIWHN

SEQ ID NO: 277219 - protein, 453 aa, Zea mays
  Clone ID: MRT4577_184403C.1.pep
HFVRDFTGKTGQSVVLRLAGQGFKRVGLIGLGQSAPSTAAASRGLGESVASVAKAAQASSAAIVLASPSGIQEEFKLTAAAAVASGTVLGLYEDSRYKSESKKVHLKQVDIIGLGSGAEVDQKLKYANDLSSGVIFGRELVNSPANVLTPAVLAEEASKIASTYSDVFTATVLDVEKCKELKMGSYLGVAAASANPPHFIHLCYKPTDGNVKRKLAIVGKGLTFDSGGYNIKTGPGCSIELMKFDMGGSAAVFGAAKALGQIKPPGVEVHFIVAACENMISGTGMRPGDIVTASNGKTIEVNNTDAEGRLTLADALVYACNQGVEKIIDLATLTGACVVALGPSIAGIFTPSDELAKEVAAASEVSGEKFWRLPLEESYWESMKSGVADMVNTGGRQGGSITAALFLKQFVDDKVQWMHIDMAGPVWSDKKRAATGFGVSTLVEWVLNNSSSS

SEQ ID NO: 277220 - protein, 85 aa, Zea mays
  Clone ID: MRT4577_184404C.1.pep
MLLDGSGMSEEEEWERRGVADMVNTGGRQGGSITAALFLKQFVDDKVQWMHIDMAGPVWSDKKRAATGFGVSTLVEWVLNNSSSS

SEQ ID NO: 277221 - protein, 594 aa, Zea mays
  Clone ID: MRT4577_184405C.1.pep
MATAATSTTTSATVLASTLLRRLPRRLSVSRATPPAASSSSSSRRLPSLARHPLGHRTRMGHTAAAAAAAAEPALGLTKPNAVEPPQVTFSAKDIEFSEWKGDILAVAVTEKDLSKDADSKFENAVLKKLDGQLGGLLSEAAAEEDFTGKTGQSVVLRLAGQGFKRVGLIGLGQSAPSTAAASRGLGESVASVAKAAQASSAAIVLASPSGIQEEFKLTAAAAVASGTVLGLYEDSRYKSESKKVHLKQVDIIGLGSGAEVDQKLKYANDLSSGVIFGRELVNSPANVLTPAVLAEEASKIASTYSDVFTATVLDVEKCKELKMGSYLGVAAASANPPHFIHLCYKPTDGNVKRKLAIVGKGLTFDSGGYNIKTGPGCSIELMKFDMGGSAAVFGAAKALGQIKPPGVEVHFIVAACENMISGTGMRPGDIVTASNGKTIEVNNTDAEGRLTLADALVYACNQGVEKIIDLATLTGACVVALGPSIAGIFTPSDELAKEVAAASEVSGEKFWRLPLEESYWESMKSGVADMVNTGGRQGGSITAALFLKQFVDDKVQWMHIDMAGPVWSDKKRAATGFGVSTLVEWVLNNSSSS

SEQ ID NO: 277222 - protein, 101 aa, Zea mays
  unsure (1)..(101): unsure at all Xaa locations
  Clone ID: MRT4577_184406C.1.pep
SFPLSITTADRNHNHRAGSXVLFGDLSLHVNPDIKNSVVGFTTTPVAEPILTIQVLLLHLLMVLAAVWFYPVSHASNCNWIEFLSIFTTSRALQKTTYPVF

SEQ ID NO: 277223 - protein, 117 aa, Zea mays
  Clone ID: MRT4577_184407C.1.pep
MIKELAACCNSAVADVEAKISGSNVLLRTLSRRSSIPGGQAVRLIAVLEGLHLEVLHLNISTMEDTVLHSLVLKIGLECQLSVEDLAYEVQQIFGQDTAEQKPQAEEYHHLIYSAAL

SEQ ID NO: 277224 - protein, 115 aa, Zea mays
  Clone ID: MRT4577_184408C.1.pep
SFSTPPPRGGGPGPNSPKRGGINPGPWPAFYNFLNGKNLGVPQFNGLGENPPFPSWGKKEKAPPIPLSQNWANLKGKGNLKRLNFCKNSRKILAKPLLFFTQKGKSGKILFYFKK

SEQ ID NO: 277225 - protein, 77 aa, Zea mays
  Clone ID: MRT4577_184409C.1.pep
SPKGAAPKCCCCDIKGCGSKSSPPNGVLLMLDDWLLLVCFFLFFFVAFHFNCSFRSLLTLTLPPMVMRDTLLLNHRR

SEQ ID NO: 277226 - protein, 79 aa, Zea mays
  Clone ID: MRT4577_18440C.1.pep
ILTVFNPPQQTNRKYIIEQSRRLTHPGTHYFLPCPAQRNLNINMQKHSSMAFTASHWACFQITCGLITHPEACILSKQP

SEQ ID NO: 277227 - protein, 75 aa, Zea mays
  Clone ID: MRT4577_184410C.1.pep
ASPPKKKEQHKTLTYFRQRRSERQAKITAFVLMEIHSTSQQSCSTLHGTRPSFLLYVLLNLACFSIMPTDCPTGS

SEQ ID NO: 277228 - protein, 59 aa, Zea mays
  Clone ID: MRT4577_184411C.1.pep
TATLGRRPHTFVLWQVRKAPSCDFIGVLHACAAQRMVFRFVPRVLINVHSTRKYMCSLS

SEQ ID NO: 277229 - protein, 63 aa, Zea mays
  Clone ID: MRT4577_184412C.1.pep
PKKGIYTTKQFSWGPYPDLAREPNPKMGLPRFTGPLSNEKKGEGEKTPLLPPNKENLCAMLSP

SEQ ID NO: 277230 - protein, 170 aa, Zea mays
  unsure (1)..(170): unsure at all Xaa locations
  Clone ID: MRT4577_184413C.1.pep
MTMTPAPVANGAAAGAGGGMKRRGGRLWYAAAGALLVALLAVAVSYRSFPGVPSSPSSPGSCGCPAARKYTGMVEDCCCDYETVDAINEEVLHPILQELVKLPFFRYFKVKLWCDCPFWPDDGMCKLRDCSVCECPENEFPEPFRKPYNGLSPDSMMCQEGKPXAAIDKT

SEQ ID NO: 277231 - protein, 96 aa, Zea mays
  Clone ID: MRT4577_184414C.1.pep
PGVRWVSCRALGACHPCLPGVRLSWLWRLVGPCVSFLVLRRCRVSRSQGRSFGAFGSVVFSPAVWAVFGRSRFPVCYGPRCSSNTARWSGWAWRLR

SEQ ID NO: 277232 - protein, 94 aa, Zea mays
  Clone ID: MRT4577_184415C.1.pep
MGDSADWNEDNTALVCELFSEQVKSHNRSGTHLDKTGYKNVMDKFKEKTGLSYTKMQFKNKWEKMRIEYTNWKRLSKETGLGWDTAKKNLECDK

SEQ ID NO: 277233 - protein, 119 aa, Zea mays
  unsure (1)..(119): unsure at all Xaa locations
  Clone ID: MRT4577_184416C.1.pep
SEKRRPLGTRRIASKKQKQLATKKPSRPPGKRGDPGRAPAGGPGPPTGGRPRERGSDGKRGCLWEMGGRCQRRTSSRPHAXTGNQGVPNEGPNRQKGGRTNRKSWGPKTGRPSRKKDLP

SEQ ID NO: 277234 - protein, 277 aa, Zea mays
  Clone ID: MRT4577_184417C.1.pep
AEGCSGGATADAAAAAGGVAAVHEPAGGRAAAADAGRRRDHSLQAGRRELRPEDTQIRPESHPEPMTEREGTGLDIYLKGWSGSEERSVSVDELRNHTARSIHPSIFGSLALRQRLFVCVQAAGLVLASFQQEQNRPVDQLQNRYQGIWQLLLTTVREEEGVPVAGRQREEGSDRESHDELGLEHTSWAQPSRKKGGLGSDSDGGWRSLTFSAVMFLSVQPWLTELQNTCTVRCTTAVSTAFPFFSKKKSRNNVTDCSPPQAVIWKTTTCMNEGFTL

SEQ ID NO: 277235 - protein, 138 aa, Zea mays
  Clone ID: MRT4577_184418C.1.pep
RAGRGLGQKHSEPLRHPPRRPSSVVEGQGAAARVSRCCGGRRPSSTIRGDHRRLSAELWRSACAPIRGCRGKYYVVDAGYPNRDEYLAPYKGQLYHVPEWRNDPPPNGESGGSDPQEDLELKKQELELCQTGPKLTRR

SEQ ID NO: 277236 - protein, 205 aa, Zea mays
  Clone ID: MRT4577_184419C.1.pep
NVMVACDFNLNFTFISCGWEGSASDAGVLRSAISKGFHVPEGKFYLVDGGYANTPEFLAPYRGVRYHLSEFRRRRSSRASEYANHKEIFNHRHAILRNHIERAIGVLKKRFQILKVGTHHPIESQIKIPAAATVFHNIIRGLNGDEGWLDEQSTYIQPSDHIDLPEGDGNYQNDVESLNLQDHAGSILRDQIAIQMWERYNQNQS

SEQ ID NO: 277237 - protein, 56 aa, Zea mays
  Clone ID: MRT4577_18441C.1.pep
RQEVLMASARSQSRSSSLASTRVMSSARARCLSARVPGRGNHSREVCMVRGMIQIG

SEQ ID NO: 277238 - protein, 96 aa, Zea mays
  Clone ID: MRT4577_184420C.1.pep
ILFFYSNMGDSADWNEDNTALVCELFAEQVKAHNHSGTHLNKIGYKNVMDKFKEKTRLSYTKMQFKNKWDKMRIEYTNWKRLSKETGLGWDTAKKT

SEQ ID NO: 277239 - protein, 216 aa, Zea mays
  Clone ID: MRT4577_184421C.1.pep
QCQIRYIQPKDPNFHTVHRRITNDQRMWPHFKSCIGAIDGTHINPTPPKKDLIRFMGRSGKPTQNVMGVVDFDMRFIYASIGQPGTMHDTTVLYHALEADEDLFPHPPLGKYYVVDAGYPNRDEYLAPYKGQLYHVPEWRNDPPPNGEQELFNHLHSSLRNVVEHTLGVWKMKWRILLKMPTYPMDKQKMIVAATMCLHNFIRENNALDEDFQRCD

SEQ ID NO: 277240 - protein, 66 aa, Zea mays
  Clone ID: MRT4577_184422C.1.pep
SSSLCVPFPRVFAIESLTCSVCQAKVDWIGPSLRFSAFSSFTKVCSDPLVESKGVFLYDSSPFGFR

SEQ ID NO: 277241 - protein, 126 aa, Zea mays
  Clone ID: MRT4577_184423C.1.pep
PMGFFPPQILPGFFPPKVSPSLRHFPQPRFPPLKGRWFFLNNLGGVPLFLAPPPLYKKRIFGWLSQNPFYPPFPRGGVPLAPPFLAPPLTNPNPQIFPLEQNLIFSPPPFFSLEFPFFFSQSIISF

SEQ ID NO: 277242 - protein, 67 aa, Zea mays
  Clone ID: MRT4577_184424C.1.pep
LLVLVCGVVLWLICGPNSSWYGRPICLVLLACQSFSIKYLPVTRGAGGANPPLTRKSPPAVVGVGVR

SEQ ID NO: 277243 - protein, 107 aa, Zea mays
  unsure (1)..(107): unsure at all Xaa locations
  Clone ID: MRT4577_184425C.1.pep
LGPGERPHLLWHIAASRRQPGVRGSFKSWSTKYPPDQNIPDEHHTLVPYKPGEDRKLGSLACXGEMSGRXPAAVVALLGENSRDAMIDGGANSGCGGSREHALYTHG

SEQ ID NO: 277244 - protein, 104 aa, Zea mays
  unsure (1)..(104): unsure at all Xaa locations
  Clone ID: MRT4577_184426C.1.pep
NEITIFLKRTTWPTRVAHACVLVWLSVEMTREARQRQEARIDGITIGSAYIDNGWPALASATQRXAILLLLVAELRQARRGRDTEGIHVAAQTGVVAAARGRRR

SEQ ID NO: 277245 - protein, 70 aa, Zea mays
  Clone ID: MRT4577_184427C.1.pep
QSLKTRDKTYRPRHAGVNNLLIKRAYYYEFLMVLIMNELVVEKDKDFVKDPSSLYTYISLKLNGLFRRSR

SEQ ID NO: 277246 - protein, 92 aa, Zea mays
  Clone ID: MRT4577_184428C.1.pep
HLNKLILNFCMTGYNMNNQDSQWRKMQTLIDLCNQGTDEGRRAAFFVPCILGSFWTFISFLIYFRAALLRFREKKGTDEGVTIADEFKFCII

SEQ ID NO: 277247 - protein, 79 aa, Zea mays
  Clone ID: MRT4577_184429C.1.pep
DVRSKEHNYRVKKFLCKKKKKKKNKKKKKNYKKTKKKNKKKKNKKKKKGKYDLKKKNKRASFWGGLFMGPPFSNVKFFL

SEQ ID NO: 277248 - protein, 60 aa, Zea mays
  Clone ID: MRT4577_18442C.1.pep
GSDIHRKGSPPWIHKWALSICHNAAHGTNHGAWHVRYSTTFPATSLICASRGLSYKCSWP

SEQ ID NO: 277249 - protein, 98 aa, Zea mays
  unsure (1)..(98): unsure at all Xaa locations
  Clone ID: MRT4577_184430C.1.pep
TQKTPVTXSTRXRXRRHGSPHGWSVTXGXXXERAPHPPCRWXASAYAEVXRRPXSAHGLDKXXMVWGARAXHAEHXSKGPAASSAWLPCFLADAPMAW

SEQ ID NO: 277250 - protein, 64 aa, Zea mays
  unsure (1)..(64): unsure at all Xaa locations
  Clone ID: MRT4577_184431C.1.pep
TAHLGSFSYGMFATRGCDRFVNVWDDINKRILYQYSKVXSSIVALSFGKDGHLLAVASNYTYEE

SEQ ID NO: 277251 - protein, 116 aa, Zea mays
  unsure (1)..(116): unsure at all Xaa locations
  Clone ID: MRT4577_184432C.1.pep
HLPYAHMTHPGSLCHQPPSSLLKDPPKSPTPSHSAPEKSRDNGEHDGHVLQVRGGVSIKEGPEALVGGPPLSPSVVPAPSAFRLRLPGRDTIPXSLEDMPSSHSVHWHLSHPICPI

SEQ ID NO: 277252 - protein, 36 aa, Zea mays
  Clone ID: MRT4577_184433C.1.pep
CMSGRPYYFKFNKQKLCMSHEKRVFCEVIKWKYSDS

SEQ ID NO: 277253 - protein, 51 aa, Zea mays
  unsure (1)..(51): unsure at all Xaa locations
  Clone ID: MRT4577_184434C.1.pep
NVLFGGLVAKLAFXCHTSRRLVGLKCLSAGPSPILWLNRTCKLNLFPCGLC

SEQ ID NO: 277254 - protein, 74 aa, Zea mays
  Clone ID: MRT4577_184435C.1.pep
EEKVAGFVLKSLKADLKPPEIPLLLVAPTKKVGRCGFEKSPFLDSPFPGGYLGYPGGKLDNVPVVVSIVRKFEV

SEQ ID NO: 277255 - protein, 133 aa, Zea mays
  Clone ID: MRT4577_184436C.1.pep
MAALKLRLRHLCCAVVLIALSISCCRGQGGGGAAGAAGGAAGGAVVPGTQDAIQIVSQAALCFDNRQVINGCLQAMGNNVNSNGGNSNGGSSNGSGGGSSGSGGSSNGSGGGGSSNSGSTATMCQGPCFGQMM

SEQ ID NO: 277256 - protein, 293 aa, Zea mays
  Clone ID: MRT4577_184437C.1.pep
PAGRGRVGIKLLASLPRPSRVGTFLEFLPSADHRFRIPTRHRQIPGGQNAMELPDERVQVDALERHLLAGLSSNDYNGSFEDEVLYDASFAEMEDNFVKYQIAQWTLLSLLLIVAWGVGVLMLLYLPIGVYVCRRDFHSRKLYLTPHAVIYKVNKPFAFPCFGVFKKEKYWILPSISDVVVEQDYLQSIFGVYSIRIENISVRKPPSCDVKITGVAHPHDFRKAVVVHLLNTRNQKTSSDDQQSTNLNYAASSSEASLGDLMLEKLDEVEISVKKMQALLQGPEISKFKTTSG

SEQ ID NO: 277257 - protein, 129 aa, Zea mays
  Clone ID: MRT4577_184438C.1.pep
YFCYPDVQEILLYPGFENTPVKSGMSLALICCVFFFLDCIVGFPHHSKMSSMVSHLLTLKRGLTIIDILLTPCQVFGLWCHLIVPLVMFRSYHPGSRRTWLTGEFLLPLRIPLKVYRGRILFCAIQFNK

SEQ ID NO: 277258 - protein, 126 aa, Zea mays
  Clone ID: MRT4577_184439C.1.pep
RCILKSWFSTRNMALVADCSMELPDERVQVDALERHLLAGLSSNDYNGSFEDEVLYDASFAEMEDNFVKYQIAQWTLLSLLLIVAWGVGVLMLLYLPIGVYVCRRDFRSRKLYFTPHAVIYKVFAC

SEQ ID NO: 277259 - protein, 62 aa, Zea mays
  Clone ID: MRT4577_18443C.1.pep
LRRWYSYYGLRLRAIELSHLDFSSTPVDSDANHVDHTNCVISQWSHHESSDYVTKISIRTEP

SEQ ID NO: 277260 - protein, 85 aa, Zea mays
  Clone ID: MRT4577_184440C.1.pep
DWLNNVLEPLSSFLSRLFTHFSVLSSVVSPISLGGRARAVLGAPFPWGGGGCPGPCRSPPPRGAWGVLCSWGGFVCLPPPRPPLR

SEQ ID NO: 277261 - protein, 71 aa, Zea mays
  unsure (1)..(71): unsure at all Xaa locations
  Clone ID: MRT4577_184441C.1.pep
PTRPPASGRESTIVYSTSHITYFAFLCSXVFLQVLLRRRGGRMFTSSYSFPSPPTITAGLGCEPNLNHRPQ

SEQ ID NO: 277262 - protein, 267 aa, Zea mays
  unsure (1)..(267): unsure at all Xaa locations
  Clone ID: MRT4577_184442C.1.pep
LAATNSASPSASSSSSLVSVEEARXEKMAHGYLSDGLMGRAAQERKKGVPWTEDEHRRFLAGLEKLGKGDWRGISRHFVTTRTPTQVASHAQKYFLRQSSLTHKKRRSSLFDVVENAERAATSSIKGMERLRLKDAITTATATGSAEPGTGTTAQLPPALSLGVGRPPARPDHAALPPSSLLSLQLPRCSAGIGRTAPSLALAPPKHSHPSSPLTAAKAGGLAPDLELKISTARQSEHQQQVQMGPSLPPPPPPPQRTPFLGTIRVT

SEQ ID NO: 277263 - protein, 63 aa, Zea mays
  unsure (1)..(63): unsure at all Xaa locations
  Clone ID: MRT4577_184443C.1.pep
YPTGFKCVSNXQPPSVVPGGDLANVQRSVCMMSNSTSVVEVVSRIDHKVDLMYGKRAFVHWYV

SEQ ID NO: 277264 - protein, 46 aa, Zea mays
  Clone ID: MRT4577_184444C.1.pep
SQLAPSHLALGPNTISRLRVPLRTLIVIVESHKNLERGSVHALLSS

SEQ ID NO: 277265 - protein, 53 aa, Zea mays
  Clone ID: MRT4577_184445C.1.pep
PPIGQSPTCLWPVILSGPPRASGIKPGVPFSFPKGCNMAARPVGSKCGDYPLP

SEQ ID NO: 277266 - protein, 117 aa, Zea mays
  Clone ID: MRT4577_184446C.1.pep
KKPLGGPPGGPVGWPPGFGVRELGFFSLGPKVNPKVGWGFPKGLNLGGGKVNWGAKRPRLGSLRPPPGVGVKSPQKFFLGAKVFFLGGFKPGPPKRGIVLPRKGFLPPNKRVFLVFF

SEQ ID NO: 277267 - protein, 204 aa, Zea mays
  Clone ID: MRT4577_184447C.1.pep
MGSTATDMAASADEEACMYALQLVSSSILPMTLKNAIELGLLETLVAAGGKLLTPAEVAAKLPSTANPAAADMVDRMLRLLASYNVVSCTMEEGKDGRLSRRYGAAPVCKFLTPNEDGVSMAALALMNQDKVLMESWYYLKDAVLDGGIPFNKAYGMSAFEYHGTDPRFNRVFDEGMKNHSIIITKKLLEVYKGFEGLGTIRRR

SEQ ID NO: 277268 - protein, 53 aa, Zea mays
  unsure (1)..(53): unsure at all Xaa locations
  Clone ID: MRT4577_184448C.1.pep
VRFPGXPSVRPASGXVXILQFVHLFYPXLWILQNNRWRSHDATGREDERVSLL

SEQ ID NO: 277269 - protein, 92 aa, Zea mays
  Clone ID: MRT4577_184449C.1.pep
GSRAAHRGRRLLERGAVPRGHDEGRARRDLAFLLALLRRRGPPRGRSLSSCICMHAADLPPRVAWLWAVRADRFSRAIDRHACVSRFSLSAA

SEQ ID NO: 277270 - protein, 52 aa, Zea mays
  Clone ID: MRT4577_18444C.1.pep
DPFVCEGCCTVAFECNFNMIAVGILILQVRTTISYFVGVDSLERECMASHAR

SEQ ID NO: 277271 - protein, 113 aa, Zea mays
  Clone ID: MRT4577_184450C.1.pep
RAAQNAREDPGRRRQRHDPTPYSRPLDHQHHRPPCPLTYARCWTTPPMAPLARHTPRTLSSVTAGGCMRRLPTRPHGAPCPSATGLWRGTTWRDLGTRLTPPSADTDALVFGF

SEQ ID NO: 277272 - protein, 86 aa, Zea mays
  Clone ID: MRT4577_184451C.1.pep
NPPPKKKPPMGKKIIKGPFYPKRDPPLFLHPPVPVNRSRKKKPKAFCSRPFFYRPGRLNKKGVRPKFLTPPGLFCGYVMVFQINWV

SEQ ID NO: 277273 - protein, 56 aa, Zea mays
  unsure (1)..(56): unsure at all Xaa locations
  Clone ID: MRT4577_184452C.1.pep
FAGPHPPPRAELAPSAPSSRDRARELAEGRENADHRIALGSHQEVYHPGALKAAXA

SEQ ID NO: 277274 - protein, 88 aa, Zea mays
  Clone ID: MRT4577_184453C.1.pep
QLAEANTMFHELKGKAFALFHAWNILKNEPKWSEDKGSKVGNSNGEAHSNVERPLGRKAEKEKAKGKKRVDDEPDPLLEEVKKIRESR

SEQ ID NO: 277275 - protein, 230 aa, Zea mays
  unsure (1)..(230): unsure at all Xaa locations
  Clone ID: MRT4577_184454C.1.pep
MELVLVKPAAGALVEVGSGSVAGAGSIPAMVAAQQEILHEQVDQLQRLVVAQCRLTGVNPLAQEMAAGALSIKIGKRPRDLLNPKAVKCMQSLFALKDILGKKETREISLLCGVTVTQVREFFTVQRSRVRKFVRLSQEKALRIETPKEQDNSYSINTEQIPPDIEAQAEVIEPLRTLEPVVLQSSLQPTCVSQISSQSMELQQSDLQHMEVFPNSLQQXRGTHNIAAPI

SEQ ID NO: 277276 - protein, 95 aa, Zea mays
  unsure (1)..(95): unsure at all Xaa locations
  Clone ID: MRT4577_184455C.1.pep
LSRPXPGVLQIGLPVYLYKQGSETDYEVSFXDERWATQAFELGCGENXMTSQRVARGASVTHTHDREYKITGAXEGAPLIIRDRXPTKTAFEEAY

SEQ ID NO: 277277 - protein, 175 aa, Zea mays
  unsure (1)..(175): unsure at all Xaa locations
  Clone ID: MRT4577_184456C.1.pep
SEHLVLSVCLLLLLLLSTASCATDSDYCSSNDXSRXKVSGVQIATDPVEPGKCATFKISASTDTTIXEGXLLIDILYFFFYVYSXTRDICXETSCPATGEFMLSHQXTLLTAYAPRGSRYAIYMRIGGDDNQELTCISTLARMRLPGVQLNASKTAHERQPAHGCNYVKRTLYPY

SEQ ID NO: 277278 - protein, 39 aa, Zea mays
  Clone ID: MRT4577_184457C.1.pep
ELSTQHSATYNYTSEMYVEIHHITNTVVPYKVFLQVKML

SEQ ID NO: 277279 - protein, 127 aa, Zea mays
  unsure (1)..(127): unsure at all Xaa locations
  Clone ID: MRT4577_184458C.1.pep
PFERARVVFFYQRGDPAGVAPRFAHQASTAGVFGALVLAGGLFNRCLSFFSCPPLSVSSLLHPHSHMLVALVPSCPRCKADSWRSPVHLWFFACVPPFIACCLEVQQKPFSPPPAXXXXFXXXXXFS

SEQ ID NO: 277280 - protein, 53 aa, Zea mays
  Clone ID: MRT4577_184459C.1.pep
GGSYRDVFSVALRSLVVMHRQLLLLMSNSIVQLVVDTLSGRRHRRERRSRPPR

SEQ ID NO: 277281 - protein, 150 aa, Zea mays
  unsure (1)..(150): unsure at all Xaa locations
  Clone ID: MRT4577_18445C.1.pep
WGRASGAPAGCGAPSAGCAAPRAALGWIASPGPRGAWPLGPSLHCGGCFFFFARFAPPPRAVLPFPVGGGVGFNMVWAAVGXFACLHKTQFPLLSVRLTFVRLFCPFACCFGGGLGGPPSAVLPFWGFSGPVLSCVGLLFVPLPRALLSP

SEQ ID NO: 277282 - protein, 59 aa, Zea mays
  Clone ID: MRT4577_184460C.1.pep
IYKQPQLCAFFATPTIYKAYTTLGNPKQKQNFLLSKKRYFYNLGKRKPPPMAALKMFFL

SEQ ID NO: 277283 - protein, 114 aa, Zea mays
  Clone ID: MRT4577_184461C.1.pep
TTRLDDLTDYSAVVAGGALNYAARAELAAVPGDELLHNHMFLARVNGYGGYKILLPDIEKWLDGRAPELHARLDDEVRAVVPPVCGSARDAITLSHVEKMPVETSSAWETVGTN

SEQ ID NO: 277284 - protein, 81 aa, Zea mays
  Clone ID: MRT4577_184462C.1.pep
RKATFCSIFRKVIVSCGISGKDIHHMSFVVEQEYVMHDKVYERLPIDIVDQLRALDGNVSGVLEQRWCRAVSNLLVVVYYV

SEQ ID NO: 277285 - protein, 83 aa, Zea mays
  Clone ID: MRT4577_184463C.1.pep
ALGTPPGQGDFLGFKGPSPSNPLRTNFFERLGVPFPKRGFFPKFFFVGGGSFLAYVRGWGSPALLPIKKGPQEPPHPGPRAKI

SEQ ID NO: 277286 - protein, 71 aa, Zea mays
  Clone ID: MRT4577_184464C.1.pep
WTNYVHLGFGLKNLIPFMNRARESTYFVWKSHTPDRAANLYTLRSIHLYTDLSLATSYLHSESPDETKNWP

SEQ ID NO: 277287 - protein, 83 aa, Zea mays
  Clone ID: MRT4577_184465C.1.pep
KTISRKRIMYKVYRFNIYVSLAIELSLMKVIRSRFSDTCSRVLNTTKFGVDPRLIGGLRMFHLISRLVCMRNLWFLHLRSMGW

SEQ ID NO: 277288 - protein, 98 aa, Zea mays
  Clone ID: MRT4577_184466C.1.pep
PHMSVDCHCTWIRAVAQAAVSDMVEVAAVTTEGHMVSQVFRHALAVVDRLLYPYDTHCVPYQVIVRVCTVRVQWTVGVIGQVASVGHLRISEVPARPA

SEQ ID NO: 277289 - protein, 87 aa, Zea mays
  Clone ID: MRT4577_184467C.1.pep
RPARPRATGILSFLGDTGTRKNYHLPTIYPRRKCQMVQKRVTKDHDSSLASCHFVPPCHDSAGPLNLDVNDKMITGDQLAIGKGNNT

SEQ ID NO: 277290 - protein, 47 aa, Zea mays
  Clone ID: MRT4577_184468C.1.pep
GRRRGHWRQVVSTGSEGKHIEGEARGRTLQERRGTGCGDPNRLLSSL

SEQ ID NO: 277291 - protein, 105 aa, Zea mays
  Clone ID: MRT4577_184469C.1.pep
MASRSSAMEGGAAIQRRNAVKRHLQQRQQEADFLDKKVIASTYFSIGAFLVLACLTVSLLILPLVLPPLPPPPSLLLWLPVCLLVLLVVLAFMPTDVRSMASSYL

SEQ ID NO: 277292 - protein, 52 aa, Zea mays
  Clone ID: MRT4577_18446C.1.pep
IILLFISGQNSLVCIAGDGGDYNNSITLLEPGAIPISKAPHKLDAYPQRRKM

SEQ ID NO: 277293 - protein, 106 aa, Zea mays
  unsure (1)..(106): unsure at all Xaa locations
  Clone ID: MRT4577_184470C.1.pep
MMSKLEQIAETYRFRVKKQDGLLKLQGSKQGRKGQLAIDAKIFXVTPAFHVVEVXVGAFHGRKKSAGDTLXEYEMFCSKGLRPSLSDICWSSRSEENMAPSVVQPS

SEQ ID NO: 277294 - protein, 83 aa, Zea mays
  Clone ID: MRT4577_184471C.1.pep
IETQIMMNWHGYGGHAHTQQPDPCESNTDTESRFFDNLHTERAPGDAGTSAAKTAQDLLTTHARRSTRWRVLYFGMLGGGTGW

SEQ ID NO: 277295 - protein, 126 aa, Zea mays
  Clone ID: MRT4577_184472C.1.pep
MNRELLAFCSWSTSNRLDRSNPLEWEMMSKLEQIAETERFMVKKQDGLVKLQGSKQGRKGQLAIDAEIFEVTPAFHVVEVKKSAGDTLEYEMFCSKGLRPSLSDICWSSRSEENMAPSVVQPSIIE

SEQ ID NO: 277296 - protein, 213 aa, Zea mays
  Clone ID: MRT4577_184473C.1.pep
METTPTSSTRAAPTAWRGSPWTRSPSSGSPSPAVMLAQPHGSSSLKDVQVAFSNADHKDSSSKVEQPADSSLKPASLNAFDIISHSRGFDLSSLFEVDQEQKASNSRFMTQKPASAIVSKLEQIAETERFMVKKQDGLVKLQGSKQGRKGQLAIDAEIFEVTPAFHVVEVRKSAGDTLEYEMFCSKGLRPSLSDICWSSRSEENMAPSVVQPS

SEQ ID NO: 277297 - protein, 459 aa, Zea mays
  Clone ID: MRT4577_184474C.1.pep
MEKKPTILMNRYELGRTLGQGTFAKVYHGRNLASGESVAIKVIDKEKVMRVGMIDQIKREISVMRLVRHPNVVQLHEVMASKSKIYFAMEYVRGGELFARVARGRLKEDAARRYFHQLVGAVDFCHSRGVYHRDLKPENLLVDEHGNLKVSDFGLSALRECQKQDGLLHTTCGTPAYVAPEIINKKGYDGAKADIWSCGVILFVLLAGYLPFHDANLVEMYRKISRADVKYPQWFSPELRRLMPKLLEPNPNNRITIEKLVEHPWFKKGYRPAVMLAQPHGSSSLKDVQVAFSNADHKDSSSKVEQPADSSLKPASLNAFDIISHSRGFDLSSLFEVDQEQKASNSRFMTQKPASAIVSKLEQIAETERFMVKKQDGLVKLQGSKQGRKGQLAIDAEIFEVTPAFHVVEVKKSAGDTLEYEMFCSKGLRPSLSDICWSSRSEENMAPSVVQPSQLEPSS

SEQ ID NO: 277298 - protein, 131 aa, Zea mays
  Clone ID: MRT4577_184475C.1.pep
MQPATDTEVVGGAVKKEPEEIVVEVDGDGDEEAEKVVKRRRRRRKKTTACDPHKKRACVDCTKRCARIHGQPASPSALASSSSNARPVPAVPSFFKVMLGYFSEDMVCFVFLYFLFSGLLASISLHVCIVL

SEQ ID NO: 277299 - protein, 139 aa, Zea mays
  Clone ID: MRT4577_184476C.1.pep
CNDPFQRTECSACQILAKVSLCLHVCLIFPQRFCFFRSITFTSAMLIRFLSNISHWHFRQPVIIILSGLLCDLIVWAFRSSGSEMPAELPSNSRLLLVSSEQLPLCSVVPLHESLSLLKRVCIVFFLPKSKTLFLLAAR

SEQ ID NO: 277300 - protein, 120 aa, Zea mays
  Clone ID: MRT4577_184477C.1.pep
DAITIKQTGSGDVSYIIGGGAFHAEDKIVQHNGAGTVSIKNFYANDFGKLYRACGNCSTSYARHVIVDNVALASGSAGVGINENFGDTATLSNICTNGKPTTANLCCRYTGTTPGNEPTK

SEQ ID NO: 277301 - protein, 77 aa, Zea mays
  unsure (1)..(77): unsure at all Xaa locations
  Clone ID: MRT4577_184478C.1.pep
GLRANXQRLKTYKAKXVIFPRGAPKVKAGPFLQRRLPPLSQVQGGYIPFICGEKRSFKVVKVPDQIKSFAAYGKVPL

SEQ ID NO: 277302 - protein, 117 aa, Zea mays
  Clone ID: MRT4577_184479C.1.pep
GGGPHVFLGRICSFVSAAHGFRALISPGYGRATPRRVLVSKQGSPQGGTVVPSQEPPFAVEIKKTAQRIKKKKLAPGFVFGRVLGKKTTFFPFPKIRIWAAHFYILPSPIMPVLGHR

SEQ ID NO: 277303 - protein, 258 aa, Zea mays
  unsure (1)..(258): unsure at all Xaa locations
  Clone ID: MRT4577_18447C.1.pep
MASPLLCLAAAALAVAVLVSATEAWRATPPPLPVLPIPSAPQLRWQRREVIMFFHFGMNTFTDSEWGTGSEDPSLFRPAGLNATQWMDAARAAGASLVILVAKHHDGFCLWPSDYTAHSVRASPWRGGRGDVVREFVGAARARGLDAGLYLSPWDRHXASADAWEDAWADAWDYEGQLHELLTGYGSVSEIWFDGAKGNNATNMTYHFQEWFQTVKQLQRSINIFSDDGADVRWVGDEKGYAGTTCWSTVNRSMITIL

SEQ ID NO: 277304 - protein, 98 aa, Zea mays
  Clone ID: MRT4577_184480C.1.pep
LSVRLEGCNTSTDTSLSYTLESCSQVAGLDLNNCMVSDYGGKGLAAKRQLKHGALYAYGCVKERMRALTLLGRCSIRGGARHCRIAISSTTTSFISRS

SEQ ID NO: 277305 - protein, 90 aa, Zea mays
  Clone ID: MRT4577_184481C.1.pep
QMRMMDVQTEQHELRMMMQRERAAAGCNSLYEPDVMQQQQDVLVAQGLNPMDKKKGHNMPCMGGLYHDQYQMHSYRTNPCGISGVITPYY

SEQ ID NO: 277306 - protein, 76 aa, Zea mays
  Clone ID: MRT4577_184482C.1.pep
CILIRQKKKKGKKKKKKKKKKKKKKKKKTQKKKKKKKKKKKKKKKKKKKKKRGARFKRSKFTSPCFAKKKFFFWGP

SEQ ID NO: 277307 - protein, 72 aa, Zea mays
  Clone ID: MRT4577_184483C.1.pep
IRKAGTLTQSIRSCIAGATHAVRFYITMTSAVFELLLNPVDFRLLFCMEETRSRMLATTERIYWTRSIKDEI

SEQ ID NO: 277308 - protein, 48 aa, Zea mays
  Clone ID: MRT4577_184484C.1.pep
GCTLSIAFADPAARLRLNSSAAGCLSQVLRSDINAHPRRSTAFPYFSR

SEQ ID NO: 277309 - protein, 74 aa, Zea mays
  unsure (1)..(74): unsure at all Xaa locations
  Clone ID: MRT4577_184485C.1.pep
SLVDPLIRRIPEAILYYRDYMVPXATXINLKFCQTTSFPNHTNLLHLTFPFQKPSYFHTISIFTIHILLPYILS

SEQ ID NO: 277310 - protein, 119 aa, Zea mays
  Clone ID: MRT4577_184486C.1.pep
PPPVFDQNPVGVFAVSKVFLPKEMFNRGDFGSPPMVPPSVGMAPGDPGAEQTPQGGFSSPPDFPGEDRESSPALAPPKGAFWGGVGPMYLHLFLFLVGDFGRACCFFASLGPVFVFFPV

SEQ ID NO: 277311 - protein, 83 aa, Zea mays
  Clone ID: MRT4577_184487C.1.pep
SNLAKGIKSSYPLGPLSFIVQFGPFVSGGCMETSFFIKIVNNFQWHEISNWVYLRSFFCACHGAGVFLSSRVCRIVSPNIFQY

SEQ ID NO: 277312 - protein, 90 aa, Zea mays
  Clone ID: MRT4577_184488C.1.pep
NPRGGGGERSPWLGPPRLGSCEPIIWGGWSPNPGPLIQLPRPPHPILGGPPLKPPPGGVQVGGPNPNPWGAVFPFFPLGCQAPTGGPPPR

SEQ ID NO: 277313 - protein, 84 aa, Zea mays
  unsure (1)..(84): unsure at all Xaa locations
  Clone ID: MRT4577_184489C.1.pep
KKRLHAYCGMNRNPFESCYIRAVYCRRRTNLPSAEGVMHRTISFISSSIYGLFYSTRLSFVLIVLELEASFXRFLMRNLSILFL

SEQ ID NO: 277314 - protein, 71 aa, Zea mays
  Clone ID: MRT4577_18448C.1.pep
SGNNAEYAVDTPGNVPGSVKEPGFGWIAGFLVASSFGGLLTLIPLRKVLHFISHAGNRLLLLMMMKKKSTS

SEQ ID NO: 277315 - protein, 58 aa, Zea mays
  Clone ID: MRT4577_184490C.1.pep
KKKYRRFSNRDSFLLGKTPGCIWLTCDQQGLTHGGPHSTGQPRAELTKKPTITSLGSI

SEQ ID NO: 277316 - protein, 59 aa, Zea mays
  Clone ID: MRT4577_184491C.1.pep
ARATRGEQVINNYGDLMNVDSCRSVNMVESVIFEWSRFWWGVTPTDLKPHYCVRVDAPR

SEQ ID NO: 277317 - protein, 86 aa, Zea mays
  unsure (1)..(86): unsure at all Xaa locations
  Clone ID: MRT4577_184492C.1.pep
VCWPLFDEKQTNCRYKSTEWGIGMEIGNDVXWGEVMALIREAMEGEKGWNMCRRVMELKGSAVVAEKLNGRFMCNVDRFIDEVLLA

SEQ ID NO: 277318 - protein, 84 aa, Zea mays
  Clone ID: MRT4577_184493C.1.pep
APADPSNVKTTRRIRPQMVPIIFPLFESQPNWAIKAVVQDSDHPEQFFKEILCDLCVYNKRGPNQVTHELKPEFNKSPGPANAA

SEQ ID NO: 277319 - protein, 163 aa, Zea mays
  unsure (1)..(163): unsure at all Xaa locations
  Clone ID: MRT4577_184494C.1.pep
LAPSAIIPQFLPPVTLMGXFEHTAXVQAYQVHXALGGAALXQPLANWHHHSLGNLTLQTMEPHQHHQFLALIGPPSXVNPVAYWQQKLLASTQLAXLANVAAYQQQHRLHQLMPALSQLAMVNPVAYLQQQQLLSSSPLAVGNAPTYLQQQLLQQIVPALTQL

SEQ ID NO: 277320 - protein, 76 aa, Zea mays
  Clone ID: MRT4577_184495C.1.pep
LALLVKDAFTLYTQPNQILHNQLGTLCCDLDMQIALKEATIGAIDYRKTKVTCAAMPYLIAGLGKPKLRIMCPIWK

SEQ ID NO: 277321 - protein, 154 aa, Zea mays
  unsure (1)..(154): unsure at all Xaa locations
  Clone ID: MRT4577_184496C.1.pep
YHFQSNDDDGAPNTYPYHVGTARKNVFIVIKNRPXNVVEVSTSKTGNIGHAXCHFVHIHIFNGKKLEYIDPSSHNXDIPHGNRTEYRLIDMSDDGFVILLTSDGNSKDDLRLPTDDTLACHINEGFESWNDLVVTAQSAMRDEDICAMNDDGPE

SEQ ID NO: 277322 - protein, 37 aa, Zea mays
  Clone ID: MRT4577_184497C.1.pep
SLLKSNSFIRQPILLYFLSTQCSALPNPLNLRKLAFP

SEQ ID NO: 277323 - protein, 37 aa, Zea mays
  Clone ID: MRT4577_184498C.1.pep
MGAPFFPKKKKKKKKKKKKKKKKKKKKPKKKKKKKKK

SEQ ID NO: 277324 - protein, 132 aa, Zea mays
  unsure (1)..(132): unsure at all Xaa locations
  Clone ID: MRT4577_184499C.1.pep
AAERCFVKAYVCVHVGAVLCLVYPQPPENYVITAYSCPRRAAQFSDAIQDLRXPNDPNLRAPACHAVDAAFVASVQYAGRPLARCGMPKHWGSPTSALPADGSSLTLGGYMPARSAVLCRRVGLPGGYWPVP

SEQ ID NO: 277325 - protein, 89 aa, Zea mays
  Clone ID: MRT4577_18449C.1.pep
MSAPNANAPNEGIVGQVTNSISNAAQYVSETVQGAAATSSKEANKEQAKGNVPGKDSIGDRVSGALDAGSDKINEKKHETSASANKQGI

SEQ ID NO: 277326 - protein, 90 aa, Zea mays
  Clone ID: MRT4577_1844C.1.pep
CFPCCLHSYFPHTFRHEVVFSYPQLFINPPSPESPMFCLDMHSLLGVGCAYPVCNYHYTLGLWVESKASAAIHVITCLASRFLRLNLLFL

SEQ ID NO: 277327 - protein, 72 aa, Zea mays
  Clone ID: MRT4577_184500C.1.pep
NQRNHCIFWGGQVLQHITLVNNQLKWRPSLTLFELFRPRQLKPPRLSSLSKPGLNVEACPRLALGNYRFLGR

SEQ ID NO: 277328 - protein, 115 aa, Zea mays
  Clone ID: MRT4577_184501C.1.pep
ADPLVDTYSGGAEQLETWRLQVLLPPPPPECCWSCPRLVTLARDEDPYLFFVCNVTFGTRSLLGVPQNVIIINSDFPGTSINCSASSIIVVNVLIHLDHRLSSTCTGMHHMKNSW

SEQ ID NO: 277329 - protein, 56 aa, Zea mays
  Clone ID: MRT4577_184502C.1.pep
PVRPSVLLKKKKKKKKKKKKKKKKKKKKKKKKKKKKKKKGRAVPNFITRPRGGFLF

SEQ ID NO: 277330 - protein, 11 aa, Zea mays
  Clone ID: MRT4577_184503C.1.pep
FISGSVGIMAY

SEQ ID NO: 277331 - protein, 329 aa, Zea mays
  unsure (1)..(329): unsure at all Xaa locations
  Clone ID: MRT4577_184504C.1.pep
MASPSCFLFRPRPPLCSRRRRSSSRSLYLLSKQSLHRLPSPRTCRRPVAEQLVLRSLPPGNGRRMGATGFACYCSYDTENGLPTPSPDKGKSSDEWPILRRWDVPWEWPTISLTMVACAVXSFLLTGIAEQSILEQLGFRAGETTLDEKAEILFLGQXFNEPLKLQNGWLLWSAIGLFVAIVAIALAGAAMTFLNGETPQRETDSLVLLLPLIGSSNISTACLLGITGILAPILEETVFRGFLMVSLTMWFPTPYAVLMTAAVFAFAHFTPGEFPQLFVLGVVLGFSYAQTRNLLTPIAIHAVWNSGVILLLTFLQMQGYDIREILQAS

SEQ ID NO: 277332 - protein, 72 aa, Zea mays
  Clone ID: MRT4577_184505C.1.pep
GSGFTMPRWLNDVRKVVIVTSLSFVLLYVAIIVCQLGNCCCKTLSQALLLHDGLAIGLHILKSLVKHLAIWL

SEQ ID NO: 277333 - protein, 40 aa, Zea mays
  Clone ID: MRT4577_184506C.1.pep
IKNIGKRKIGKYSTVNIVPKTDQSSTEKPLDNMMVHWLRG

SEQ ID NO: 277334 - protein, 136 aa, Zea mays
  Clone ID: MRT4577_184507C.1.pep
KKKKLRARSVFLFKLKNPHRSTLPQGLGGYKNSKTWDKGEKIQIGHDHHFKKKTPPALKPPFPRDFEKTKPYQGPNHPFLVGFFLKLTTKGQQHWEGGPKKKRWKTFEGQTKYLRRRGAKRGGENPFYQNDHFDQN

SEQ ID NO: 277335 - protein, 50 aa, Zea mays
  unsure (1)..(50): unsure at all Xaa locations
  Clone ID: MRT4577_184508C.1.pep
MMPGMPGSRKMLGMHGLDNDKWEAARSKSIPREHSIRKQGXLLNKPSTVQ

SEQ ID NO: 277336 - protein, 469 aa, Zea mays
  Clone ID: MRT4577_184509C.1.pep
MAKNPKAPDTRSGRSPTRRPRPRRAKAVPEASSAADIEDLAPSVPGAAAPGAAAPTALRAQLLRWYDAHRRDLPWRCVSGSEEERAYAVWVSEVMLQQTRVPVVVAYYERWMARWPTVRSLAAATQEEVNEMWAGLGYYRRARFLLEGAKQIIEKGLFPCTALALREVRGIGDYTAGAIASIAFNEVVPVVDGNVIRVISRLYTIADNPKESSTVKRFWDLVGQMVDPLRPGDFNQAMMELGATLCSKTKPGCSQCPVSSHCQALALSREKSSVQVTDFPRVVPKAKPRSDFAAVCVVQIAQGLEEEAADPKGNDHLFLLIKRPEEGLLAGLWEFPLVLVDQGKTDLLNRRKAMDKYLSKLLSIDMVRKPDVILREDVGEHVHIFSHIRLTMHVELMVINLKDGVDRLCKKGADSTKLKLVNESCVESMGLTSGIRKVYNMVRAFKEKSLAVSEIGHVPTRKRTRRLKR

SEQ ID NO: 277337 - protein, 95 aa, Zea mays
  Clone ID: MRT4577_18450C.1.pep
KDRWLNGRCIGEVAPEVLEHVPRCMASRRLVKDALTDLNWVADIRGALSVTALAQVLGLCDLLEGLVLQPGIPDRHSWQFNASGDYSASAAYTVL

SEQ ID NO: 277338 - protein, 50 aa, Zea mays
  Clone ID: MRT4577_184510C.1.pep
VDRCSLLLHACVPRASMQHGLNLAEMVGVGLGSGLGGPGAGGPSTGGPGA

SEQ ID NO: 277339 - protein, 64 aa, Zea mays
  Clone ID: MRT4577_184511C.1.pep
VDKRAGLLLGLRGVEAAALLAESLSRSSGEGAGSGTSCHAGKLTGRGGHLDCGIGERTRGRTRG

SEQ ID NO: 277340 - protein, 207 aa, Zea mays
  unsure (1)..(207): unsure at all Xaa locations
  Clone ID: MRT4577_184512C.1.pep
GIWAQSLYELAMNPEKYRNSDSIPDTSDEYVVXKDLYPQAERHVLVIARMDGLDSLADVKKEHLPLLRRMHSAGVKWAHKFLEEDAALEFRLGYHSVPSMRQLHLHIISQDFNSASLKNKKHWNSFTTSFFRDSVDVIEEIEQNGSTTTSSDEKVLAMELRCHRCRSAHPNIPKLKSHIAICKSSFPSHLLQKNRLLLSSTMHMDRT

SEQ ID NO: 277341 - protein, 61 aa, Zea mays
  Clone ID: MRT4577_184513C.1.pep
LYISYSRFLQHLEIQSTIEMALLETAASNQEKGDEMSFTWLNQWQKHSLLSISLSRRQESN

SEQ ID NO: 277342 - protein, 61 aa, Zea mays
  Clone ID: MRT4577_184514C.1.pep
CFFLMQYTSGERNGKGGKRHELMLLGLAASVATALIFPQCSQAPIASLLHTLKTPLVEVWG

SEQ ID NO: 277343 - protein, 77 aa, Zea mays
  Clone ID: MRT4577_184515C.1.pep
PPLAPDRLAALNRTLPVSLIPPPLSVCVGQFVQSARPTCFPFAPPLVTPPFFFFVPSLFRLPSLTALSFWPGSCLCP

SEQ ID NO: 277344 - protein, 115 aa, Zea mays
  Clone ID: MRT4577_184516C.1.pep
SQDQVSLGYLVVQNHHFIEATHEPGFTFLLAKFDGILGLAFQEISVEGSLPVWYNMVNQNLVAQPVFSFWLNRNPFDGERGEIVFRGSDEQHYKRSHTYTRVTWKGYWQFEMGDF

SEQ ID NO: 277345 - protein, 125 aa, Zea mays
  unsure (1)..(125): unsure at all Xaa locations
  Clone ID: MRT4577_184517C.1.pep
PPPPTLPSKLAVALAPKPPPYPPPPPRPFPMPPPIPAPAPKPPPYPAPSPPPPLMPTPSRPSCVLPLPTPSPEPKPPPCPLPRPPPPPPPNPPPLPXXPLPTPNSLPKPPPWPPSSPLLLPHQPP

SEQ ID NO: 277346 - protein, 139 aa, Zea mays
  unsure (1)..(139): unsure at all Xaa locations
  Clone ID: MRT4577_184518C.1.pep
VLSPXXCXSXXVXXXXVFFLGVXPLAPPSLXXXGFLFXXXFLPXXSGLFFLXXXFWAXFFXXFXXXFPSSSXPXLXXXRLXPSPPLSSVXXXXVPXSSRPFPXXXPXWXXXXRVXVXFXXRXGPPPXXXPFLLXLGPLV

SEQ ID NO: 277347 - protein, 39 aa, Zea mays
  unsure (1)..(39): unsure at all Xaa locations
  Clone ID: MRT4577_184519C.1.pep
KLSIXMXYARCTFHYXIGIXXXRPAAXAPEXIXAXTSXV

SEQ ID NO: 277348 - protein, 87 aa, Zea mays
  Clone ID: MRT4577_18451C.1.pep
RVFFLCFFFQLFDNTYASNSLPDCYTITTTIHACRGGSGWIRHRSPGGGGGDDGWRTAKEPRLKMCFTVEREPAPGHWGPVGGSSGG

SEQ ID NO: 277349 - protein, 117 aa, Zea mays
  unsure (1)..(117): unsure at all Xaa locations
  Clone ID: MRT4577_184520C.1.pep
RCHNYDMLFCARQTDAVRASYYFYQSDPAWDTVNFXFTAHTTEFLGELMQPDGDMSHRLNSKANDQRAARAIKSNPIYISDKLMNHNSQLFRMLDLRHGCVIHTQFAGQSKREWMLS

SEQ ID NO: 277350 - protein, 39 aa, Zea mays
  Clone ID: MRT4577_184521C.1.pep
HSHNGFNTINQGLRFKGLQREIQDNMKTPKVHIPAKCFI

SEQ ID NO: 277351 - protein, 499 aa, Zea mays
  unsure (1)..(499): unsure at all Xaa locations
  Clone ID: MRT4577_184522C.1.pep
MPRPKPAAAGGGWLSGWGWDLMLGSIAAFYAVMAPYTKVEESFNVQAIHDILYHTYHIEKYDHLEFPGVVPRTFIGAFVISILSSPTVFVLRLLRVPKFYSLLTVRLTLSCVTLMSLRLLRVQVKKKFGHQAEAFFVVLTAIQFHLLFYSSRPLPNIFALALVNLAYSFWFKGSYLCTLRALIVAAVVFRCDMILLLGPIGLALLLSRSVSLLEAIKCCISTTLVCIGFTVLIDSIMWRRILWPEFQVLWFNSVLNRSSEWGTHSIHWYFTSALPRSMIVAYPLCMVGALLDRRIVPYMFPVFLFVVLYSKLPHKELRFIIGSIPMFNVSASLTASRLYNNXKESWVEFAXFILMLGAFLVSLGYSTVTFMASYNNYPGGYALKALHEADSSVKEKMVHIDAFTAMSGVSRFCENEYPWRYSKEEEIPIEEFEKRNFTYLLNEHRSIGGYQCLFAVDGFSRVKLTPQIPPLSLVKEPKVFAHGNTRDPDILSLSWPGCP

SEQ ID NO: 277352 - protein, 66 aa, Zea mays
  Clone ID: MRT4577_184523C.1.pep
MNLAGDRGIFCKHRMTVLSTRCLDVMLDKDGWPGQEHALVLSYMNHVDRGMINVWIIDKVPYEGHG

SEQ ID NO: 277353 - protein, 46 aa, Zea mays
  Clone ID: MRT4577_184524C.1.pep
PSSVPINLGPLDSNGLYYGPFPTFSLFGFVRAQGDPNSSLDRLWQK

SEQ ID NO: 277354 - protein, 190 aa, Zea mays
  unsure (1)..(190): unsure at all Xaa locations
  Clone ID: MRT4577_184525C.1.pep
MATPVSAPAPPNPNPVSGDPPSLLLQQQEEEVPAPVPETAPTPLTTSIDPTPSGGEESESDDSSSVWSAPSSAPAPVLAPAPAPAAPSPAAKDILHISFNQDYGCFAAGTKSGFRIYNCDPFREIFRRDLAAEGGVGAGGGGIGVVEMLYRCNIHPLFGGGDNPHYAFNKVMXWKKHXSRWIGELSFRSP

SEQ ID NO: 277355 - protein, 277 aa, Zea mays
  unsure (1)..(277): unsure at all Xaa locations
  Clone ID: MRT4577_184526C.1.pep
MARTKQRIKERETVRRSKMNIRKGVKSHRSLRLICISTRSISSSTPAAVTASSPAMAVREEALHILFFPFLASGHLIPIADMAALFAGRGVKCTILTTPVNAAIIRSAVDRANDAFAGTGSPAIDIAVVPFPDVGLPPGVENGTALSSQDDRDKFFHAATLLREPFDRFLADNRTDAVVSDSFFHWSVDAAAERGVPRIAFLGSSMFARSCSDSMLRHNPLENAPDEPDALVLLPGLPHRVELRRSQMMDPAKKPWQRGFFQTVNAADQKEFXGEVF

SEQ ID NO: 277356 - protein, 37 aa, Zea mays
  Clone ID: MRT4577_184527C.1.pep
LVQNMKHITLQQHSALLDLLAYSKCNKGLHITNRLMV

SEQ ID NO: 277357 - protein, 67 aa, Zea mays
  Clone ID: MRT4577_184528C.1.pep
PRVHVQYRFTRIERIWGQSLRSALLKGGIKRKSMYLSKDKVVSISIKGHHHKVISFHSQMDALRDRF

SEQ ID NO: 277358 - protein, 92 aa, Zea mays
  unsure (1)..(92): unsure at all Xaa locations
  Clone ID: MRT4577_184529C.1.pep
TEKRNSFIKPWEENEKTKALNKAANKEFAILSWENTTKANIELLLNKIEEQLXKRSMLYMHDNMKNKAALIHRGAQEKRAMVEAKRGEEASE

SEQ ID NO: 277359 - protein, 140 aa, Zea mays
  Clone ID: MRT4577_18452C.1.pep
KGCGFVSLETLLFFARTYPVFFKRLFLNHQGMRPPWGSPFGVGGVTFSYMLFQLLGLNSGGPKFLPGFNFFKVLPDPEDGFAVLYCIGFEMMDAQWLAMGAWYMQFKKVLGAPRHQLERELSLGVFNGIHALPACTLLSK

SEQ ID NO: 277360 - protein, 115 aa, Zea mays
  Clone ID: MRT4577_184530C.1.pep
MANRARPLRAIYMTSTCHDPDTWAHLIKEYASQSLVREAALGYARNLTRRTHHQSLVSVLIKAVAAFFPDELGVGMYLHAEALKSGFARDLIIGTTIVWMCCKCSALDDTRRALD

SEQ ID NO: 277361 - protein, 108 aa, Zea mays
  Clone ID: MRT4577_184531C.1.pep
VSALDPFLSSHSRKEARVPRCAAAGPRLICSPTRPSPAAWPVGRPSPVPYRPDSSSTFPSGHPQLSPWLGFRPLRRRRGFDDPPSWLRDQKAAPTPFRERRTTPAHGF

SEQ ID NO: 277362 - protein, 129 aa, Zea mays
  unsure (1)..(129): unsure at all Xaa locations
  Clone ID: MRT4577_184532C.1.pep
MSTVLQRPTPGTVQCFERMNTVVAVAYTKPRCALIKVNGVPIDVIRPEMLRLTDFEPILLPDRSRFKDIDMRIRVRGGVKTSXIYAIRQDVCEGIVAYLXKYVDEAXRMRSXDIFTRYDCTLLVCYPMR

SEQ ID NO: 277363 - protein, 63 aa, Zea mays
  unsure (1)..(63): unsure at all Xaa locations
  Clone ID: MRT4577_184533C.1.pep
GRFFFFFLGXFFFFFFFFFFSIFFWIXRLFDFSFYLGKTAREPSLLRVGQIPAHTSYLWLGHR

SEQ ID NO: 277364 - protein, 74 aa, Zea mays
  Clone ID: MRT4577_184534C.1.pep
QTGTVLPSNKQKGHRASFPFYTAEYDKKIVGRAAARGIIYKKAEQGKKETSKRDRLEKEITNAKTTNGEEKGKL

SEQ ID NO: 277365 - protein, 310 aa, Zea mays
  Clone ID: MRT4577_184535C.1.pep
QSRRVAVAFQAYNALSPLVKFSHFTANQAILQALDGEDCLHVIDLDIMQGLQWPGLFHILASRPRKPRSLRITGLGASLDVLEATGRRLADFAASLGLPFEFRPIEGKIGHVADAAALLGSRQRRRDDEATVVHWMHHCLYDVTGSDVGTVRLLRSLRPKLITIVEQDLGHSGDFLGRFVEALHYYSALFDALGDGAGAAEEESAERYAVERQLLGAEIRNIVAVGGPKRTGEVRVERWSHELRQAGFRPVSLAGSPAAQARLLLGMYPWKGYTLVEEDACLKLGWKDLSLLTASAWEPADDAAASAPTG

SEQ ID NO: 277366 - protein, 100 aa, Zea mays
  unsure (1)..(100): unsure at all Xaa locations
  Clone ID: MRT4577_184536C.1.pep
VPPVCCPLGSPPLVXFSRARGAGGPXRGRGRLRWRRSPGAVSGLLGSCSRIRXRSPRLVLWXASXSLFSPXGLFFPPFPLCLPRGXXPVXPFLLLFSXGA

SEQ ID NO: 277367 - protein, 385 aa, Zea mays
  Clone ID: MRT4577_184537C.1.pep
MHAKMTKPAAIVVAAIAVLSVSLLAGSSCLALARPSGDFSIVGYSEEDLSSHESLAELFERWLSRHRRAYASLEEKLRRFQVFKDNLHHIDETNRKVSSYWLGLNEFADLTHDEFKATYLGLRSSVGDGGSGIDDDDEPEEEEGYEGVDGASLPKSVDWRSKGAVTGVKNQGQCGSCWAFSTVAAVEGINQIVTGNLTALSEQELIDCDTDGNNGCNGGLMDYAFSYIAHNGGLHTEEAYPYLMEEGTCQRSSSSEKKWPGSSEDANDDAAVVTISGYEDVPRNNEQALLKALAQQPVSVAIEASGRNFQFYSGGVFDGPCGTQLDHGVAAVGYGTAAKGHDYIIVKNSWGPSWGEKGYIRMRRGTGKRQGLCGINKMASYPTKN

SEQ ID NO: 277368 - protein, 68 aa, Zea mays
  Clone ID: MRT4577_184538C.1.pep
AHLFGGRPGRGGVVTSKGPSLEQLVASMLCHVTSDRSTLLTKLSEAPREKASVKFYRAPKMLASLKDV

SEQ ID NO: 277369 - protein, 377 aa, Zea mays
  Clone ID: MRT4577_184539C.1.pep
MAWSCARPMSIALAAVLLLCGGAWLQQAAEARPHHMDDDSSIDMDRGSDDFFSIVGYSPEDLTQHDRLVRLFEEWVAKYRKAYGSFEEKLRRFEVFKDNLHHIDEANRKEVTSYWLGLNAFADLTHDEFKATYLGLLPKRTSGGRFRYGGVGDGGDEVPASVDWRKKGAVTEVKNQGQCGSCWAFSTVAAVEGINQIVTGNLTSLSEQQLVDCSTDGNNGCSGGVMDNAFSFIATGAGLRSEEAYPYLMEEGDCDDRARDGEVLVTISGYEDVPANDEQALVKALAHQPVSVAIEASGRHFQFYSGGVFDGPCGSELDHGVAAVGYGSSKGQDYIIVKNSWGTHWGEKGYIRMKRGTGKPEGLCGINKMASYPTKDH

SEQ ID NO: 277370 - protein, 143 aa, Zea mays
  Clone ID: MRT4577_18453C.1.pep
AFHASLDQADTTRSALRRSNSMPLLDVGLGLREVVLSHRRSDELVHICALAEQLQLPRGRTRSSRSGWCTACGPGASWRCLSRSSEGGSLDLEILVNLSATSSAGSSTTIATSCLLSSSLRRCLQRPRVGVERETDSGRPRGT

SEQ ID NO: 277371 - protein, 91 aa, Zea mays
  Clone ID: MRT4577_184540C.1.pep
TGTGTVHHGVGPRRAHDLQQVLDLGGGQPVEDDHFPAVEDGQLCASSPAASLGFQSVRQLMALVLPDGGLGRVEPTVRPRSAHASATVPAL

SEQ ID NO: 277372 - protein, 64 aa, Zea mays
  Clone ID: MRT4577_184541C.1.pep
RPRVGHVSLTILIHFSVYSSSPIQKHIHHPWWPFILLSSHPPSHPSPRSASSPSRRMTRHSLSY

SEQ ID NO: 277373 - protein, 53 aa, Zea mays
  Clone ID: MRT4577_184542C.1.pep
VIQLYLEARYTEGLNSYASVCKIGPPRSLVFPTYSLFIHLCNQVWHIAVVGPV

SEQ ID NO: 277374 - protein, 136 aa, Zea mays
  unsure (1)..(136): unsure at all Xaa locations
  Clone ID: MRT4577_184543C.1.pep
SCATFPLRYHXVPLAQRRVHALETLGXRCMSTDSGRVTGDSSAFRSFQWACRGAHSDTRAMXRCFLPACWTPTLPALNPIPXXLAGSLYAERDNLYPEGPRACVFRTFLTVARLASQRHRLRENLNADFPFGVTAR

SEQ ID NO: 277375 - protein, 367 aa, Zea mays
  unsure (1)..(367): unsure at all Xaa locations
  Clone ID: MRT4577_184544C.1.pep
MVAYATTSYVAAQALASSLQPQVVAAVFFTSAACTVALAVLLASLRLRPPWWCACAVCEAYVTASWTAEFDNLCDWYAHLLRRAPGRTVHVHVLGNVLTANPPTVDHMLRGRFDNYPKGAPFSAILADFLGRGIFNVDGDSWLFQRKLAAAELASPALRCFAAGVVASELRCRLIPLLHSAAGDEKLLDLQDVFRRFAFDCICRISFGLDPGCLELSLPMSAFADAFDTASMLSARRATAPMHVFWKLKRLLNVGXERQLRDAIGLVDTLAAEVIRQRRKLGTAASGDDLLSRFMGSIDDDRYLRDIVVSFMLAGRDTVASALTXFFLLLSDHPDVATAIRDEVFRVTGDGDGHAATWEKXKDMHYV

SEQ ID NO: 277376 - protein, 143 aa, Zea mays
  unsure (1)..(143): unsure at all Xaa locations
  Clone ID: MRT4577_184545C.1.pep
TQPFRPVLLLVRGGRQQPAVLLREGLSDEEKGEEASPQGGAQGEGGRWLQWLERLWRSWPLGSLLAGPSGGQAGLLTSTAHRFPTHAHLXTAGGSRPGFHMEGLVPLHLKGREKIISVSGDKTKHVATLTPVGTATISNFREM

SEQ ID NO: 277377 - protein, 94 aa, Zea mays
  unsure (1)..(94): unsure at all Xaa locations
  Clone ID: MRT4577_184546C.1.pep
THQVTPPLXXLXXXTXHNXSXPSXWXNXVXXLKAKXRXMXLMXHXXTEVMKNAXSVCRASCAICHFXXAXKLSLYXSRDPVIAXIXRNLIXVMT

SEQ ID NO: 277378 - protein, 113 aa, Zea mays
  unsure (1)..(113): unsure at all Xaa locations
  Clone ID: MRT4577_184547C.1.pep
QAFRRTELGDLGTSKTQGFSAGALQAEGDETRVVAGEKAQGRAPTHAGPLATGLPXRXHSFWDSGVVSVPSXSXRXPXSXXXXLPXXXXIXEXQXXXPALXGPXRIFFRFRSC

SEQ ID NO: 277379 - protein, 89 aa, Zea mays
  unsure (1)..(89): unsure at all Xaa locations
  Clone ID: MRT4577_184548C.1.pep
PYSSISSLILPFLPSITAXSVXDNSTIQAYTIHHSITTINSPXITPLLLXQYSDIFFLHIFVQSITTXHIQQLLLPFIIQLIITNLYPL

SEQ ID NO: 277380 - protein, 59 aa, Zea mays
  Clone ID: MRT4577_184549C.1.pep
ASSPSAPGIDPFFPSCGRRPRAGIDHLPVLESSKEPFPILGSMDSNVRYVLRLIRFFSM

SEQ ID NO: 277381 - protein, 42 aa, Zea mays
  Clone ID: MRT4577_18454C.1.pep
IFPLFPFKKKKNKKIKKKKKKKKKKKKKKKKKKKTKKKKKKR

SEQ ID NO: 277382 - protein, 99 aa, Zea mays
  Clone ID: MRT4577_184550C.1.pep
MNARFLRPFARAAFRAPTAVRPVAMARPALVASQTKKTEVSPQQMTVLKSAMPQLIPFFFVNETTVAFILLPSLIYVFSKYILPQRVRLFAARLFISKL

SEQ ID NO: 277383 - protein, 87 aa, Zea mays
  Clone ID: MRT4577_184551C.1.pep
VLLFGALATREELLTDRLLTATVAWPAPAVIYIGIILSTLGAALQSLTGAPRLLAAIANDDILPVLNYFKVSEGSEPHAATLFTAFI

SEQ ID NO: 277384 - protein, 72 aa, Zea mays
  Clone ID: MRT4577_184552C.1.pep
GHVRKNIIYYVFEPEMSRRTVRPSGGLSAPVGRTVRAWAEQIRVPSFVLRLLAKIAGLARNQLCKGSSPPPL

SEQ ID NO: 277385 - protein, 35 aa, Zea mays
  Clone ID: MRT4577_184553C.1.pep
EYKTFTLVLNIQSVLPTFCVSCSRKQRITLRTKER

SEQ ID NO: 277386 - protein, 210 aa, Zea mays
  unsure (1)..(210): unsure at all Xaa locations
  Clone ID: MRT4577_184554C.1.pep
MAFSVAKISASFAVFMVLAFLLRPCASVEIHRKLSGWSNGGATWYGGPNGAGSDGGACGYQDAVDHAPFSSMIAAGSPSIYQDGKGCGSCYQVKCSGHGSCSSSPVTVVLTDFCPDGTCQEEPVHFDMSGTAFGGMAKPGQADQLRAAGRLQIQYTRVPCNWXXGMDIAFKVDAGSNSYYLAMLIEYEDGDGDLSSVDLMQNXGNGASWT

SEQ ID NO: 277387 - protein, 104 aa, Zea mays
  Clone ID: MRT4577_184555C.1.pep
RCFRGGGQPPPPPPWSPRGPGFLGAQNQGGGGHQPLPRGGPRGQGEFPRQGYLSRPGAGIHARWCKPAALMYVWGYRVGRVMDCGFWRGPPLGSCSNYANKLVP

SEQ ID NO: 277388 - protein, 178 aa, Zea mays
  unsure (1)..(178): unsure at all Xaa locations
  Clone ID: MRT4577_184556C.1.pep
MAFSVAKIPASFAVFMALAFLLRPCASVEIHRKLSGWSNGGATWYGGPNGAGSDGGACGYQDAVDQAPFSSMIAAGSPSIYQDGKGCGSCYQVKCTGHGSCSSSPVTVVLTDLCPAGEACLGEPVHFDLSGTAFGGMAKPGQADQLRAAGRLQIQYTRVPCTWPXMDIXXXVDAGSNS

SEQ ID NO: 277389 - protein, 58 aa, Zea mays
  Clone ID: MRT4577_184557C.1.pep
FIKQKLILLSKYLPPCIILRIDRNMVPADKIPEPFPPITIWPSPLTVQLLILRFSIMT

SEQ ID NO: 277390 - protein, 73 aa, Zea mays
  Clone ID: MRT4577_184558C.1.pep
QSMAGGEERVPPMQERCIQSVNPNQGHTPMFHVHSIGRKIIYPSGLYNAFFGRQNFTISPLKVVSTCSPLPRR

SEQ ID NO: 277391 - protein, 75 aa, Zea mays
  Clone ID: MRT4577_184559C.1.pep
RFKQKSYIHNNGRKTKTFSSWFTYSKRFHNGASSLSIQLFLMCLLKKLFYNILSFRKCIFIPLQDGHILHYYSHL

SEQ ID NO: 277392 - protein, 37 aa, Zea mays
  Clone ID: MRT4577_18455C.1.pep
RIGSHVRQSAFPLSRRVGSFFNAYALALLPPDNLSIR

SEQ ID NO: 277393 - protein, 104 aa, Zea mays
  unsure (1)..(104): unsure at all Xaa locations
  Clone ID: MRT4577_184560C.1.pep
HASAKPVAAAAVKSERSGSEDDAESEAMAEVAAALRAVGEGFLRMEERSXXLSLQMEKERMESEMKRTQTMLDAQQLFLEAFLGKQLQHKKAYVSPSSAAMEED

SEQ ID NO: 277394 - protein, 98 aa, Zea mays
  Clone ID: MRT4577_184561C.1.pep
IEDDVRARFDLGGLVRHRLDHARWVAAACEAVADDDADDPGGATGVRREPLLDDAQANRIGVAARRACRNLQRVARRPAARTPRRRGCGRPCNTTQYR

SEQ ID NO: 277395 - protein, 142 aa, Zea mays
  unsure (1)..(142): unsure at all Xaa locations
  Clone ID: MRT4577_184562C.1.pep
LRPCAPDPEQDFSTGYDGRDVVLQNLVQICVFRVANGTRRPWMWWDYVHDFAVRCPMKEKKYTRECANGVINSLGLDIEKINKCVGDPEADKENPVLNAEQDAHIGHGSRGDVTILPTLVVNNRQYRGKLEKTSVLKXAVCS

SEQ ID NO: 277396 - protein, 90 aa, Zea mays
  Clone ID: MRT4577_184563C.1.pep
KHPRQQQLHRAQRLTLSSLHGSGAKFYVVSPMSSVMSFLVIWGDHEFHIFFVGFAVHIMTKCSRIVSGGAGVSREDSEAVLSANYIPSFP

SEQ ID NO: 277397 - protein, 58 aa, Zea mays
  Clone ID: MRT4577_184564C.1.pep
GGAPRGGPPKGVPSREGPQEKKGLSPPGPYYNPSAKGPLETICPEIWGIGGSFSSAAR

SEQ ID NO: 277398 - protein, 80 aa, Zea mays
  unsure (1)..(80): unsure at all Xaa locations
  Clone ID: MRT4577_184565C.1.pep
PMXXXCCXXXXRAXXTTLRSRTAXXGGAAASRTAVGXAXXXTXPSXPARRXRXXRRLRRXXRSSXAGTAATMTWWPRXSR

SEQ ID NO: 277399 - protein, 50 aa, Zea mays
  Clone ID: MRT4577_184566C.1.pep
VVYRFGTQCGLLRTRTYLGRASTVGAHGAYIKFSPIILDRTSLVDHSIDK

SEQ ID NO: 277400 - protein, 78 aa, Zea mays
  Clone ID: MRT4577_184567C.1.pep
PVTLIRMLGAQGGGTQAERRMISVLDLPCGPYLQQARGRPYPGVGLGRTDDPRSSGGTGYGAGGPNCRQGGPYGPDAP

SEQ ID NO: 277401 - protein, 109 aa, Zea mays
  Clone ID: MRT4577_184568C.1.pep
AVCVMNEQAQKLFSRASMSLQSEKQNPASKKNVATSGEEKNKTEGRDLNCHWSCRGSVSLDTFHLCPKTWKVPFDPYTQTNQAASFQNFKPARLVVTPCKPIKSNKDAW

SEQ ID NO: 277402 - protein, 115 aa, Zea mays
  Clone ID: MRT4577_184569C.1.pep
GDSRYAARDTAIVALEAITVGLKGPASLLAVYAIASRKPYGHILQFAVSLGQLYGCLFYFVTAYLDGFSFWASPFYFWAYFVGNNSLWVVIPTLVATRSWKKISAAFQADKVKTR

SEQ ID NO: 277403 - protein, 401 aa, Zea mays
  Clone ID: MRT4577_18456C.1.pep
MLPSLVRARSAPLRRLVSTFSSTLAVLPRVPHVISSGGNLNLPFSAHPSPARDGPSGPAGGAQRGISFSTRAVDARDEAASSSAAADSDLSAPYLSVRIRCRRHDVEVLSEALLSFGASSVTVDDISDAENLDEISITSLYADGEDVDSSVRSAARSAGVNYSPVYETSVGKQCDWIATVQETYESTEVADGLWVVPKWRTPPDPEATNIIIDPGLAFGMGEHPTTKLCLLFLREVIKGGECVLDYGTGTGVLGIAALKMGATQSTGIDIDPQAIASASENLLLNGLHSNQMPVYLVSTNAQPSCLPSFIDKSEEHHSTNNLDLKLSRGTYDVVAANILLNPLLELVEDIVGYAKPGGIIAVFGILEEQVPKIKEVYSRYLDRILVSEMDGWACLQGTRRV

SEQ ID NO: 277404 - protein, 96 aa, Zea mays
  Clone ID: MRT4577_184570C.1.pep
SEVGGASPQQFFSFNQRGAMKFGGFFQQKKVPPFSQVIYVSPVAFFTQQQLLPFYLHGGPKGGPLFQMEQFLPFNQLGFSNPKGFFQQPIIGGAPF

SEQ ID NO: 277405 - protein, 152 aa, Zea mays
  Clone ID: MRT4577_184571C.1.pep
MAAFSEMGVMPEIAQAVEEMDWLLPTDIQAESIPLILGGGDVLMAAETGSGKTGAFSIPVIQIVYETLKDQQEGKKGKTTIKTGASVLNKWQMNPYDRGSAFAIGSDGLCCQSREVKEWHGCRGTRGLLKGKHYYEVSCHDRGLCRVGGSTM

SEQ ID NO: 277406 - protein, 141 aa, Zea mays
  Clone ID: MRT4577_184572C.1.pep
RRDGRKQVEVWVITFHTLYRNTFLLYIYSSLCLCIVGSFSFDRTPLLSPSSACSSDPSSNSAFNRSCATTGKTCSVEGLMLTFPLLRTPLVPKRPLMESDSSALRRPPKLHAKHPSLTRSLEPYTNCIVKGELGYAETMTN

SEQ ID NO: 277407 - protein, 113 aa, Zea mays
  Clone ID: MRT4577_184573C.1.pep
TDDELGFIRNEDARKYMRHLPQFPRRPFVSLFPRMQPVALDLIERMLTFNPLQRITVEEALEHPYLERLHDVADEPICTDPFSFDFEQQALTEDQMKQLIFNEAIELNPNFRY

SEQ ID NO: 277408 - protein, 94 aa, Zea mays
  Clone ID: MRT4577_184574C.1.pep
RTAAGSCSTTSSATCSRSRTSTSPPSCPSAAAPTGSSVEEALEHPYLERLHDVADEPICTDPFSFDFEQQALTEDQMKQLIFNEAIELNPNFRY

SEQ ID NO: 277409 - protein, 62 aa, Zea mays
  Clone ID: MRT4577_184575C.1.pep
ASGREAALAEELLEEEYKKRFDEAKKELSLENDLASMWVLVAKLKRGALDISDLNVDDRTKV

SEQ ID NO: 277410 - protein, 185 aa, Zea mays
  Clone ID: MRT4577_184576C.1.pep
TEYVVTRWYRAPELLLNSTDYSAAIDVWSVGCIFMELINRQPLFPGRDHMHQMRLITEVIGTPTDDELGFIRNEDARKYMRHLPQFPRRPFVSLFPRMQPVALDLIERMLTFNPLQRITGQSARAYYSLACSFSSLASSLHVQLATGWLLNPELRRTCSLVGVGSHCGTSMWGHALAMQCIVRSM

SEQ ID NO: 277411 - protein, 108 aa, Zea mays
  Clone ID: MRT4577_184577C.1.pep
MWKSTIYKKKFFALSNNSQQKWIYPLRRKLIVHNMEAKIEKMKYEHLMREAALVEKELLEEEYKKKFDEAKKELSLENDIACMWVLVAKLKRGALDISDLNVDDRTKV

SEQ ID NO: 277412 - protein, 163 aa, Zea mays
  unsure (1)..(163): unsure at all Xaa locations
  Clone ID: MRT4577_184578C.1.pep
NSARGSPGKVIITKLTTQCSEXAFELELKSADNRVLXEQLLQKNVEINDLQEKVFRVEQQLSAKVDISSEKEADCTQHGIIDLKSKLQSKEAKIEKMKYEHLMREAALVEKELLEEEYKKKFDEAKKELSLENDIACMWVLVAKLKRGALDISDLNVDDRTKV

SEQ ID NO: 277413 - protein, 135 aa, Zea mays
  Clone ID: MRT4577_184579C.1.pep
MASGRTPLQRCPRPHLRSRGEDKYKEPEVRGADGGADPVGDGDFFSRRHLSTDDGSRLPTGRSPHGSSRTSRAPTSAQRHRTGAKAGQPQNTNAALAARDVLGGPPVHAARQPLLRREGEPEAEPEPAQPASPTC

SEQ ID NO: 277414 - protein, 190 aa, Zea mays
  unsure (1)..(190): unsure at all Xaa locations
  Clone ID: MRT4577_18457C.1.pep
SGEQDHQLRQCHGEGNSGSNKPASLVTRSGYTAPWRQQRHQELKACLQRQDGEDQALFFCREEERNALQESEEAETPPPXRKDDDEXKTPHAPPEQEEGEAEAPEPEEDEHNEQQQRPDEEQERPQTXQXEEKKPHQDQSPTDDTHARSTPRQRRGTNTXPKPGAXDTKXTREGDRSRAKPRSGAAGDTK

SEQ ID NO: 277415 - protein, 149 aa, Zea mays
  Clone ID: MRT4577_184580C.1.pep
GPVKAATLGSTSLGSPGTLAAGREISCRRHRLMMTRPALLCSDAGFIHLRSAGHLTSRRVSLCLSAAALYIYSLSLILFPVYLWFTSPLLRTGDSFLCIVWPFCGSPRNDRNINTVLAGPQLIYTRHTCMYGPNSPYNEVGLNLLGRAL

SEQ ID NO: 277416 - protein, 91 aa, Zea mays
  Clone ID: MRT4577_184581C.1.pep
LHKFISHESDYLWLAEDDMKMQEAKIEKMKYEHLTREAALAEKELLEEEYKKKFDEAKKELSLENDLAGMWVLVAKLKRGALDISDLNVDD

SEQ ID NO: 277417 - protein, 72 aa, Zea mays
  Clone ID: MRT4577_184582C.1.pep
EAKIEKMKYEHLAREAALVEDLLEEEYKKKFDEANKELSLENDLASMWVLVAKLKRGALDTSDLNVDDRTKV

SEQ ID NO: 277418 - protein, 181 aa, Zea mays
  unsure (1)..(181): unsure at all Xaa locations
  Clone ID: MRT4577_184583C.1.pep
MVVRRHMRALEXSGKASVANASMMDMQQIITKLTTQCSEKAFELELKSTDNRVLXEQLLQKNVEINDLQEKVFRVEQQLSAKVDISCEKEADCTQHETIDLKSKLQSKEAKIEKMKYEHLTREAALAEKELLEEEYKKKFDEAKKELSLENDIACMWVLITKLKRGALDISDLNVDDRTKV

SEQ ID NO: 277419 - protein, 237 aa, Zea mays
  Clone ID: MRT4577_184584C.1.pep
SRPCRALKSLTSQLKDMAERLPPDQGAYDGSEAKQAHVPNGIEMYASIYTSMNGIHQPRNESVSALSTPGLHIGRSSHPNGISNHHQSPGSITENSEVSAHTHRVSGPPDVENPNRRGHSSSDEMLSASSRADDSSSRDARSLLNGEDGYKSRSAVSLPSNQVQAEWIEQYEPGVYITLTTLRDGTRDLKRVRFSRRRFGEHQAESWWNENRDKVYEKYNVRSSERVSSASSIRSGR

SEQ ID NO: 277420 - protein, 80 aa, Zea mays
  Clone ID: MRT4577_184585C.1.pep
PDDHQRDPRVSASVYIIIRGAKRQQISVGLQEVKNRRCVQDEQKDIRFIRTASVYTYYVAIFTRHVLHVTTVDILTNDHS

SEQ ID NO: 277421 - protein, 65 aa, Zea mays
  Clone ID: MRT4577_184586C.1.pep
LKDSSTNGSQSLKSGDFLSISLWSRMEGLYKEIELLKENRRARFATPATEESTLATEGSTPATEE

SEQ ID NO: 277422 - protein, 40 aa, Zea mays
  Clone ID: MRT4577_184587C.1.pep
IISRGNPTDSSREYKNNTTLYNNYNILLTYQPTTTFISSN

SEQ ID NO: 277423 - protein, 168 aa, Zea mays
  unsure (1)..(168): unsure at all Xaa locations
  Clone ID: MRT4577_184588C.1.pep
GKGERSGQRGRKPRGERGKGGKKRKGGTTREGQGEKXKTTGREXKXXXXXLEGGARDAARSARQRPAEXQKKKISSGNNAEYAGAMVKPEALSPYVAYKSSRMAPPLRDFASQAHKPQASKKKKKKKSTLRCYHCLRAISSTLAAAAGGSGLGSVLAVLLSFAVFCVP

SEQ ID NO: 277424 - protein, 98 aa, Zea mays
  Clone ID: MRT4577_184589C.1.pep
YLTDNPVSIRVAKTSSVVWTHVRRWVAAQSVFYHLYNQVSYMSLDEISPLTFSIGNTMKRISVIVASIIIFQTPVQPINALGAAIAILGTFIYSQAKQ

SEQ ID NO: 277425 - protein, 78 aa, Zea mays
  Clone ID: MRT4577_18458C.1.pep
MNRKYLFNADNDTGSLQGHTFSGCFFFRAQPYVSRNLGSGRRPCFNSVGWERSVAWALGGLREGGGVFPFRPSFFFFY

SEQ ID NO: 277426 - protein, 68 aa, Zea mays
  Clone ID: MRT4577_184590C.1.pep
SSSSPSAAAGIGPAGHEDWSAGRRKHVSINRSNPRRSSGRNENLRHRFLLLIILGPAAPAPPPPPSPT

SEQ ID NO: 277427 - protein, 389 aa, Zea mays
  Clone ID: MRT4577_184591C.1.pep
MQDMKPAAAAVAKVVAGDSPPSAASPAPAPAVANSNGTPQKPPPIPAAAFDMPKPNLRGLNKPKCILCGNIARSRCPFQCCKSCCYKAQNPCHIHVLKQTNTLPDKPSPATAPATTEHQSNNLPATSSASRLAALQKLPQHFLKFLQTKKSVTKKDVAGINKWRFMKLKEHMQGDTDAENEAYERYTQNVGLLEEAFCPMEEDADVDPEAEATSSSEEERMDLLVSAAKARLKSDNEAANSFRERVATILDQKLKDLRGSQSASEGDEPSGPSLDDRLTPTPMKFSTAQKMGRATELNELLGKLTGARSEDDLKPCRDIAEQLFGKENGSSVGNSNRVDTETEPGDQESAAAVARRYSVPTLCSRMEVGEDFASEMNDEFCSLTQVAQL

SEQ ID NO: 277428 - protein, 57 aa, Zea mays
  Clone ID: MRT4577_184592C.1.pep
LRRAFHMNTWGQNEVSEPLKTVARGTWYVLSDYTMEITCQSRLEQDYFYDAGGRVGA

SEQ ID NO: 277429 - protein, 90 aa, Zea mays
  unsure (1)..(90): unsure at all Xaa locations
  Clone ID: MRT4577_184593C.1.pep
APVRSSVCSCLVCFXPFXAFGALFCFCXXXXXXSCFGGXPPPGXGFXXCXXVVLPLXLLVGXXXPPCXXGLRXALPSLPRFASPASXLFL

SEQ ID NO: 277430 - protein, 159 aa, Zea mays
  Clone ID: MRT4577_184594C.1.pep
MERASLGGGVMASLVKKLNAILKPKNKLMGGARADVLFLRAELKSMHPFLKKLLGGRDPSPQVKAWTKEGRELAYNIEDTMDKFMPRVNYLHGSGPFGSRKGLLNLAGRVTRFGNTGWTHLRLTGKLKGLKAPPVKGSKRGPKYRFGGEDHFWAFGDRM

SEQ ID NO: 277431 - protein, 78 aa, Zea mays
  Clone ID: MRT4577_184595C.1.pep
CCLCVFVHLVLSQDSASGVRAGVAAGVPVVGLTTRNPGKVLKDAGASLLVKDFQDPELLSVLQQVHVEVEPAAENAQG

SEQ ID NO: 277432 - protein, 226 aa, Zea mays
  unsure (1)..(226): unsure at all Xaa locations
  Clone ID: MRT4577_184596C.1.pep
MATNSGSALAKLAPLEAILFDIDGTLCDSDPIHFCAFRELLQQRLRSARPQAGFNGGVPITEEFYSANISGGHNDDLARSLFPGMDHQKAMRFMDDKEAMFRKLAPGQLKPVDGLQELCGWMEGRDLKRAAVTNAPRANAELMLSLLGLTDFFPVLVIGSECDXAKPFPDPYLKALQLIDASPQHTFIFEDSGXSGSRAGVGCRECPVVGLTTRNPXKVLKDAGAS

SEQ ID NO: 277433 - protein, 322 aa, Zea mays
  unsure (1)..(322): unsure at all Xaa locations
  Clone ID: MRT4577_184597C.1.pep
MPSPLGGRIQFGPGKAGMPSASLARRLLSTIISSPAIPSRSTSTSASNSNSCGFSTRRARKKRSCVSWTVSAATPADMATNSGSALAKLAPLEAILFDIDGTLCDSDPIHFCAFRELLQQAGFNGGVPITEEFYSANISGGHNDDLARSLFPGMDHQKAMRFMDDKEAMFRKLAPGQLKPVDGLQELCGWMEGRDLKRAAVTNAPRANAELMLSLLGLTDFFPVLVIGSECDRAKPFPDPYLKALQLIDASPQHTFIFEDSASGVRAGVAAGVPVVGLTXRNPGKVLKDAGASLLVKDFQDPELMSVLQQVEVEPAAANAQG

SEQ ID NO: 277434 - protein, 389 aa, Zea mays
  Clone ID: MRT4577_184598C.1.pep
MFVGVFFSPFAKRHQREAETLHSQNSNMLAGVSLSSLVLMPSPLGGRIQFGPGKAGMPSASLARRLLSTISSPAISSRSTSASNSNSCGFSTRRARKKRSCVSWTVSAATPADMATNRCTTEARVLSCSPPETRDTAHLLRSCLLNSESGSALAKLAPLEAILFDIDGTLCDSDPIHFCAFRELLQQAGFNGGVPITEEFYSANISGGHNDDLARSLFPGMDHQKAMRFMDDKEAMFRKLAPGQLKPVDGLQELCGWMEGRDMKRAAVTNAPRANAELMLSLLGLTDFFPVLVIGSECDRAKPFPDPYLKALQLIDASPQHTFIFEDSASGVRAGVAAGVPVVGLTTRNPGKVLKDAGASLLVKDFQDPELLSVLQQVEVEPAAENAQG

SEQ ID NO: 277435 - protein, 123 aa, Zea mays
  Clone ID: MRT4577_184599C.1.pep
TQSEVELFKQGVYSPLLKCLSRAKGQELMMEIHLGICGAHLASMPLLRKVFRQGFYWSKTASDAADLLLERLRFYAALVTPSCLGPLSARPWAQLTISRQPSTSCTSRRVPPASLTYDATSIA

SEQ ID NO: 277436 - protein, 82 aa, Zea mays
  unsure (1)..(82): unsure at all Xaa locations
  Clone ID: MRT4577_18459C.1.pep
MRVVLVALDIPALTASATSTHTSGGCGSHPPPPPHLPHPVHLPAPVXHLPPPVHLQPPVHLHPPVHLPQPLHMPSSDHMSMP

SEQ ID NO: 277437 - protein, 100 aa, Zea mays
  Clone ID: MRT4577_1845C.1.pep
TKWGPPGFPREGGVKGRPENRRPTPKRDKWAPHKRAEPPPRGGEGAEKRPQGGCGPGTTFFSFLFVLYIIQTVLHICCLFFFILNLYFKLCSSAVFHAKA

SEQ ID NO: 277438 - protein, 85 aa, Zea mays
  Clone ID: MRT4577_184600C.1.pep
KAILVSRFPGGSGEEEAGFLIFLGHDRNPGKFEVKVLVAKPLFVVPVAGVELPNRVPNGFHAFFVTGDQLVRQAEGQGKYGTCRF

SEQ ID NO: 277439 - protein, 112 aa, Zea mays
  unsure (1)..(112): unsure at all Xaa locations
  Clone ID: MRT4577_184601C.1.pep
GGFVLLVLAGSAVSQXTSEGCGXRTPPIKLPSWVLLPSPFYLTPQKKTDPWEHPTQPPELYPVAVIAHPGXSGIASPLLGQGVQFLRHQXYPAETPYDLPQCQTLQENSYYQ

SEQ ID NO: 277440 - protein, 59 aa, Zea mays
  Clone ID: MRT4577_184602C.1.pep
GQIGSNMNPDEELRKLKDRFATWKKDYKSRLKETKVNLSKVGTHDEKSRKRWWGKKSSK

SEQ ID NO: 277441 - protein, 82 aa, Zea mays
  Clone ID: MRT4577_184603C.1.pep
MAAATATAAVLGCSRLQSDIAGAGIPKKGKVGRSPPAEEVEAFLAAAERGMARRFAVKYNYDIVKDAPMDGGRYEWVRVRPG

SEQ ID NO: 277442 - protein, 155 aa, Zea mays
  unsure (1)..(155): unsure at all Xaa locations
  Clone ID: MRT4577_184604C.1.pep
PSCYPPPPRKAAGARPXXXGRAXEGDXATDXXXXPXPDXXRAPXRPDXXRXXHKXXXXNSRGAXAXXXRAGHQTXAEXGGTGXAXXXXPRXPGXXTHRAGQGAXGNXXXGGRXXAPTKXXRRXHRRXNKHXRXXAXAXAXXATAXPXXXPARGHR

SEQ ID NO: 277443 - protein, 69 aa, Zea mays
  Clone ID: MRT4577_184605C.1.pep
ILPGKGQTSGVESSQTTRSKRSPVAVEAVAVQPRMKITVMQVRASATKLLRPEGIDPLQYRLRLTAIRL

SEQ ID NO: 277444 - protein, 134 aa, Zea mays
  Clone ID: MRT4577_184606C.1.pep
VPVPPPPWTIKVPPRNGANLNPPKKFSKRKGFPKGRLEKPPKSGFRIRAPAPKWAPSPGPGLLFPPPLFQLRGGGKSSRLVPPPGFFKFTKCPGILGLWRGGPWVFSPPTQNYGPGGFLALSPPGKRPCLKESC

SEQ ID NO: 277445 - protein, 109 aa, Zea mays
  Clone ID: MRT4577_184608C.1.pep
MDRCASCAATTGVCKSVVGSTFALTFSGAWASGPCGPGNPYGPAITSGWYRSLLTAASRCSCSHHFPFLAGDPLKLILYLSCVRVSIRPRSPWCLCMCLRTTCALWSFR

SEQ ID NO: 277446 - protein, 70 aa, Zea mays
  Clone ID: MRT4577_184609C.1.pep
GHVNPAVQGQGYINPQERNIFLRGHARGSRPAGPSSPGSYRLPSAPGYYGLPYTLPNYDRVPTSMHPRGH

SEQ ID NO: 277447 - protein, 81 aa, Zea mays
  Clone ID: MRT4577_18460C.1.pep
GPLPIGFAVFMVHPATIPITGTGINPARSLGAAVVYNNSKAWSDQWVFWVGPFIGAAIAALYHQIVLRARARGDGSFRSNA

SEQ ID NO: 277448 - protein, 61 aa, Zea mays
  Clone ID: MRT4577_184610C.1.pep
LIFNPTRFKDKREINRGSRHFMAFGGGLRSCVGADYSKVQMSIFSHLLVISPPPPHSIDGS

SEQ ID NO: 277449 - protein, 141 aa, Zea mays
  Clone ID: MRT4577_184611C.1.pep
MRIVLKQEKKEYVLETPYPNEPAKSATDVDQISFEKHKDDSLDGKIKAKDEISKPNAKPTSSPSLKDKSFHCIDFGHWSRNWKKYLEDNKKKKSETSTSDYEIWQVDVKATFLNESLSEDVHMMHPKCLLILKILENMQIL

SEQ ID NO: 277450 - protein, 68 aa, Zea mays
  Clone ID: MRT4577_184612C.1.pep
RTRACHRRYGAASRSARAQRARLAQRPPLDGSIPRRGAGPPATGIDRTLSDRGRCHTKLVAGGNGRVG

SEQ ID NO: 277451 - protein, 70 aa, Zea mays
  Clone ID: MRT4577_184613C.1.pep
QVCCVENGDKARRACHYYISIRQRGFLYWGLPQRLACLLKLIYVLPNRPAPVFKHFLLESLLELHNVIEL

SEQ ID NO: 277452 - protein, 228 aa, Zea mays
  Clone ID: MRT4577_184614C.1.pep
MDIRLLTNADLPLIQHANLENLPENYFLKYYLYHALSWPQLSYVAVDVSRPKKDPYEYPKIVGYVLAKMEEEPSDGIPHGHITSLSVMRTHRRLGIAEKLMRQSQLAMVETFQAKYVSLHVRVSNAAARHLYENTLGFTNEKTESKYYADGEDAFCMRLDLGDIKKQVDETLAAEEADAADEGDAVGEVGRDPEAGKDKEDGEGRKMKVAVGRGLGVGSLVEKDESKN

SEQ ID NO: 277453 - protein, 244 aa, Zea mays
  unsure (1)..(244): unsure at all Xaa locations
  Clone ID: MRT4577_184615C.1.pep
MLLRPPRLPRLSPRRLRSDSPMASTLALLRPSAPSPATNLRAPFRSRVSTRVSVGSAVAAGADTLFADYKPTTAFLFPGQGAQAVGMGKEALNVRAAAELFDKANDILGYDLLNLCIDGPKEKLNSTVISQPAIYVTSLAAVEVLRAREEGQSVINSVDVTCGLSLGEYTALAFAGAFSFEDGLKLVKLRGEAMQDASDAANSAMVSVIGLDSXKVQQLCDAANEDVDEKERVQIANFLCPGNY

SEQ ID NO: 277454 - protein, 86 aa, Zea mays
  unsure (1)..(86): unsure at all Xaa locations
  Clone ID: MRT4577_184616C.1.pep
KGDYFRYXLAELKTGPERKESVESTMMAYKAAQDIALTELAPTHPIRLGLALNLSVYYYEILNSPDKACNLAKHAXYDETVYEVNT

SEQ ID NO: 277455 - protein, 319 aa, Zea mays
  unsure (1)..(319): unsure at all Xaa locations
  Clone ID: MRT4577_184617C.1.pep
MQCMEGSIPDSSSTRIAVVTGGNKGIGLEVCRQLAASSTSGLAVVVVLTARDEARGAAAVGKLRGLGLSNVVFHQLDITDAPSIARLADFLKTRFGKLDILVNNAGFVGLEYIQDRIDGTSTTSEXLWHGHGQEAGAAAEMVPXETCDAGKECMRINYHGTKQVTRALLPLLLASDSGRIVNVSSVLGQLRFFGSEALKRELDDVASLTEERLDEVAGAFVADLEAGAVEARGWWPAGFSAAYMVSKAALNAYSRVLARRHPALRVNCVHPGFVRTDMTVNFGMLTPEEGGSRVVAVALLPDGGPTGAYFQERQQAPFV

SEQ ID NO: 277456 - protein, 55 aa, Zea mays
  Clone ID: MRT4577_184618C.1.pep
HASGGWRHTLALSEKKNVFSWGRGTSGQLGNGEIVDRWFLPRARALSVYVFPCPL

SEQ ID NO: 277457 - protein, 246 aa, Zea mays
  unsure (1)..(246): unsure at all Xaa locations
  Clone ID: MRT4577_184619C.1.pep
MGEAKDNEVYEEDLVDYEEEVENVIDGAPTNGSSDVVKKGYVGIHSSGFRDFLLKPELLRAIQDCGFEHPSEVQHECIPQAILGMDVICQAKSGMGKTAVFVLSTLQQIDPVAGQVAALVLCHTRELAYQICHEFERFSKYLPELRVAVFYGXGVHIKNHKDLLKNECPHIVVGTPGRILALARDKDLPLKNVRHFILDECDKMLESLDMRRDVQGDLQMTPHDKQVMMFSATLSKEIRPVCKRSC

SEQ ID NO: 277458 - protein, 145 aa, Zea mays
  unsure (1)..(145): unsure at all Xaa locations
  Clone ID: MRT4577_18461C.1.pep
MSLAFSADDTAPFFCYLGWLRLSSCLIIAWRVSAWETAQESACGVPSMRVMLPXLVMKCIKCVNMTGVVAIYSXIIDVIISTAINPKGKPYYLFDGXAHLSYGLACALAGLEYAMTIGIVIDDVCKANEQTTELVADMILILIFT

SEQ ID NO: 277459 - protein, 255 aa, Zea mays
  Clone ID: MRT4577_184620C.1.pep
MGRGRVELKRIENKINRQVTFSKRRNGLLKKAYELSVLCDAEVALIIFSGRGKLYEFGSAGVTKTLERYQHCCYNAQDSNNSALSESQSWYQEMSKLRAKFEALQRTQRHLLGEDLGPLSVKELQQLEKQLECALSQARQRKTQVMMEQVEELRRTERHLGEMNRQLKHKLEAEGCSNYTTLQHAACWPAPGGTIVEHDGATYQVHPPAHSVAMDCEPTLQIGYPHHQFPPPEAANNIPRSAATGENNFMLGWVL

SEQ ID NO: 277460 - protein, 255 aa, Zea mays
  Clone ID: MRT4577_184621C.1.pep
MGRGRVELKRIENKINRQVTFSKRRNGLLKKAYELSVLCDAEVALIIFSSRGKLYEFGSAGITKTLERYQHCCYNAQDSNGALSETQSWYQEMSKLRAKFEALQRTQRHLLGEELGPLSVKELQQLEKQLECALSQARQRKTQLMMEQVEELRRKERHLGEMNRQLKHKLEAEGCSNYRTLQHAAWPAPGSTMVEHDGATYHVHPTTAQSVAMDCEPTLQIGYPPHHQFLPSEAANNIPRSPPGGENNFMLGWVL

SEQ ID NO: 277461 - protein, 231 aa, Zea mays
  Clone ID: MRT4577_184622C.1.pep
MSKTVCFIFTSADKLLNGAATGWYLPEAAHPYYVLKPHFKLISASPKGGVVPLDENSKKMFTDDESVKFLDDPEAKKFVAETQQISDLDADAIDAIFVVGGHGPMIDLAKDKGFADLVGRLYSKKKIVSAVCHGPAALVLAQDPATGKSILDGKKVTGFSDAEEDTTPYNDYENILPFSLEDKLKDLSGGHYQAAEPNYSERVFVDGLVITGANPASAKPLAEKLKEVLSA

SEQ ID NO: 277462 - protein, 1290 aa, Zea mays
  Clone ID: MRT4577_184623C.1.pep
MAITFQHKIILRPGSMFCFGTISSVADEEGTLHRIADPPERKPSSIVSGKVGAKQDKAQPPVLRAKTTSCKPGAEDPSTRRTLLSTSSKEKWTRITRKKEANKVKARQAALLVSPPSKENRKKLVTTTVPFYPDVLFIGGRVESTPVSDDEPTAPGEEHLQQESRRRRNRRRNIRRHHEAGERDLAQPVSRDEISEMGETSEERVFRERRNSRRRDRRQAQEQAEQEARQRQENPLLGRNLNPDFARAMNTPSEVAGVLARIADGLPWTPDAEGYRRLLTQAANHLLPLAPPPSDLRHAINSRRDTQSSINASCERRHENKIGRREQYDRDHGIPARSQATRVELAMASTGGTTWGRAIQWPPNFKVSNVDKYEPKQDPRGWLAIYTTAARAAGATEDVMTAYLPIFLGQDALQWLRHLPRHCIDDWSDFSRRFIANFQSLSDKPAQPWDLKSIKRRGDEALQSYLKRFQTIRNRIPEVAEAVVIEDFYRGSSDSAFVRAILQKAPTTSEQLFWEADLYITADERAQDLIGGAKSALAVPRRDTNQQPDKRWEKRPREEVHAAGPPASRARGAPRGETSITLLGTADPSNLYHLPHLEEDPENLDSLNNRQEEEAEHSHASMEKSTSSSVDMGHKKARGNRSSTTVRYWWRPPWLNFDHPGKYPLLVDPVIRESRVKKVLVDGGSSINVTFPQTLQGLGVALKELHELDTPFFSIVPTEGEYPLGHIYMSVTFGTPENYRTEFLRFEVANFDCGYNTIIGRPELAKFMAIPHYTLRRYRWKLNPEKCVFRIPAGKLLGFIVSHQGIEANPEKIEAIMRMEAPRSQKKVQRLTGCMAALSRFISRLGEKGLPFYKLLKKKKYPQVQKLLYAVLLTARKLCHYFDDHKVIVVTGFPIGDILHNKEAIGRIAKWACELGAHNIEFRPRTAIKTQALVDFVSEWTEQQVPDNPEITKTWRMYFDGSLKLHGAGVGILFIAPGGEQLKYALQLLFSAFNNAAEYEALIHGLNIAVSLGIKRLMKAQGGYTHLLVAIDKFTKWIEYKPIAYLTSAKAVEFIQDIIFRFRILNSIITNLGSNFTSSEFFDFCEQRSIQIKYASVAHPRANGQVERANGMILEALRKKVFDKNEKFTGKWIRELSYVVWSLRTQPSRALHGNTPFFMVYGSETVLPADLRFGAPRLIFENIAEAETTRLEDIEILEEERSNTVIQSARYQQTLRRYHDKAIRHRSFAVGDLVLRRILTGEGQHKLSPLWEGPFMVAEVTRPAPYRLTQMDGIPIGNCSIMENLRKPHP

SEQ ID NO: 277463 - protein, 118 aa, Zea mays
  Clone ID: MRT4577_184624C.1.pep
MAESIVSGAAAPPPGAPSFSYLAVFSNCPLVAAVLAFAIAQSIKVLTTWYKENRWDAKQLVGSGGMPSSHSATVTALAVAVGLQEGFASSLFATAAVFASVVGSPPRFPLSLSTLKTR

SEQ ID NO: 277464 - protein, 36 aa, Zea mays
  Clone ID: MRT4577_184625C.1.pep
TSGEVPPKESLVSVGEKSDNVIDEVRAEEWVEAGIK

SEQ ID NO: 277465 - protein, 81 aa, Zea mays
  Clone ID: MRT4577_184626C.1.pep
RDLHLPTPPPRARPTCRYKENRWDAKQLVGSGGMPSSHSATVTALAVAVGLQEGFASSLFATAAVFASVVGSPLPFDTKKR

SEQ ID NO: 277466 - protein, 56 aa, Zea mays
  Clone ID: MRT4577_184627C.1.pep
PLPWDELPQYRMLPFSLNRLHRLGQPSTPGIALEAQGESPWPRMRRRKFHARDPHY

SEQ ID NO: 277467 - protein, 217 aa, Zea mays
  unsure (1)..(217): unsure at all Xaa locations
  Clone ID: MRT4577_184628C.1.pep
APSLTGSACALTLLRARDRRAGVRRTGGTRFGTWPPATARPPPPRSRSPSPPPLSIQSLRAAAPPPGAPSFSYLAVFSNCPLVAAVLTFAIAQSIKVLTTWYKENRWDAKQLVGSGGMPSSHSATVTALAVAVGLXEGLASSLFATAVVFVSVVGYPPHSPSPFRHQKNALTIFGKLSPTPPQNPSSIPSLPYSLLRRLRTVATRSHGEKLCGPQER

SEQ ID NO: 277468 - protein, 121 aa, Zea mays
  Clone ID: MRT4577_184629C.1.pep
MAESIVSGAAAPPPGAPSFSYLAVFSNCPLVAAVLAFAIAQSIKVLTTWYKENRWDAKQLVGSGGMPSSHSATVTALAVAVGLQEGFASSLFATTAVFASVVMYDAFGVRLHAGKQAALRR

SEQ ID NO: 277469 - protein, 41 aa, Zea mays
  Clone ID: MRT4577_18462C.1.pep
LWLSRLKKKKKKKKKKKKKKKKKIKKKKKKKKKKPLGCYHC

SEQ ID NO: 277470 - protein, 60 aa, Zea mays
  Clone ID: MRT4577_184630C.1.pep
IEFGSAYKRRFSFNARVRSRIRASFFFKIKLCVNFGRVCGPFLRHGSNFSLSLWAKKSRS

SEQ ID NO: 277471 - protein, 133 aa, Zea mays
  unsure (1)..(133): unsure at all Xaa locations
  Clone ID: MRT4577_184631C.1.pep
GARGTPFRLTPPLSPPPSRPPLGGATPSPFTLAPSSCPLRSCLRPKPXFGPGPGPQGPQKKSQKKPPGPLGAPGPXGLISKWPVSPRRFVPLFPGQGSPPPVGPAPPMGAPPSYPPPPPGPGGVRXPPGPCFF

SEQ ID NO: 277472 - protein, 76 aa, Zea mays
  Clone ID: MRT4577_184632C.1.pep
PLSQPIEYDIVLEDLAVGDEGVVERVVVSGSVETAEQAAVLIIPTSPSRSAHTTKLNPVDPHEPDPEPEGEQKPAH

SEQ ID NO: 277473 - protein, 238 aa, Zea mays
  Clone ID: MRT4577_184633C.1.pep
MERKSSSCRDTASCLALLAVALCLGAAGGARGQLTDDFYDDCCPQAENIGRARVSAAMKAEPRMGASLLRLHFHDCFVNGCDGSILLDGNNTEKLAGPNLNSARGFDVVDAIKADLEKACPGVVSCADILAIGVKYGVLLSGGPDYNVLLGRRDGLVANQSGANSNLPSPFDPISTITKKFSDVGLNTTDVVVLSGGHTIGRARCVLFSGRLANFSATSSVDPTLNASLASSLQALCR

SEQ ID NO: 277474 - protein, 1250 aa, Zea mays
  Clone ID: MRT4577_184634C.1.pep
MSIKQMFLMQTQAVQAIDQTLAAIQQQQQQQAPPQPQMPQMPRDKRAEFMRGHPPTFAHSSDPMDAEDWLRTVERELHTAHCDDREKVLYGPRLLRGAAQSWWESYLATHANPDTITWEEFRGSFRQYHVPAGLMTVKKEEFLALKQGPLSVSEYRDRFLQLSRYAPEDVNTDAKRQYRFLRGLVDPLQYQLMNHTFPTFQHLIDRAIMTERKRKEMEDRKRKISGPQPGSSNRPRFSSNQPQQFRQNQRPPQQHQQFQRQYPQNQYQNRQSNQSGAGGRIRADSICLNISVKIRGIAFPANLIVMGTQGIDVILGMNWLDKYQAIISCDKRTIKLVSPLGEEVVTKLVPPEPKKGSCYQIAVDSSEADPIESIKVVSEFPDVFPKDLPGMPPERKVEFAIELLPGTAPIFKRAYRISGPELVELKKQIDELSEKGYIRPSTSPWSAPVLFVEKKDGTKRMCIDYRALNEVTIKNKYPLPRIEDLFDQLRGASVFSKIDLRSGYHQLRIRPSDIPKTAFISKYGLYEFTVMSFGLTNAPAFFMNLMNSVFMDYLDKFVVVFIDDILVYSQSGEEHADHLRMVLQRLREHQLYAKLSKCEFWISEVLFLGHIINKEGLAVDPKKVADILNWKAPTDARGIKSFIGMAGYYRRFIEGFSKIAKPMTALLGNKVEFKWTQKCQEAFEALKEKLTTTPVLVLPDVHKPFSVYCDACYTGLGCVLMQEGRVVAYSSRQLKVHEKNYPIHDLELAAVVHALKTWRHYLYGQKCEVYTDHKSLKYIFTQSELNMRQRRWLELIKDYELEIHYHPGKANVVADALSRKSQSIRELILKEAHETAYSIHPGSEKMYQDLKKKFWWYGMKREIAEHVAMCDSCRRIKAEHQRPAGLLQPLQIPQWKWDEIGMDFIVGLPRTRAGYDSIWVVVDRLTKSAHFIPVKTSYNSAVLAELYMSWIVCLHGVPKKIVSDRGTQFTSHFWQQLHEALGTHLNFSSAYHPQTDGQTERTNQILEDMLRACALQDQSGWDKRLPYAEFSYNNSYQASLKMSPFQALYGRSCRTPLQWDQPEEKQVFGPDILLEAEENIKMVRENLKIAQSRQRSYADTRRRELSFEVGDFVYLKVSPIRGVRRFGVKGKLAPRYIGPYQILARRGEVAYQLSLPENLSAVHNVFHVSQLKKCLRVPEEQLPVEGLEVQEDLTYVEKPAQILEIADRVTRRKTIRMCKVRWNHHSEEEATWEREDDLMAKYPELFASQP

SEQ ID NO: 277475 - protein, 1063 aa, Zea mays
  Clone ID: MRT4577_184635C.1.pep
MSIEQMFLMQTQAVQAIGQTLAAIQQQQQQQQQAPPQPQMPQVPRDKRAEFMRGHPPTFAHSSDPMDAEDWLRTVERELHTAQCDDREKVLYGPRLLRGATQSWWESYLATHANPDTITWEEFRGSFRQYHVPAGLMTVKKEEFLALKQGSSSVSEYRDRFLQLSRYAPEDVNTDAKRQYRFLRGLVDPLQYQLMNHTFPTFQHLIDRAIMTERKRKEMEDRKRKISGPQSGSSSRPRFSGNQPQQFRQNQRPPQQHQQRQQYQQFQRQYPQNQYQNRQSNQSGGQFQKQNQQAPRLPAPANQQNSQAAPAPVGNRACFHCGEQGHWVMQCPKKAAQQQSGPNAPAKQNVSQPGAGNRSQQRYNHGRLNHLEAEAVQETPDMTVGMFPVDSHIAEVLFDTGATHSFITASWVEAHNLPTTTMSTPIQIDSAGGRIRADSICLNISVKIRGIAFPANLIVMGTQGIDVILGMNWLDKYQAVISCDKRTIKLVSPLGEEVVTELVPPEPKKGSCYQMTVDSSEADPIESIKVVSEFPDVFPKDLPGMPPERKVEFAIELLPGTAPIFKRAYRISGPELDELKKQIDELSEKGYIRPSTSPWAAPVLFVEKKDGTKRMCIDYRALNKVTIKNKYPLPRIEDLFDQLRGASVFSKIDLRSGYHQLRIRPSDIPKTAFITKYGLYEFTVMSFGLTNAPAFFMNLMNSVFMDYLDKFAVVFIDDILIYSQSEEEHADHLRMVLQRLREHQLYAKLSKCEFWISEVLFLGHIINKEGLAVDPKKVADILNWKAPTDARGIKSFIGMAGYYRRFIEGFSKIAKPMTALLGNKVEFKWTQKCQEAFEALKEKLTTAPVLVLPDVHKPFSVYCDACYTEMRCLHRPQESEVHIHSIRIEHEATKMVRENLKIAQSRQRSYADTRRRELSFEVGDFVYLKVSPIRGVRRFGVKGKLAPRYIGPYQILARRGEVAYQLSLPENLSAVHDVFHVSQLKKCLRVPEEQLPVEGLEVQEDLTYVEKPAQILEVADRVTRRKTVRMCKVRWSHHSEEEATWEREDDLKAKYPELFASQP

SEQ ID NO: 277476 - protein, 73 aa, Zea mays
  Clone ID: MRT4577_184636C.1.pep
VQSTAAQLVYMNRPTDQPVEAGTKHRLARERHLATYQIHVMCLGGTRQGLPALHTPKTISISAQGEHLNPYSG

SEQ ID NO: 277477 - protein, 41 aa, Zea mays
  Clone ID: MRT4577_184637C.1.pep
HRNDGKILTPVMWCNHHAMAVGAYPFEASEEPKNFRETIQR

SEQ ID NO: 277478 - protein, 1422 aa, Zea mays
  unsure (1)..(1422): unsure at all Xaa locations
  Clone ID: MRT4577_184638C.1.pep
MVLVMTMVLSSHLERLCHRLHEEQERRRQEQQGSSFSLQQEIESVRSCSPVLPLEAPPAPPLGAPASGVAARGDPDDGGSDDSSSHDTDLSADQELEGWVARPITRDTARGCHFHDALDTLLRRALNRRTWSIEYRCVVYQHSRGVYPDRWEATCLVRRPENSLQGAEACSEHYSISERDSAEAAMQDAARRALSHYCSVLGGVADGLDLKYYPRRPSGSTGGVIVSPVGEDNPRLSSTMSENRRRGGRCAQQERDAQQEEVPQQQHLPPPPPMSIEQMFLMQTQAVQAIGQTLAAIQQQQQQQQQAPPQPQMPQMPRDKRAEFMRGHPPTFAHSSDPMDAEDWLRTVERELHTAQCDDREKVLYGPRLLRGAAQSWWESYLATHAHPDTITWEEFRGSFRQYHVPVGLMTVKKEELLALKQGPLSVSEYRDRFLQLSRYAPEDVNTDAKRQYRFLRGLVDPLQYQLMNHTFPTFQHLIDRAIMTERKRKEVEDRKRKISGPQPGSSNRPRFSGNQPQQFRQNXASTSAASAVPKAVXSISTRTVRAIXGEVLFDTGATHSFITASWVEAHNLPTTTMSTSIQIDSAGGRIRADSICLNVCVEIRGIAFPANLIVMGTQGIDVILGMNWLDKYQAVISCDKRTIKLVSPLGEEVVTELVPPEPKKGSCYQMAVDSSEADPIERIKIVSEFPDVFPKDLPGMPPERKVEFAIELLLGTAPIFKRAYRISRPELVELKKQIDELSEKGYIRPSTSPWAAPVLFVEKKDGTKRMCIDYRALNEVTIKNKYPLPRIEDLFDQLRGASVFSKIDLRSGYHQLRIRPSDIPKTAFITKYGLYEFTVMSFGLTNAPAFFMNLMNSVFMDYVDKFVVRLREHRLYAKLSKCEFWINEVLFLGHIINKEGLAVDSKKVADILNWKAPTDTRGIKSFIGMAGYYRRFVEGFSKIVKPMTALLGNKVEFKWTQKCQEAFEALKEKLTTAPVLVLPDVHKPFSVYYDACYTGLGCVLMQEGRVVAYSSRQLKVHEKNYPIHDLELAAVVHALKTWRHYLYGQKCDVYTDHKSLKYIFTQSELNMRQQRWLELIKDYELEIHYHPGKANVVADALSRKSQVNLMVARPMPYELAKEFDRLSLGFLNNSRGVTVELEPTLEREIKEAQKNDEKISEIRRLILDGRGKEFREDAEGVIWFKDRLCVPNVQSIRELILKEAHETAYSIHPGSEKMYQDLKKKFWWYRMKREIAEHVFGPDILXSRREHQDXRENLKIAQSRQRSYADTRRRELSFEVGDFVYLKVSPIRGVKRFGVKGKLAPRYIGPYQILSRRGEVAYQLSLPENLSAVHDVFHVSQLKKCLRVPEEQLPVEGLEVQEDLTYVEKPVQILEVADRVTRRKTIRMCKVRWNHHSEEEATWGREDDLIAKYPELFASQP

SEQ ID NO: 277479 - protein, 536 aa, Zea mays
  Clone ID: MRT4577_184639C.1.pep
MCVDYRALNEVTIKNKYPLPRIEDLFDQLRGASVFSKLDLRSGLGCVLMQEGRVVAYSSRQLKVHEKNYPIHDLELAAVVHALKTWRHYLYGQKCDVFTDHKSLKYIFTQSELNMRQRRWLELIKDYELEIHYHPGKANVVADALSRKSQVNLMFDRLSLGFLNNSRGVTVELEPTLEREIKEAQKNDEKISEIRRLILDGRGKDFWEDAEGVIWFKDRLCVPNVQSIRELILKEAHETAYSIHPGSEKMYQDLKKKFWWYGMKREIAEHVAMCDSCRRINAEHQRPAGLLQPLQIPQWKWDEIGMDFIVGLPRTRAGYDSIWSGWDKRLPYAEFSYNNSYQTSLKMSPFQALYGRSCRTPLQWDQLGEKQVFGPDILLEAEENIKMVRENLKIAQSRQRSYVDTRRRELSFKVGDFVYLKVSPIRGVRRFGVKGKLAPRYIGPYQILSRRGEVAYQLSLPENLSVVHDVFHVSQLKKCLRVPEEQLPVEGLEVQEDLTYVEKPTQILETTDRVTRRKTIRMCKVRWNHHSEEEAT

SEQ ID NO: 277480 - protein, 44 aa, Zea mays
  Clone ID: MRT4577_18463C.1.pep
MCKHGGASRRITCRKRGGLTGFNCRCGNLYCATHCYSDKHECKF

SEQ ID NO: 277481 - protein, 72 aa, Zea mays
  Clone ID: MRT4577_184640C.1.pep
CPRCSVPCAFLPPPPVLWGCSPPSPPSLPSFTPRGPFSLGTSVRVWKKVFFFRPLRPRGAQKGLPGGRFLFL

SEQ ID NO: 277482 - protein, 1043 aa, Zea mays
  unsure (1)..(1043): unsure at all Xaa locations
  Clone ID: MRT4577_184641C.1.pep
MSENRRRGGRRAQQEQLAQQDEVPQQQQLPPPPPMSIEQMFLMQTQAVQAIGQTLASIQQQQQQPPPQPQMPQMPRDKRAEFMRGHPPTFSHSSDPMDVEDWLHTMERELHTAQCDDREKVLYGPGLLRGAAQSWWESYLATHANPDTITWEEFRGLMTMKKEEFLALKQGSLSVSEYRDRFRQLSRYAPKDVNTDAKRQYRFLRGLVDPLQYQLMNHTFPTFQHLIDRAIMTERKRKEMEDRKRKISGPQPESSNRPRFSSNQPQQQPNSSQAPMPPAKQNVSQPGEGNRSQPRYNHGRLNHLEAEAVQETPNMIVGMFPVDSHIAEVLIDTGATHSFITTSWVEAHNLPVTTMSTPIQIDSAGGRIQADSICLNVSVEIRGIAFPANLIVMGTQGIDVILGMNWLDKYQAVISCDKRTIKLVSPLGEEVVTELVPPEPKKGSCYQMAIKSSEADPIESIKVVSEFPDVFPKDLPGMPPERKVEFAIELLPGTAPIFKRAYRISGPELVELKKLIDELSEKGYIRPSTSPWAAPVLLVEKKDDTKRICIDYRALNEVNIKNKYPLPRIEDLFDQLRGASVFSKIDLRSGYHQLRIRPSDIPKTTFITKYGLCEFTVMSFGLTNAPAFFMNLINNVFMDYLDKFVVVFIDDILIYSQSEEEHADHLRMEGRVVAYSSQQVKVHEKNYPIHDLELAAVVHALKTWRHYLYGQKCDVYTDHKSLKYIFTQSELNMRQRRWLELIKDYELEIHYHPGKANVVVEALSRKSQVNLMVARPMPYELAKEFDRLSLGFLNNTRGVTIELKHTLEREIKKAQKNDEKISEIRXKAEHQRPAGLLQLLQIPQWKWDEIXSGWDKRFPYAEFSYNNSYQASLKMSPFQALYGRSCRTLLQWVQPRKKQVFRPNILLEAEENIKMVRENLKIAQSRQRSYADTRRRDLSFEVGDFVYVKVSPIRGVRRFGVKGKLAPRYIGPYQILARRGEVAYQLSLPENLSAVHDVFHVSLLKKCLRVPEEQLPVEGLEVQEALTYIEKPTQILEIADRVT

SEQ ID NO: 277483 - protein, 1823 aa, Zea mays
  Clone ID: MRT4577_184642C.1.pep
MKLWKETSRSSKITTSSRCGLAATPSRLPVKAAMARLRHTARKSVIPFLPSRLAERPLRRPVAGQSSHLERLHHRLREEQERRRQEQQGSSFSLHQEIESVRSCSPVLPLEAPPAPPLGAPASGVAAGGDPDDGDGDDSSSHDTDFSANPEPEGWVARPITRDAARGCHFHDALDTLLRRAFDRHTCRGVYPDRWEATCLVRCPENSLQGAEACSEHYSISERDSAEAAMQDAARRALSHYCSVFGGAADGLDLKYYPRRPSGSTGGVIVSPVGEGNPRLSSTVNLAAVLNTELDHALDELSRARAEIALLRAERAERHHLDGGSPAPMSENRRRGGRRAQQERAAQQDEVPQQQHLPPPPPMSIEQMFLMQTQAVQAIGQTLATIQQQQQQQQQAPPQPQMPQIPRDKRAEFMRGHPPTFAHSSDPMDAEDWLRTVERELHTAQCDDREKVLYGPRLLRGAAQSWWESYLATHAHPDAITWEEFRGSFRQYHVPAGLMTVKKEEFLALKQGSSSVSEYRDRFLQLSRYAPEDVNTDAKRQYRFLRGLVDPLQYQLMNHTFPTFQHLIDRAIMTERKRKEMEDRKRKISGPQPGSSNRPRFSGNQSQQFRQNQRPPQQHQQFQRQYPPHQYQNRQSNQSGGQFQRQNQQAPRLPAPANQQNSQAAPAQVGNRACFHCGEQGHWVMQCPKKAAQQQSGPSAPAKQNVPQHGVGNRSQPRYNHGRLNHLEAEAVQDTPGMIVGMFPVDSHIAEVLFDTGATHSFITASWVEAHNLPITAMSTPIQIDSAGGRIRADSICLNISVEIRGIAFPANLIVMGTQGIDVILGMNWLDKYQAVISCDKRTIKLVSPLGKEVVTELVPPEPKKGSCYQIAVDSSEADPIESIKVVSEFPDVFPKDLPGMPPERKVEFAIELLPGTAPIFKRAYRISGPELDELKKQIDELSEKGYIRPSTSPWAAPVLFVEKKDGTKRMCIDYRALNEVTIKNKYPLPRIEDLFDQLRGASVFSKIDLRSGYHQLRIRPSDIPKTAFISKYGLYEFTVMSFGLTNAPAFFMNLMNSVFMDYLDKFVVVFIDDILVYSQSEEEHEDHLRMVLQRLREHQLYAKLSKCEFWISEVLFLGHIINKEGLAVDPKKVADILNWKAPTDARGIKSFIGMAGYYRRFIEGFSKIAKPMTALLGNKVEFKWTQKCQEAFEALKEKLTTAPVLVLPDVHKPFSVYCDACYTGLGCVLMQEGRVVAYSSRQLKVHEKNYPIHDLELAAVVHALKTWRHYLYGQKCDVYTDHKSLKYIFTQSELNMRQRRWLELIKDYELEIHYHPGKANVVADALSRKSQVNLMVARPMPYELAKEFDRLSLGFLNNSRGVTVELEPTLEREIKEAQKNDEKISEIRRLILDGRGKDFREDAEGVIWFKDRLCVPNVQSIRELILKEAHETAYSIHPGSEKMYQDLKKKLWWYGIKREIAEHIPQWKWDEIGMDFIVGLPRTRAGYDSIWVVVDRLTKSAHFIPVKTNYSSAVLAELYMSWIVCLHGVPKKIVSDRGTQFTSHFWQQLHEALGTHLNFSSAYHPQTDGQTERTNQILEDMLRACALQDQSGWDKRLPYAEFSYNNSYQASLKMSPFQALYGRSCRTPLQWDQPGEKQVFGPDILLEAEENIKMVRENLKIAQSRQRSYADTRRRELSFEVGDFVYLKVSPIRGVRKFGVKDKLAPRYIGPYQILARRGEVAYQLSLPENLSAVHNVFHVSQLKKCLRVPEEQLPVEGLEVQEDLTYVEKPVQILEVADRVTRRKTIRMCKVRWNHHSEEEATWEREDDLMAKYPELFASQP

SEQ ID NO: 277484 - protein, 98 aa, Zea mays
  Clone ID: MRT4577_184643C.1.pep
PPHQQVLPPPHAPLIQSTIHCAQHPDPSASDVAHPSGPTSSCRASQRPQSIFWPPPPPPKYGKEPPWPRVPRTPPKRSPKAHVGADHPGPRLRIPPPP

SEQ ID NO: 277485 - protein, 1696 aa, Zea mays
  Clone ID: MRT4577_184644C.1.pep
MESHDLRAEWESRLVGGYEIDDSGYDYGAGKWYSFRLERMARLRHTARKSVIPFLPSRLAERPLRRPVAGQSSHLERLHHRLREDQERRRQEQQGSSFSLQQEIESVRSCSPVLPLEAPPAPPLGAPASGVAAGGDPDDGGGDDSSSHDTDFSANPEPEGWVARPITRDFSAFWFIYYVNEMSENRRRGGRRAQQERAAQQEEVPQQQHLPPPPPMSIEQMFLMQTQAVQAIGQTLAAIQQQQQAPPQPQMPQMPRDKRAEFMRGHPPTFAHSSDPMDAEDWLRTVERELHTAQCDDREKVLYGPRLLRGAAQSWWESYLATHAHPDAITWEEFRGSFRQYHVPAGLMTVKKEEFLALKQGPLSVSEYRDRFLQLSRYAPEDVNTDAKRQYRFLRGLVDPLQYQLMNHTFPTFKHLIDRAIMTERKRKEMEDRKRKISGPQPGSSNRPRFSGNQPQQFRQNQRPPQHQQFQRQYPQHQYQNRQSNQSGGQFQRQNQQAPHLPAPANQQNSQAAPAQVGNRACFHCGEQGHWVMQCPKKAAQQQSGPNAPAKQNVSQPGSGNRSQPRYNHGRLNHLEAEAVQETPGMIVGMFPVDSHIAEVLFDTGATHSFITASWVEAHNLPITTMSTPIQIDSAGGRIRADSICLNISVKIRGIAFPANLIVMGTQGIDVILGMNWLDKYQTVISCDKRTIKLVSPLGEEVVTELVPPEPKKGSCYRIAVDSSGADPIESIKVVSEFSDVFPKDLPGMPPERKVEFAIELLPGTAPIFKRAYRISGPELVELKEQIDELSEKGYIRPSTSPWAAPVLFVEKKDGTKRMCIDYRALNEVTIKNKYPLPRIEDLFDQLRGASVFSKIDLRSGYHQLRIRPSDIPKTAFISKYGLYEFTVMSFGLTNAPAFFMNLMNSVFMDYLDKFVVVFIDDILVYSQSEEEHADHLRMVLQRLREHQLYAKLSKCEFWISEVLFLGHIINKEGLAVDPKKVADILNWKAPTDARGIKSFIGMAGYYRRFIEGFSKIAKPMTALLGNKVEFKWTQKCQEAFEALKEKLTTAPVLVLPDVHKPFSVYCDACYTGLGCVLMQEGRVVAYSSRQLKVHEKNYPIHDLELAAVVHALKTWRHYLYGQRCDVYTDHKSLKYIFTQSELNMRQRRWLELIKDYELEIHYHPGKANVVADALSRKSQVNLMVARPMPYELAKEFDRLSLRFLNNSRGVTVELEPTLEREIKEAQKNDEKISEIRRLILDGRGKDFREDAEGVIWFKDRLCVPNVQSIRELILKEAHETAYSIHPGSEKMYQDLKKKFWWYGMKREIAEHVAMCDSCRRIKAEHQRPAGLLQPLQIPQWKWDEIGMDFIVGLPRTRAGYDSIWVVVDRLTKSAHFIPVKTNYSSAVLAELYMSRIVCLHGVPKKIVSDRGTQFTSHFWQQLHEALGTHLNFSSAYHPQTDGQTERTNQILEDMLRACALQDQSGWDKRLPYAEFSYNNSYQASLKMSPFQALYGRSCRTPLQWDQPGEKQVFGPDILLEAEENIKMVRENLKIAQSRQRSYADTRRRELSFEVGDFVYLKVSPIRGVKRFGVKGKLAPRYIGPYQVLARRGEVAYQLSLPENLSAVHDVFHVSQLKKCLRVPEEHLPVEGLEVQEDLTYVEKPVQILEVADRVTRRKTIRMCKVRWDHHSEEEATWEREDDLMAKYPELFASQP

SEQ ID NO: 277486 - protein, 294 aa, Zea mays
  Clone ID: MRT4577_184645C.1.pep
MLCLSLVAPPPMAPAGRRRRRRHPTSVTRRGQTLAALPCHCGRRHVIGASSAAALLPFLAPPSLAAPPVDPDVVLQRVHPSRPDWYEEFYASAMDQGMKSYEAEIAGYKVKLFSHLSPAGKNILELGVGTGPNFKYYASEDGVNVIGVDPNKHMEKYARAAVVSAGLASSSFTFRRGVAEALPAEDNSMDVVVGTLVLCSVNNIDMALREIKRVLKPGGLYVFIEHVAAPDGTLLRLVQGALDPLQQLVADGCHLTRRTGQSIRDAGFSSLSLDGVRLSNAYIISPHVYGVACK

SEQ ID NO: 277487 - protein, 68 aa, Zea mays
  Clone ID: MRT4577_184646C.1.pep
GFFFFGKKGFNFPVALGMFLAVIGIIWFGNPSSKPGGKKPPVFSPPSEKTQKHGGVFSQSEVDQKVLN

SEQ ID NO: 277488 - protein, 1371 aa, Zea mays
  Clone ID: MRT4577_184647C.1.pep
MSENRRRGGRRAQQEQAAQQEEVPQQQQLPPLPPMSIEQMFLMQTQAVQAIGQTLATIQQQQQQAPPQPQMPRDKRAEFMRGLMTVKKEEFLALKQGSSSVSEYRDRFLQLSRYALEDVNTDAKRQYRFLRGLVDPLQYQLMNHTFSTFQHLIDRAIMTERKRKEMEDRKRKISGPQPGSSIRPRFSGNQSQQFRQNQRPPQQHQQFQRQYPQHQYQNRQNNQSRGGQFQRQNQQTLRLPALAAQQNSQAAPAQVGNRACFHCGEQGHWVMQCPKKTAQQQSGPNAPAKQNVSQPGAGNRSQPRYNHGRLNHLEAEAIQETPDMIVGMFPVDSHIAEVLFDAGATHSFITASWVEAHNLPITTMSTPIQIDSAGGRIRANSICLNVCVEIRGIAFPANLIVMGTQGIDVILGMNWLDKYQAVISCDKRTIKLVSPLGDEVVTELVPPEPKKGSCYQMVVDSSEADPIESIKIVSEFPDVFPKDLPGMPPERKVEFAIELLPGTAPIFKRAFRISVPELVELKKPIDELSEKGYIRPSTSPWAAPVLFVEKKDGTKRMCIDYRALNEVTIKNKYPLPRIEDLFDQLRGASVFSKIDLRSGYHQLRIRPSDIPKTAFITKYGLYEFTVMSFGLTNAPAFFMNLMNSVFMDYLDKFVVVFIDDILIYSQSEEEHASHLRMKVADILNWKAPTDAQGIKSFIGMAGYYRRFIEGFSKIAKPMTALLGNKVEFKWTRKCQEAFEALKEKLTTTPILVLPDVHKPFSVYCDACYTGLGCVLMQEGRVVAYSSRQLKVHEKNYPIHDLELAAVVHALKTWRHYLYGQKCDVYIDHKSLKYIFTQSELNMRQRRWLELIKDYELEIHYHPGKANVVADALSRKSQINLMVARPMPYELAKEFDRLSLGFLNNTRGVTVELEPTLEWEIKEAQKNDEKISEIRRLILDGRGKDFREDAEGVIWFKDRLCVPNVQSIRELILKEAHETAYSIHPGSEKMYQDLKKKFWWYGMKREIAEHVAMCDSCRRIKAEHQRPAGLLQPLQIPQWKWDEIGMDFIVGLPRIRAGYDSIWVVVDRLTKSAHFIPVKTNYSSAVLAELYMSRIVCLHGVPKKIVSDRGTQFTSHFWQQLHEALGTHLNFSSAYHPQTDGQTERTNQILEDMLRACALPDQSGWDKRLPYAEFSYNNSYQASLKMSPFQALYGRSCRTPLQWDQPGEKQVFGPDILLEAEENIKMVRENLKIAQSRQRSYADTRRRELSFEVGDFVYLKVSPISGVRRFGVKGKLAPRYIGPYQILARRGELKKCLRVPEEQLPVEGLEVQEDLTYTEKPAQILEIADIVTRRKTIRMCKVKWDHHSEEEATWEREDDLMAKYPELFASQP

SEQ ID NO: 277489 - protein, 63 aa, Zea mays
  Clone ID: MRT4577_184648C.1.pep
SCLVGQVVLQRVHPSRPDWYEEFYASAMDQGMKSYEAEIAGYKVKLFSQLSPAGKNILELVLG

SEQ ID NO: 277490 - protein, 778 aa, Zea mays
  unsure (1)..(778): unsure at all Xaa locations
  Clone ID: MRT4577_184649C.1.pep
MESHDLRTERESWLVGGNETDGFGYDYGTGKWYYFRLERAPPAPPLGALASGVAAGGDPDDGGGDDSSSHDTDFSADQEPEGWVARPITRDAARGCHFHDALDTLLRWALNRRTWSIEYRCVVYQHSRGVYPDRWEATCLVRRPENSLQGAEACSEHYSISERDSAEAAMQDAARRALSHYCLILGGMSENRRRGGRRAQQKQAAQQEEVPQQQQLPPPPPMSIEQMFLMQTQAVQAIGQTLAAIQQQQQQAPPQPQMPQMPRDKRAEFMRGHPPTFAHSSDPMDAEDWLHTVERELHTTQCDDRKKVLYGPRLLRGAAQSWWESYLVTHANPDTITWEEFRGSFRQYHVPTGLMTAKKEEFLALKQGSSSVSEYRDRFLQLSRYAPEDVNTDAKRQYRFLRGLVDPLQYQLMNHTFLTFQHLIDKAIMTERKRKEMEDRKRKISGPPPGSINRPCFSGNQSQQFRQNQRPPQQHQQFQRQYPQHQYQNRQNNQSGGSQFQRQXAGTSSSXPAAQQSSQAAPAQVGNRACFHCGEQGHWVMQCLKKASQQQSGPNAPAMQNVSQPGAGNHSQPRYNHGRLNHLEAEAVQETPGMIVGMFPVDSHIAEVLFDTGATHSFITASWVEAHNLPITTMSTLIQIDSAGGRIRADSICLNVCVEIREIAFPANLIVMGTQGIDVILGMNWLDKYQAVISCDKRTIKLVSPLGKEVVTELVPPEPKKGSCYQMAVDSSEADPIERIKIVSEFPDVFPKDLPGMPPERKVEFAIELLPGTAPCGG

SEQ ID NO: 277491 - protein, 77 aa, Zea mays
  unsure (1)..(77): unsure at all Xaa locations
  Clone ID: MRT4577_18464C.1.pep
MFCNCXGSKCGWGSNCKCGKKYPYLEETSTPAQAPVVLGVAPEKKAAPEFFKAPGEPGEAPHACGFGNNCKCDPCNC

SEQ ID NO: 277492 - protein, 107 aa, Zea mays
  Clone ID: MRT4577_184650C.1.pep
SLTRGVGTLVLCSVNNIDMVLREIKRVLKPGGLYVFIEHVAAPDGTLLRLVQGALDPLQQLVADGCHLTRRTGQSIRDAGFLSLSLDGVQLSNAYIISPHVMGVACK

SEQ ID NO: 277493 - protein, 112 aa, Zea mays
  unsure (1)..(112): unsure at all Xaa locations
  Clone ID: MRT4577_184651C.1.pep
FSXKKKKKKSPPPPPPKNTPVAASSRGWNVSPKITLPCSSPHPATRNPVTSRLVWGMHYEPVVAGRMDGWKGIWILFCFPCRPPPPPPVPPALILWLVRCGFNPPAAAAFPV

SEQ ID NO: 277494 - protein, 73 aa, Zea mays
  unsure (1)..(73): unsure at all Xaa locations
  Clone ID: MRT4577_184652C.1.pep
MSSTHPNQPSRYITLFPAEPLSSHSCFLALQPTTHTLSFYLSLPLNFGLLPRSCYLSAFVSSKFPISLSPXRF

SEQ ID NO: 277495 - protein, 147 aa, Zea mays
  Clone ID: MRT4577_184653C.1.pep
LPATTPSSAKAFGSRYRPAPQKCASLTATFRRKSRSMTPSDPGTRSRANTDGPAAVHAAAPKPDYPTRRLSPCSAISQQPQALPVPSTLASLPSSGSAWAGSEGGTEVDWSHEGHRHVGLVDVLVIMFTAGGKQGRHGGSGGGFPAG

SEQ ID NO: 277496 - protein, 1502 aa, Zea mays
  Clone ID: MRT4577_184654C.1.pep
MYAARSAKVDSSLGEECGGNETDGFGYDYGAGKWYSFRLEMVVSIATTAREKMKLWKETSRSSKTTTSSRRGLAATPSRLPMKAAEIESVRSCSPVLPLEAPPAPPLGAPASGVATGGDPDDGGGDNSSSHDTDFSADQEPEGWVARPITRDAARGCHFHDALDTLLRRALNQRTWSIEYRCVVYSDRWEATCLVRRPENSLQGAEACLEHYSISEWDSAEAAMQDAAWHALSHYCSVLGGVADGLDLKYYPRRPSGSTGGGIVSPVGEDNPRLSSTVNLVAVLNTELDHALDELSRARAEMSENRRRGGRRAQQERAAQQDEVPQQQHLPPPPPMSIEQMFLMQTQAVQAIDWLRTVERELHTAQCDDKEKVLYGPRLLRGAAQSWWESYLATHAHPDTITWEEFRGSFRQYHVPAGLMTVKKEEFLALKQGSSSVNEYRDRFLQLSRYAPEDVNTDAKRQYRFLRGLVDPLQYQLMNHTFPTFQHLIDRAIMTERKRKEMEDQVLFDTGATHSFITASWVEAHNLPITTMSTPIQIDSAGGRIRADSICLNISVEIRGIAFPANLIVMGTQGIDVILWMNWLDKYQAVISCDKRTIKLVSPLGEEVVTELVPPEPKKGSCYQIAVDSSEADPIESIKVVSEFPDVFPKDLPGMPPERKVEFAIELLPGTAPIFKRAYRISRPELVELKKQIDELSEKGYIRPSTSPWAAAVLFVEKKDDTKRMCIDYRALNEVTIKNKYPLPRIEDLFDQLRGASVFSKIDLRSGDHQLRIRPSDIPKTAFITKYGLYEFTMMSFGLTNAPAFFMNLMNSVFMDYLDKFVVVFIDDILIYSQSEEEHADHLKMVLQRLREHQLYAKLSKCEFWINEVLFLGHIINKEGLVVDPKKVADILNWKAPTNARGIKSFIGMAGYYRRFIEGFSKIAKPMTALLGNKLKVHEKSYPIHDLELAAVVHALKTWRHYLYGQKCDVYTDHKSLKYIFTQSELNMRQRRWLELIKDYELEIHYHPGKANVVVDALSRKSQVNLMVARLMPYELAKEFDRLSLGFLNNSRGVIIELEPTLEQEIKEAQKNDEKISEIRRLILDGRGKDFREDAEGVIWFKDRLCVPNVQSIRELILKEAHETAYSIHPGSEKMYQDLKKKFWWYRMKREIAEHVAMCDSCRRIKAEHQRPAGLLQPLQIPQWKWDEIVVDRLTKSAHFIPVKTNYSSAVLAELYMSRIICLHGVPKKIVSDRGTQFTSHFWQQLHEALGTHLNFSSAYHPQTNGQTERTNQILEDMLRACALQDQSGWDKRLPYAEFSYNNSYQDNLKMSPFQALYGRSCRTPLQWDQPGEKQVFGPDILLEAEENIKMVRENLKIAQSRQRSYADTRRRELSFEVRDFVYLKVSPIRGVRRFGVKGKLAPRYIGPYQILSRRGEVAYQLSLPENLSAVHDVFHVSQLKKCLRVPEEQLPVESLKVQEDLTYVEKPVQILEVADRVTRRKTIRMCKVRCERELGLHLVPK

SEQ ID NO: 277497 - protein, 78 aa, Zea mays
  Clone ID: MRT4577_184655C.1.pep
RRFFHARQDIYLFFSTGQGTQPYFFYLLHRGEGFDWLSNTNNLINFKLRGDPTNSLTPYTHKGEPSFFSLGSGGGINI

SEQ ID NO: 277498 - protein, 202 aa, Zea mays
  unsure (1)..(202): unsure at all Xaa locations
  Clone ID: MRT4577_184656C.1.pep
GYLEAGRGYHVSHDPAKDHTTEPTTGRKLNIIDIPAAKSSSKSSSSSADRKSRRVSTASIPKGRGLSPERIVAPKPQRPHETRQVINTQYDKTTLEELNRRFATQKIEESSDDSEYSSDEDSDVPSLTSRSTNSSSPSSISSGSSCCTCERYGITXRAGDRVKLDCGGARCGYSDDSSECSSEDEYVYEEKTXRRQGVVIRA

SEQ ID NO: 277499 - protein, 66 aa, Zea mays
  Clone ID: MRT4577_184657C.1.pep
KSLYKKKKKKKKKKKKKKKKKKKNGKKKIKNKKKRKVKKEKKIKKKNFFVGGGGALKRGGFLLNFI

SEQ ID NO: 277500 - protein, 26 aa, Zea mays
  Clone ID: MRT4577_184658C.1.pep
SRVRPCTCLIFGNIATQVYVPDSKLP

SEQ ID NO: 277501 - protein, 54 aa, Zea mays
  Clone ID: MRT4577_184659C.1.pep
STRIPPPAVFPVSVSVTKSWVYESPYERLVSGEQCSVRFARKVQVLAFIVTGVI

SEQ ID NO: 277502 - protein, 62 aa, Zea mays
  Clone ID: MRT4577_18465C.1.pep
TFTDSMLKTKIEMAIAHYISYLFNIKVQKSNRVNIRLRPFSYCWHAILLLMSWYRYRIQLCY

SEQ ID NO: 277503 - protein, 298 aa, Zea mays
  Clone ID: MRT4577_184660C.1.pep
AAYVRTFRFLNKACLLRATKDDAPCNGSDAAAAASERHGHDGTRLCTVDQVEQLKSAIRVLPIWSSTIFLALAMNQSFAVKQADAMDRRVGAGGFRVPSGSLAVFNMATMSLWSACYDRWVAPALQRYTGNPHGLTMKQRIGGGLLLATASTAVSAAVEGERRRLAQPGVPISALRLGPQFALVGLAEAFGVIGEIEFLYTELPKSMASFSMSLLYMAFGVGNLAGALIVKVVQVASGQGVGTGWLVDNLNVGRYDYYYWLLTGYGVANFVYFAWCCWLYGEEGKNVEWEEEDNTEQP

SEQ ID NO: 277504 - protein, 63 aa, Zea mays
  Clone ID: MRT4577_184661C.1.pep
PGSSIHVVFFLLFRKRAAGLDYTSHKQLGGPSQIQPAKAEYKYYFLHDVIRHAETRLQRALFF

SEQ ID NO: 277505 - protein, 183 aa, Zea mays
  Clone ID: MRT4577_184662C.1.pep
MRRASCVPGRGGDRRGGAGGGGLAGAAAILFERLRSCTCGVGSAPSSDAEMWSRFPCIEARGFIFGPAIALAIGAKFIPLRKPKKLPGEVFSESYVLEYGMDCLEMHVGAIEPGERVVVVDDLVATGGTLSAAIRLLERAGANVVECACLIGLPKFKDFYKLNGKPVYIPGGVPQIGRSKWSD

SEQ ID NO: 277506 - protein, 54 aa, Zea mays
  Clone ID: MRT4577_184663C.1.pep
LVLSVIIPSAVIFSFFFFTPMGYWLFPYFYSPLVDRQKPDAMQTQSPAIFRFKV

SEQ ID NO: 277507 - protein, 85 aa, Zea mays
  Clone ID: MRT4577_184664C.1.pep
FPFNQVAAVDPRGFFQQPILVPFSQLGSASRVSFLTQHQLVPFSQQFGGNPAPLFQIQQLLPFVPLGLANPTASFQQPIIGGALF

SEQ ID NO: 277508 - protein, 287 aa, Zea mays
  Clone ID: MRT4577_184665C.1.pep
LGTSRPAGYSFHYAMLSSGIKEEEIDNCCRMFANGDDLLLAVHPDFESILDKFQNHFGNLGLNFEFTSRTRDKSELWFMSTRGIKYEGIYIPKLEKERIVAILEWDRSNLPEHRLEAVCAAMVEAWGYSDLVHEIRKFYAWLLEMQPFANLAKEGLAPYIAETALRNLYLGTGIKEEEIEKYFKQFIKDLPGYIEDYNEDVFHQSGTVDAGAQGSSGSQGTAPPATGSGAKPATSGAGSGSGTGAGTGATGGQAGAGSGAGTGSGATGGQSESGSGTGQVGTGSAGT

SEQ ID NO: 277509 - protein, 77 aa, Zea mays
  Clone ID: MRT4577_184666C.1.pep
FRTVLPLGAWQWWGLGNAPAYFIQGKMFALGGQGKCREIFWIPFKSNVPDPELICFNFKPRSGWVLVPGLLKKKPTR

SEQ ID NO: 277510 - protein, 769 aa, Zea mays
  Clone ID: MRT4577_184667C.1.pep
IYIGEINYDIFDKAVQRVISILRRVGMQQCVYVTDEEEIFKSLNLNAAVGALYTGKKKDYFASFTNEDKEEIVMRSCERIYHGQLGVWNGSLKAEIRPIEKTMLNKTRTFTAAPLETLLGGKVCVDDFNNQFYSHHLEGPWTVGITKFYGGWNRLLEKLPEGWIYCDADGSQFDSSLTPYLINAVLNIRLQFMEDWDIGAQMLKNLYTEIVYTPIATPDGSIVKKFKGNNSGQPSTVVDNTLMVIIAFNYAMLSSGIREEEIDNCCRMFANGDDLLLAVHPNFEYILDEFQNHFGNLGLNFEFTSRTRDKSELWFMSTRGIKCEGIYIPKLEKERIVAILEWDRSNLPEHRLEAICAAMVEAWGYPDLVHEIRKFYAWLLEMQPFANLAREGMAPYIAETALRNLYLGVGIKEEEIEKYFKQFIKDLPGYIEDYNEEVTHQSGTVDAGAQGSSGAQGNTPPTTGGAAKPATSGAGSGSGAGTGSGATGGQSGTGSGSGTGSGATGGQSGSGSGTGRTDTGSAGTGATGGQRDKDVDAGTTGKITVPKLKAMSKKMRLPRARGKDVLHLDFLLTYKPQQQDISNTRATKEEFDRWYDAIKKEYEIDDTQMTVVMSGLMVWCIENGCSPNINGNWTMMDGDEQRVFPLKPVIENASPTFRQIMHHFSDAAEAYIEYRNSTERYMPRYGLQRNLTDYSLARYAFDFYEMTSRTPARAKEAHMQMKAAAVRGSNTRLFGLDGNVGETQENTERHTAGDVSRNMHSLLGVQQHH

SEQ ID NO: 277511 - protein, 512 aa, Zea mays
  unsure (1)..(512): unsure at all Xaa locations
  Clone ID: MRT4577_184668C.1.pep
GHEDNCCRMFANGDDLLLAVHPDFEFILDEFQNHFGNLGLNFEFTSRTRDKSELWFMSTRGIKYEGIYIPKLEKERIVAILEWDRSNLPEHRLEAXICAAMVEAWGYPDLVHEIRKFYAWLLEMQPFANLAKEGLAPYIAETALRNLYLGTGIKEEEIEKYFKQFIKDLPGYIEDYNEDVFHQSGTVDAGAQGGSGSQGTTPPATGSGAKPATSGAGSGSGTGTGTGVTGGQAGASSGAGTGSGATGGQSGSXVVLGRMARVQQEPSATGSQRDRDVDAGSTGKISVPKLKAMSKKMRLPKAKGKXDVLHLDFLLTYKPQQQDISNTRATKEEFDRWYDAIKKEYEIDDTQMTVVMSGLMVWCIENGCSPNINGNWTMMDGDEQRVFPLKPVIENASPTFRQIMHHFSDAAEAYIEYRNSTERYMPRYGLQRNLTDYSLARYAFDFYEMTSRTPARAKEAHMQMKAAAVRGSNTRLFGLDGNVGETQENTERHTAGDVSRNMHSLLGVQQHH

SEQ ID NO: 277512 - protein, 448 aa, Zea mays
  Clone ID: MRT4577_184669C.1.pep
KYEGIYIPKLEKERIGAILEWDRSNLPEHRLEAICAAMIEAWGYSDLIHEIRKFYAWLLEMQPFANLAKEGLAPYIAETALRNLYLGTGIKEEEIEKYFKQFIKDLPGYIEDYNEDVFHQSGTVDAGAQGGSGSQGTTPPATGSGAKPATSGAGSGSGTGAGTGVTGGQAGASSGAGTGSGATGGQSGSGSGTGQNGTGSAGTSATGSQRDRDVDAGSTGKISVPKLKAMSKKMRLPKAKGKDVLHLDFLLTYKPQQQDISNTRATKEEFDRWYDAIKKEYEIDDTQMTVVMSGLMVWCIENGCSPNINGNWTMMDGDEQRVFPLKPVIENASPTFRQIMHHFSDAAEAYIEYRNSTERYMPRYGLQRNLTDYSLARYAFDFYEMTSRTPARAKEAHMQMKAAAVRGSNTRLFGLDGNVGETQENTERHTAGDVSRNMHSLLGVQQHH

SEQ ID NO: 277513 - protein, 208 aa, Zea mays
  unsure (1)..(208): unsure at all Xaa locations
  Clone ID: MRT4577_18466C.1.pep
MAMDAERRQAELIEQFSAQAAALSSAPQLAALVLEATSHPALFAFSELLTLPALSKLTGTQYASSLDLLRLFAYGTLKDYKSNSSALPALLPDQARKLKQLSVLTLAESTKVLPYDQLMQELDVSNVRELEDFLINECMYSGIVRGKLDXLRXCFEVQFAAGRDLTHDQLTNMIETLSXWLGTSDNLLHQIQEKIKWADTTSESNKKH

SEQ ID NO: 277514 - protein, 311 aa, Zea mays
  unsure (1)..(311): unsure at all Xaa locations
  Clone ID: MRT4577_184670C.1.pep
MAAPPPTGCFKCGRPGHWSRDCPSSASTNPPAAADAPTNPSHLSGAASRFNAKPRPPAAAVDGEDGKGKKKKERATRPKLTPDLLLSDGGIGFVLRYFPKAFKPRARPGHEVDDLANLIKLYADWHSRLIPYYSFEQFVRKLEKLGAGNRVRRCVSELRDRVARGGDPTLLHEPPVHEDMPLPGGGEHGTEDPVLGTDAPLSDNHGTGPVVQEDADPPMESNDVVDPMEEDLLNEIYENTADIPAGEGASKESPEQSAPKEAXRWRRNPRTATSPSRXVELTEAQKARMEANRLKALERAAARARASQQPT

SEQ ID NO: 277515 - protein, 36 aa, Zea mays
  Clone ID: MRT4577_184671C.1.pep
RIHCMIRQSRIGMTKESYSLVKLKRIPFAGLKTIQD

SEQ ID NO: 277516 - protein, 1884 aa, Zea mays
  unsure (1)..(1884): unsure at all Xaa locations
  Clone ID: MRT4577_184672C.1.pep
MRLVMIMLMVMMARLRHTARKSVIPFLPSRLAERPLRRPVAGQSSHLERLHHRLHEEQERRRQGQQGSSFSLQQEIESVRSCSPVLPLEAPPAPPLGAPASGVAAGGDLDDGDDDDSLSHDTDFPADHEPEGWVARPITRDAARGCHFHDALDTLLRRALDRRTWSIEYRCVVYQHSRGVYPYRWEATCLVRRPENSLQGAEACSEHYSISERDSAEAAMQDAARRALSHYCLVFGGVADGLDLKYYPRRPSGSTGGVIVSPVGEGNPRLSSTVNLAVVLNTELDHALDELSRARAEIALLRAERAERRHLDDGSPAPVGTQHPYRSPRRGRQSYDNPDLLLKNSILFSYAARVARSVLMCGCVLQMSENRRRGGRRAQQERAAPQDEVPQQQHLPPPPPMSIEQMFLMQTQAVQAIGRTLAAIQQQQQQQQAPPQPQMPQMPRDKRAEFMRGHPPTFAHSSDPMDAEDWLRTVERELHTAQCDDREKVLYGPRLLRGAAQSWWESYLATHANPDAITWEEFKGSFRQYHVPAGLMTVKKEEFLALKQGSSSVSEYRDIFLQLSRYAPEDVNTDAKRQYRFLRGLVDPLHYQLMNHTFPTFQHLIDRAIMTERKRKEMEDRKRKISGPQPGSSSRPRFSGNQPQQSRQNQRPPQQHQQSQRQYPQHQYQNRQNNQSGGQFQRQNXGTSSSXPASQQNNQAAPAQVGNRACFHCGEQGHWVMQCPKKAAQQQSGPNAPAKQNVPQPGAGNRSQSRYNHGRLNHLEAEAVQETPGMIVGMFPVNSRIAEVLFDTGATHSFITASWVEAHNLPITTMSTPIQIDSAGGRIRTDSICLNISVEIRGIAFPANLIVMGTQGIDVILGMNWLDKYQAVISCDKRTIKLVSPLGEEVVTELVPPEPKKGSCYQMAVDSSEADPIESIKVVSEFPDVFQKDLPGMPPERKVEFAIELLPGTAPIFKRAYRIPGPELVELKKQIDELSEKGYIRPSTSPWAAPVLFVEKKDGTKRMCIDYRALNEVTIKNKYPLPRIEDLFDQLRGASVFSKIDLRSGYHQLRIRPSDIPKTTFITKYGLYEFTVMSFGLTNAPAFFMNLMNSVFMDYLDKFVVVFIDDILVYSQSEEKHADHLRMVLQRLREHQLYAKLSKCEFWISEVLFLGHIINKEGLAVDPKKVADILNWKAPTDARGIKSFIGMAGYYRRFIEGFSKIAKPMTALLGNKVEFKWTKKCQEAFEALKEKLTTAPVLVLPDVHKPFSVYCDACYTGLGCVLTQEGRVVAYSSRQLKVHEQNYPIHDLELAAVVHALKTWRHYLYGQKCDVYTDHKSLKYIFTQSELNMRQRRWLELIKDYELEIHYHPGKANVVADALSRKSQVNLMVARLMPYELAKEFDRLSLGFLNNSRGVTVELEPTLEREIKEAQKNDEKISEIRRLILDGRGKDFREDAEGVIWFKDRFCVPNVQSIRELILKEAHETAYSIHPGSEKMYQDLKKKFWWYGMKREIAEYVAMCDSCRRIKAEHQRSAGLLQPLQIPQWKWDEIGMDFIVGLPRTRAGYDSIWVVVDRLTKSAHFIPVKTNYSSVVLAELYMSRIVCLHGVPKKIVSDRGTQFTSHFWQQLHEALGTHLNFSSAYHPQTDGQTERTNQILEDMLRACALQDQSGWDKRLPYAEFSYNNSYQASLKMSPFQALYGRSCRTPLHWDQPGEKQVFGPDILLEAEENIKMVRENLKIAQSRQRSYADTRRRELSFEVRDFVYLKVSPIRGVRRFGVKGKLAPRYIGPYQILARRGEVAYQLSLPENLSAVHDFFHVSQLKKCLRVPEEQLLVEGLEVQEDLTYVEKPAQILEVADRVTQRKTIRMCKVKWKHHSEEEATWEREDDLMAKYPELFASQP

SEQ ID NO: 277517 - protein, 1469 aa, Zea mays
  unsure (1)..(1469): unsure at all Xaa locations
  Clone ID: MRT4577_184673C.1.pep
MSENRRRGGRRAQQEQAGQQDEAPQQQHXAAPAPDVHXEQMFLMQTQAVQAIDWLRTVERELHTAQCDDREKVLYGPRLLRGAAQSWWESYLATHANPDTITWEEFRGSFRQYHVPAGLMTVKKEEFLALKQGPLSVSEYRDKFLQLSRYAPEDVNTDAKRQYRFLRGLVDPLQYQLMNHTFPTFQHLIDRAIMTERKRKEMEDRKRKISGPQPGSSSRPRFSGNQPQQFRQNQRPPQQHQQFQRQYPQNQYQNRQSNQSGGQFQKQNQQAPRLPAPANQQNSQAAPAQVGNMACFHCGEQGHWVMQCPKKAAQQQSGPNAPTKQNVPQPGAGNRSQPRYNHGRLNHLEAEAVQETPDMIVGMFPVDSHIAEVLFDTGATHSFITASWVEAHNLPITTMSTPIQIDSAGGRIRADSICLNVSVEIRGIAFPANLIVMGTQGIDVILGMNWLDKYQAVISCDKRTIKLVSPLGEEVVTELVPPEPKKGSCYQMAVDSSEADPIESIKVVSEFPDVFPKDLPGMPPERKVEFAIELLPGTAPISKRAYRISGPELVELKKQIDELSEKGYIRPSTSPWAAPVLFVEKKDGTKRMCIDYRALNEVTIKNKYPLPRIEDLFDQLRGASVFSKIDLRSGYHQLRIRPSDIPKTAFITKYGLYEFTVMSFGLTNAPAFFMNLMNSVFMDYLDKFVVVFIDDILIYSQSEEEHADHLKMVLQRLREHQLYAKLSKCEFWISEVLFLGHIINKEGLAVDPKKVADILNWKAPTDARGIKSFIGMAGYYRRFIEGFSKIAKPMTALLGNKVEFKWTQKCQEAFEALKEKLTTAPVLVLPDVHKPFSVYCDACYTGLGCVLMQEGRVVAYSSRQLKVHEKNYPIHDLELAAVVHALKTWRHYLYGQKCDVYTDHKSLKYIFTQSELNMRQRRWLELIKDYELEIHYHPGKANVVADALSRKSQVNLMVARPMPYELAKEFDRLSLGFLNNSRGVTVELEPTLEREIKEAQKNDEKISEIRRLILDGRGKDFREDAEGVIWFKDRLCVPNVQSIRELILKEAHETAYSIHPGSEKMYQDLKKKFWWYGMKREIAEHVAMCDSCRRIKAEHQRPAGLLQPLQIPQWKWDEIGMDFIVGLPRTRAGYDSIWVVVDRLTKSAHFIPVKTNYNSAVLAELYMSRIVSLHGVPKKIVSDRGTQFTSHFWQQLHEALGTHLNFSSAYHPQTDGQTERTNQILEDMLRACALQDQSGWDKRLPYAEFSYNNSYQASLKMSPFQALYGRSCRTPLQWDQPGEKQVFGPDILLEAEENIKMVRENLKIAQSRQRSYADTRRRELSFEVGDFVYLKVSPIRGVRRFGVKGKLAPRYIGPYQILSKRGEVAYQLSLPENLSAVHDVFHVSQLKKCLRVPEEQLPVEGLEVQEDLTYIEKPAQILEVADRVTRRKTVRMCKVRWSHHSEEEATWEREDDLMAKYPELFASQP

SEQ ID NO: 277518 - protein, 1399 aa, Zea mays
  Clone ID: MRT4577_184674C.1.pep
MSIEQMFLMQTQAVQAIGQTLAGIQQQQQQQQAPPQPQMPQMLRDKRGLMTVKKEEFLALKQGSSSVNEYRDRFLQLSRYAPEDVNTDAKRQYRFLRGLVDPLQYQLMNHTFPTFQHLIDRVIMTERKRKEMEDRKRKISGPQPRSNSRPRFSGNQPQQFRQNQRPPQQHQQFQRQYPQHQYQNRQSNQSGGQFQRQNQQAPHLPAPANQQNNQAAPAQVGNRACFHCGEQGHWVMQCPKKAAQQQSGPNAPAKQNVPQPGAGNRSQPRYNHGRLNHLEAEAAQETPGMIVGMFPVDSHIAEVLFDTGAMHSFITALWVEAHNLPITTMSTPIQIDSAGGRIRADSICLNVSVEIRGIAFPANLIIMGTQGIDVILGMNWLDKYQAVISCDKRTIKLVSPLGEEVVTELVPPEPKKGSCYQMAVDSSEADPIERIKVVSEFPDVFPKDLPGMPPERKVEFAIELLPGTAPIFKRAYRISGPELVELKKQIDELSEKGYIRPSTSPWAAPVLFVEKKDGTKRMCIDYRALNEVTIKNKYPLPRIEDLFDQLRGASVFSKIDLRSGYHQLRIRPSDIPKTAFITKYGLYEFTVMSFGLTNAPAFFMNLMNSVFMDYLDKFVVVFIDDILIYSQSEEEHADHLRMVLQRLREHQLYAKLSKCEFWINEVLFLGHIINKEGLAVDPKKVADILNWKAPTDARGIKSFIGMAGYYRRFIEGFSKIAKPMTALLGNKVEFKWTQKCQQAFEALKEKLTTAPVLVLPDVHKPFSVYCDACYTGLGCVLMQEGRVVAYSSRQLKVHEKNYPIHDLELTAVVHALKTWRHYLYGQKCDVYTDHKSLKYIFTQSELNMRQRRWLELIKDYELEIHYHPGKANIVADALSRDSQVNLMVARPMPYELAKEFDRLSLEFLNNSRGVTVELEPTLEQEIKEAQKNDEKISEIRRLILDGRGKDFREDAEGVIWFKDRLCVPNVQSIRELILKEAHETAYSIHPGSEKMYQDLKNKIWWYGMKREIAEHVAMCDSCRRIKAEHQRPAGLLQPLQIPQWKWDEIGMDFIVGLPRTRAGYDSIWVVVDRLTKSAHFIPVKTNYSSAVLAELYMSRIVCLHGVPKKIVSDRGTQFTSHFWQQLHEALGTHLNFSSAYHPQTDGQTERTNQILEYMLRACALQDQSGWDKRLPYAEFSYNNSYQASLKMSPFQALYGRSCRTLLQWDQPGEKQVFGPDILLEAEENIKMVRENMKIAQSRQRSYADTRRRELSFEVGDFVYLKVSPIRGVRRFGVKGKLAPRYIGPYQIISRRGEVAYQLSMPENLSAVHDVFHVSQLKKCLRVPEEQLPVEGLEVQEDLTYVEKPVQILEVADRVTRRKTIRMCKVKWNHHSEEEATWEREDDLMAKYPELFASQP

SEQ ID NO: 277519 - protein, 1521 aa, Zea mays
  Clone ID: MRT4577_184675C.1.pep
MLICSVLLKNSILFPYAARFARSVLMCGCILQMSENRRRGGRRAQQERAAQQDEVPQQQHLPPPPPISIEQMFLMQTQAVQAIGQTLAAIQQQQQQQQAPPQPQMPQMPRDKRAEFMRGHPPTFAHSSDPMDAEDWLRTVERELHTAQCDDREKVLYGPRLLRGAAQSWWESYLATHANPDTITWEEFRGSFRQYHVPAGLMTVKKEEFLALKQGPLSVSEYRDKFLQLSRYAPEDVNTDAKRQYRFLRGLVDPLQYQLMNHTFPTFQHLIDRAIMTERKRKEMEDRKRKISGPQPGSSNRPRFSGNQPQQFRQNQRPPQQHQQFQRQYPQHQYQNRQSNQSGGQFQRQNQQAPRLPAPANQQNSQAAPAQVGNRACFHCGEQGHWVMQCPKKAAQQQSGPNAPAKQNVPQPGAGNRPQQRYNHGRLNHLEAEAVQETPGMIVGMFPVDSRIAEVLFDTGATHSFITASWVEAHNLPITTMSTPIQIDSAGGRIRADSICLNISVEIRGIAFPANLIVMGTQGIDVILGMNWLDKYQAVISCDKRTIKLVSPLGKEVVTELVPPEPKKGSCYQMAVDSSEADPIESIKVVSEFPDVFPKDLPGMPPERKVEFAIELLPGTAPIFKRAYRISGPELVELKKQIDELSEKGYIRPSTSPWAAPVLFVEKKDGTKRMCIDYRALNEVTIKNKYHLPRIEDLFDQLRGAIDLRSGYHQLRIRPSDIPKTAFITKYGLYEFTVMSFGLTNAPAFFMNLMNSVFMDYLDKFVVVFIDDILVYSQSEEEHADHLRMVLQRLREHQLYAKLSKCEFWISEVLFLGHIINKEGLAVDPKKVADILNWKAPTDARGIKSFIGMAGYYRRFIEGFSKIAKPMTALLGNKVEFKWTQKCQEAFEALKEKLTTTPVLVLPDVHKPFSVYCDACYTGLGCVLMQEGRVVAYSSRQLKVHEKNYPIHDLELAAVVHALKTWRHYLYGQKCDVYTDHKSLKYIFTQSELNMRQRRWLELIKDYELEIHYHPGKANVVADALSRKSQVNLMVARPMPYELAKEFDRLSLGFLNNSRGVTVELEPTLEREIKEAQKNDEKISEIRRLILEGKGKDFREDAEGVIWFKDRLCVPNVQSIRELILKEAHETAYSIHPGSEKMYQDLKKKFWWYGMKREIAEHIPQWKWDEIGMDFIVGLPRTRAGYDSIWVVVDRLTKSAHFIPVKTSYNSAVLAELYMSQIVCLHGVPKKIVSDRGTQFTSHFWQQLHEALGTHLNFSSAYHPQTDGQTERTNQILEDMLRACVLQDQSGWDKRLPYAEFSYNNSYQASLKMSPFQALYGRSCRTPLQWDQPGEKQVFGPDILLEAEENIKMVRENLKIAQSRQRSYADTRRRELSFEVGDFVYLKVSPIRGVRRFGVKGKLAPRYIGPYQILARRGEVAYQLSLPEKLSAVHDVFHVSQLKKCLRVPEEQLPVEGLEVQEDLTYVEKPAQILEIADRVTRRKTIRMCKVRWNHHSEEEATWEREDDLMAKYPELFASQP

SEQ ID NO: 277520 - protein, 64 aa, Zea mays
  Clone ID: MRT4577_184676C.1.pep
KKGARTPPPQERKFKGNICCYLYSTHETYGNSWSVNIPSCCLLQTLEEGRCKYPHNRYKVKMVL

SEQ ID NO: 277521 - protein, 1434 aa, Zea mays
  Clone ID: MRT4577_184677C.1.pep
MSIEQMFLMQTQAVQAIGQTLAAIQQQQQQQQQAPPQPQMPQMPRDKRAEFMRGHPPTFAHSSDPMDAEDWLRTVERELHTAQCDDREKVLYGPRLLRGAAQSWWESYLATHAHPDAITWEEFRGSFRQYHVPAGLMTVKKEEFLALKQGSLSVSEYRDRFLQLSRYAPEDVNTDAKRQYRFLRGLVDPLQYQLMNHTFPTFQHLIDRAIMTERKRKEMEDRKRKISGPQPGSSNRPRFSGNQPQQFRQNQRPPQQHQQFQRQYPQHQYQNRQSNQSGGQFQRQNQQAPRLPAPASQQNSQAAPAQVGNRACFHCGEQGHWVMQCPKKAAQQQSGPNAPAKQNVPQPGAGNRSQSRYNHGRLNHLEAEGVQETPGMIVGMFPVDSHIAEVLFDTRATHSFITASWVEAHNLPITTMSTPIQIDSAGGRIRADSICLNISVEIRGIAFSANLIVMGTQGIDVILGMNWLDKYQAVISCDKRTIKLVSPLGEEVVTELVPPEPKKGSCYQIAVDSSEADPIERIKVVSEFPDVFPKDLPGMPPERKVEFAIELLPGTAPIFKRAYRISGPELVELKKQIDELSEKGYIRPSTSPWAAPVLFVEKKDGTKRMCIDYRALNEVTIKNKYPLPRIEDLFDQLRGASVFSKIDLRSGYHQLRIRPSDIPKTAFISKYGLYEFTVMSFGLTNVPAFFMNLMNSVFMDYLDKFVVVFIDDILVYYQSEEEHADHLRMVLQRLREHQLYAKLSKCEFWISEVLFLGHIINKEGLAVDPKKVADILNWKAPTDARGIKSFIGMAGYYRRFIEGFSRIAKPMTALLGNQVEFKWTQKCQEAFEALKEKLTTTPVLVLPDVHKPFSVYYDACYTELAAVVHALKTWRHYLYGQKCDVYTDHKSLKYIFTQSELNMRQRRWLELIKDYELEIHYHPGKANVVADALSRKSQVNLMVTRPMPYELAKEFDRLSLGFLNNSRGVTVELEPTLEREIKEAQKNDEKISEIRRLILDGRGKDFREDAEGVIWFKDRLCVPNVQSIRELILKEAHETAYSIHPGSEKMYQDLKKKFWWYGMKREIAEHVAMCDSCRRIKAEHQRPAGLLQPLQIPQWKWDEIVVDRLTKSAHFIPVKTNYSSAVLAKLYMSRIVCLHGVPKKIVSDRGTQFTSHFWQQLHEALGTHLNFSSAYHPQTDGQTERTNQILEDMLRACALQDQSGWDKRLPYVEFSYNNSYQASLKMSPFQALYGRSCRTPLQWDQPKEKQVFGPEILLEAEENIKMVRENLKIAQSRQRSYADTRRRELSFEVGDFVYLKVSPIRGVRRFGVKGKLAPRYIGPYQILARRGEVAYQLSLPENLSVVHDVFHVSQLKKCLRVPEEQLLVEGLEVQEDLTYVEKPVQILEVADRVTRRKTIRMCKVRWNHHSEEEATWEREDDLMAKYPELFASQP

SEQ ID NO: 277522 - protein, 603 aa, Zea mays
  Clone ID: MRT4577_184678C.1.pep
MCVDYRALNEVTIKNKYPLPRIEDLFDQLRGASVFSKLDLRSGLGCVLMQEGRVVAYSSRQLKVHEKNYPIHDLELAAVVHALKTWRHYLYGQKCDVFTDHKSLKYIFTQSELNMRQRRWLELIKDYELEIHYHPGKANVVADALSRKSQVNLMFDRLSLGFLNNSRGVTVELEPTLEREIKEAQKNDEKISEIRRLILDGRGKDFWEDAEGVIWFKDRLCVPNVQSIRELILKEAHETAYSIHPGSEKMYQDLKKKFWWYGMKREIAEHVAMCDSCRRINAEHQRPAGLLQPLQIPQWKWDEIGMDFIVGLPRTRAGYDSIWVVVDRLTKSAHFIPVKTNYSSAVLAELYMSRIVCLHGVPKKIVSDRGTQFTSHFWQQLHEALGTHLNFSSAYHPQTDEFSYNNSYQTSLKMSPFQALYGRSCRTPLQWDQLGEKQVFGPDILLEAEENIKMVRENLKIAQSRQRSYVDTRRRELSFKVGDFVYLKVSPIRGVRRFGVKGKLAPRYIGPYQILSRRGEVAYQLSLPENLSVVHDVFHVSQLKKCLRVPEEQLPVEGLEVQEDLTYVEKPTQILETTDRVTRRKTIRMCKVRWNHHSEEEAT

SEQ ID NO: 277523 - protein, 401 aa, Zea mays
  unsure (1)..(401): unsure at all Xaa locations
  Clone ID: MRT4577_184679C.1.pep
MAKPGILGRSSAQRSNEGMRIIFSAVIGVMLGYLFGISFPTVNITKLHFPSSIISYIEDRNSGITTQTLLNHAWTSAATHKKNNSASNSDEIPKIYVPTNPKGAERLPPGIVVSETDLYLRRLWGEPSEDLTTKPRYLVTFTVGYSQKANIDXAVKKFSDNFTIMLFHYDGRTTEWDEFEWSKRAVHVSVTKQTKWWYAKRFLHPDIVARYDYIFIWDEDLGVEHFNAEAYIKLVRKHGLEISQPGLEPDKGLTWQMTKRRGDQEVHKVTEERPGWCSDPHLPPCAAFVEIMATVFSRDAWRCVWHMIQNDLVHGWGLDFALRKCVEPAHEKIGVVDSQWIVHQVIPSLGNQGKAENGKAPWEGVRARCRKEWGMFQTRLTDAEKAYYLEHGITPPKSTVA

SEQ ID NO: 277524 - protein, 87 aa, Zea mays
  unsure (1)..(87): unsure at all Xaa locations
  Clone ID: MRT4577_18467C.1.pep
PTPPPPTPPPPPPPPPHPHPPPPRPPLRPSPLSPPPYLCQPPPTHPTTAPPTSCLFPXSARPPXKSPPRPRIIGGGVGPRLAQWVRT

SEQ ID NO: 277525 - protein, 151 aa, Zea mays
  Clone ID: MRT4577_184680C.1.pep
MSIEQMFLMQTQAVQAISQTLAAIQQQQQQQQDLPQPQMPQMPKDKRAEFMRGHPPTFAHSSDPMDAEDWLRTMERELHTAQCDDREKVMYGPRLLRGAAQSWWESYLATHANPDTITWEEFRGLMTVKKEEFLALKQGSSSVSEYQDSTN

SEQ ID NO: 277526 - protein, 1358 aa, Zea mays
  Clone ID: MRT4577_184681C.1.pep
MSIEQMFLMQTQAVQAIGQTLAAIQQQQQQQQQAPPQPQMPQMPRDKRAEFMRGHPPTFAHSSDPMDAEDWLRTVERELHTAQCDDREKVLYGPRLLRGAAQSWWESYLATHAHPDAITWEKFRGSFRQYHVPAGLMTVKKEEFLALKQGPLSVSEYRDKFLQLSRYAPEDVNTDAKRQYRFLRGLVDPLQYQLMNHTFPTFQHLIDRAIMTERKRKEMEDPNQQSSQAAPAQVGNRACFHCGEQGHWVMQCPKKAAQQQSGPNAPAKQNVPQPGAGNRSQPRYNHGRLNHLEAEAVQETPGMIVGMFPVDSHIAEVLFDTGATHSFITASWVEAHNLLITTMSTPIQIDSAGGRIRADSICLNISVEIRGIAFPANLIVMGTQGIDVILGMNWLDKYQAVISCDKRTIKLVSPLGGEVVTELVPPEPKKGSCYQIAVDSSEADPIESIKVVSEFPDVFPKDLPGMPPERKVEFAIELLPGTAPIFKRAYRISGPELDELKKQIDELSEKGYIRPSTSPWAAPVLFVEKKDGTKRMCIDYRALNEVTIKNKYPLPRIEDLFDQLRGASVFSKIDLRSGYHQLRIRPSDIPKTAFISKYGLYEFTVMSFGLTNAPAFFMNLMNSVFMDYLDKFVVVFIDDILVYSQSEEEHANHLRMVLQRLREHQLYAKLSKCEFWISEVLFLGHIINKEGLAVDPKKVADVLNWKAPTDARGIKSFIRMAGYYRRFIEGFSKIAKPMTALLGNKVEFKWTQKCQEAFEALKEKLTTAPVLVLPDVHKPFSVYCDACYTGLGCVLMQEGRVVAYSSRQLKVHEKNYPIHDLELSAVVHALKSWRHYLYGQKCDVYTDHKSLKYIFTQSELNMRQRRWLELIKDYELEIHYHPGKANVVADALSRKSQVNLMVARPMPYELAKEFDRLSLGFLNNSRGVTVELEPTLEREIKEAQKNDEKISEIRRLILEDKGKDFRKDAEGVIWFRDRLCVPNVQSIRELILKEAHETAYSIHPSSEKMYQDLKKKFWWYGMKREIAEHVAMCDSCRRIKAEHQRPAGLLQPLQIPQWKWDEIGMDFIVGLPRTRAGYDSIWVVVDRLTKSAHFIPVKTNYSSAVLAELYMSRIVCLHGVPKKIVSDRGTQFTSHFWQQLHEALGTHLNFSSAYHPQTDGQTERTNQILEDMLRACALQDQSGWDKRLPYAEFSYNNSYQASLKMSPFQALYGRSCRTPLQWDQPGESKGVRRFGVKGKLAPRYIGPYQVLARRGEVAYQLSLPENLSVVHDVFHVSQLKKCLRVPEEQLPVEGLEVQEDLTYVEKPVQILEIADRVTRRKTIRMCKVRWNHHSEEEATWEREDDLMAKYPELFASQP

SEQ ID NO: 277527 - protein, 573 aa, Zea mays
  Clone ID: MRT4577_184682C.1.pep
MSIEQMFLMQTQAVQAIGQTLAAIQQQQQQQQQQAPPQPQMPQMPRDKCAEFMRGHPPTFAHSSDPMDAEDWLHTVERELHTAPCDDREKVLYGPRLLRGAAQSWWESYLATHANPDAITWEEFRGSFRQYHVPAGLMTVKKEEFLALKQGSMSVSEYRDRFLQLSRYAPEDVNIDAKRQYRFLKGLVDPLHYQMMNHTFPTFQHLIDRAIMTKRKRKEMEDRKRKISGPQPGSSNRPRFSGNQPQQFRQNQRPPQQHQQFQRQYPHHQYQNRQNNQSGGANQQNNQAAPAQVGNRACFHCGEQGHWVMQCPKKATQQQLGPNAPAKQNVSQPGAGNRSQPRYNHGRLNHLEAEAVQETPDMIVAFPANLIVMGTQGIDVILGMNWLDKYQAVISCDTRTIKLVSPLGEEVVTELVPPEPKKASCYQMVVDSREADPIERIKIVSEFPDVFPKDLPGMPPERKVEFAIELLSGTAPIFKRAYRISGPELVELKKQIDELSEKGYIQPSTSPWAAPVLLKGKCALGPFLSILVIECQLKCLKCEFMQWMNKVQIKIKGMFLSLSTLVLCTNILV

SEQ ID NO: 277528 - protein, 44 aa, Zea mays
  unsure (1)..(44): unsure at all Xaa locations
  Clone ID: MRT4577_184683C.1.pep
CNPKSVGTCPNTTSXVFWGAVHPSEGANQVMGASLITEALPLDR

SEQ ID NO: 277529 - protein, 561 aa, Zea mays
  Clone ID: MRT4577_184684C.1.pep
MAVDSPPPASPQRRQSEAGAGGRRTDRHGRRLEVYNEVLVRLRSSAAVSPAFEDALWAHFHRLPARYALDVNAERADDVVTHQRLLQEARDPERRPALSVRVVQVSRIIDTDVGDPYDPDMEAVASNRPEANETVHPPPAFGSSSNLEALALETSESDVRSTGDTDHSVHLISRPMHEITFATIDKPKLLSQLTCLLAELGLDIQEAHAFSTIDGYSLDVFVVTGWHLGSTEQLQGDLLQKFHKIETQAWPLSSSLSPSSEGQQGGESMSSASVEIPTDGVDVWELDLKLLKFGSKVASGSNGDLYRGTYCNQDVAIKVVRPERISADMYRDFAQEVYIMRKVRHKNVVQFIGACTRQPTLYIVTDFMPGGSVYDYLHKNNNAFKLPEILKVATDITKGMNYLHQNNIIHRDLKTANLLMDENKVVKVADFGVARVKDQSGVMTAETGTYRWMAPEVIEHKPYDHKADVFSFAIVLWELLTGKIPYEYLTPLQAAIGVVQKGIRPTIPKDTHPKLIELLQKCWHRDPAERPDFSEILEILQKLSKEASPAFPVLAASLPHV

SEQ ID NO: 277530 - protein, 1442 aa, Zea mays
  Clone ID: MRT4577_184685C.1.pep
MSIEQMFLMQTQAVQAIGQTLAAIQQQQQQQQQAPPQPQMPQMPRDKRAEFMRGHPPTFAHSSDPMDAEDWLRTVEWELHTAQCDDREKILYGPRLLRGAAQSWWESYLATHAHPDAITWEEFRGSFRQYHVPVGLMTVKKEEFLALKQGSLSVSEYRDKFLQLSRYAPEDVNTDAKRQYRFLRGLVDPLQYQLMNHTFPTFQHLIDRAIMTERKRKEMEDRKRKISGPQPGSSNRPRFSGNQPQQFRQNQRPPQQHQQFQRQYPQHQYQNRQSNQSGGQFQRQNQQAPRLPAPANQQNSQAAPAQVGNRACFHCGEQGHWVMQCPKKAAQQQSGPNAPAKQNVSQPGSGNRSQPRYNHGRLNHLEAEAVQETPSMIVGMFPVDSHIAEVLFDTGATHSFITASWVEAHNLPITTMSTPIQIDSAGGRIRADSICLNISVKIRGIAFPANLIVMGTQGIDVILGMNWLDKYQAIISCDKRTIKLVSPLGEEVVTELVPPEPKKGSCYQLAVDSSEADPIESIKVVSEFPDVFPKDLPGMPPERKVEFAIELLPGTAPIFKRAYRISGPELVELKEQIDELLEKGYIRPSTSPWAAPVLFVEKKDGTKRMCIDYRALNEATIKNKYPLPRIEDLFDQLRGASVFSKIDLRSGYHQLRIRPSDIPKTAFISKYGLYEFTVMSFGLTNAPAFFMNLMNSVFMDYLDKFVVVFIDDILIYSQSEEEHADHLRMVLQRLREHQLYAKLSKCEFWINEVLFLGHIINKEGLAVDPKKVADILNWKAPTDARGIKSFIGMAGYYRRFIEGFSKIAKPMTALLGNKVEFKWTQKCQEAFEALKEKLTTAPVLVLPDVHKPFSVYCDACYTGLGCVLMQEGRVVAYSSRQLKVHERNYPIHDLELAAVVHALKSWRHYLYGQKCDVYTDHKSLKYIFTQSELNMRQRRWLELIKDYELEIHYHPGKANVVADALSRKSQVNLMVARPMPYELAKEFDRLSLEFLNNSRGVTVELEPTLEREIKEAQKNDEKISEIRRLILEGKGKDFRKDAEGVIWFRDRLCVPNVQSIRELILKEAHETAYSIHPGSEKMYQDLKKKFWWYGMKREIAEHVAMCDSCRRIKAEHQRPVGLLQPLQIPQWKWDEIELYMSRIVCLHGVPKKIVSDRGTQFTSHFWQQLHEALGTHLNFSSAYHPQTDGQTERTNQILEDMLRACALQDQSGWDKRLPYAEFSYNNSYQASLKMSPFQALYGRSCRTPLQWDQPGEKQVFGPDILLEAEENIKMIRENLKIAQSRQRSYADTRRRELSFEVGDFVYLKVSPIRGVRRFGVKGKLAPRYIGPYQVLARRGEVAYQLSLPENLSAVHDVFHVSQLKKCLRVPEEQLPVEGLEVQEDLTYVEKPVQILEVADRVTRRKTIRMCKVRWDHHSEEEATWEREDDLMAKYPELFASQP

SEQ ID NO: 277531 - protein, 125 aa, Zea mays
  Clone ID: MRT4577_184686C.1.pep
SMLWNQVAQSGASHSPLPLGSLSRHVRTSGCWSVHGASSLVARRAPFFGARRVGVLASTCFHTRLLAMAICHRPAVPCALVPTRRRGPCLILAIVDPARTCSPNTLLSLLRAKYSTTSRCVNSKP

SEQ ID NO: 277532 - protein, 81 aa, Zea mays
  Clone ID: MRT4577_184687C.1.pep
MSAYDEVEIEDMEWNAELKAYTYPCPCGDLFQITLDDLRLGEEIARCPSCSLFLTVVYNAEDFADSKEPTHKPSPTPVAVA

SEQ ID NO: 277533 - protein, 129 aa, Zea mays
  Clone ID: MRT4577_184688C.1.pep
AIRGSPRFSVLSRSFRQYSAASAKRALIIVSLAAIPESVRPYGRLPVHWVVAVVDVQCSAGVEWGASPGLWVVRSGLGVPSTSPGVLVLNVVSWGFPVSVRNGIWRVAMLLSVGMSIMHVVTRFGRHLV

SEQ ID NO: 277534 - protein, 81 aa, Zea mays
  Clone ID: MRT4577_184689C.1.pep
MSAYDEVEIEDMEWNAELKAYTYPCPCGDLFQITLDDLRLGEEIARCPSCSLFLTVVYNAEDFADSKEPTHKPSPSPVAVA

SEQ ID NO: 277535 - protein, 147 aa, Zea mays
  Clone ID: MRT4577_18468C.1.pep
MKAITLLFLVGFIGEFQVFSSACSPINCQWGSYAPWSECNGCTKTQTRRRSIAVYGQYGGHSCVGSAFETQPCQPTRGCPTEDGCGERFRCFSSQCISKSLVCNGDSDCEEDGADEDRCEDAKSRPACDKDKPPPNIELTGRGYNAL

SEQ ID NO: 277536 - protein, 52 aa, Zea mays
  Clone ID: MRT4577_184690C.1.pep
KLEVEPTDADSRVDTQVVQVDRSIVETPPDAPVDTQCKSSSKTLAKKARDTY

SEQ ID NO: 277537 - protein, 64 aa, Zea mays
  Clone ID: MRT4577_184691C.1.pep
NNPMVLGYVRQFVQLKKIQARQPPVAKQGWLEGFLYFWCEINGSSDIIGHDLRRSQLPWLVTVV

SEQ ID NO: 277538 - protein, 944 aa, Zea mays
  unsure (1)..(944): unsure at all Xaa locations
  Clone ID: MRT4577_184692C.1.pep
MDVPTPPNRAGCNSNIGSPMQSFDDPFGVAAMTSFDGYSELCSPSVADHIFSLLNDPSAAQQMVAMWSSLGSSPRASAVREDMSFDTFPGPVDGTSSLAQRFNSAAASSPTGVDRGLKESDGLVLPSNGSQQGSSIIPRSVGNALADRMLMALSLFRKSLSDGVLAQVWMPVEHNGRVVLSTSEQPYLLDQDLAGYREVSRNFLFSVKEEPGLHLGLPGRVFIFGXRGTSSVTYYSKPEYLRMEHALLHEIRGSLAMPVYDPSKGSCCAVLELVTNKEKPDFDAEMDIVCDALQGVNLQTTTDRSNQKVYSENQKYASTEILDVLRAICHAHMLPLALTWIPTSNGTANGFCVAKNIRLDSQPGKSVLRIHESACYVNDAKMQGFLHACAERHLEKGQGIAGRALKSNLPFFSPDIREYSIEDYPLAHHARKFGLHAAVAIRLRSTYTSYDDYILEFFLPVNCKGCGEQQMLLNNLSSTMQRICKSLRTVSEAEIENVSATAAMYEKTSGTCLPTGNSESSSHDDQPITESALQDLSLGDKQGDREPDKPQRSSMRVADKKRSASEKNFSLDVLRKYFSGSLRDAAMSLGVCPTTLKRICRQHGISRWPSRKINKVNRSLKKIEKVIKSVHGVDRSLQYDPATGSLVPATSLPEKMPFSACDTLPTSSLGRAVEETCSPKSEQDFSSPDGWQRETSQFHVSGIPKRGGDEVRTLANNNKGRRNYVSGIANITQHSNSEGTHGPSYPNPIGAVNSLHTGETGNIDSLTSLHPSMDGIEGQTTVRNSPFVQQADVTMVDGHDTKEQTLPSTSGMTDSSSGSASSEPTFKGNPGRALKDRSSPALTVKATYNGDTVRFKFVPARGWYHLLEEIAKRFKLTAGAFQLKYKDDEDEWVILANDADLQECMDVLDSISSRNMKLQVRDLSCHVGSSGSSSSCLQVEAHSS

SEQ ID NO: 277539 - protein, 96 aa, Zea mays
  unsure (1)..(96): unsure at all Xaa locations
  Clone ID: MRT4577_184693C.1.pep
MVMASSSGLRSCSAVGESSLLAPSYRFGRLVPIXANATTFGXRVPSSAVWXPVKASHVQLHXTISGSLAFYPLGLVIVLENFERFKEFQVYXHCRW

SEQ ID NO: 277540 - protein, 63 aa, Zea mays
  Clone ID: MRT4577_184694C.1.pep
YIFLKPPLKGLTDLLALYKGCNGLGGGPQPGSSNFFGGQASLNQQGGRFKQELCFFVGPIGLG

SEQ ID NO: 277541 - protein, 56 aa, Zea mays
  Clone ID: MRT4577_184695C.1.pep
ERNIKALITDHSCKRGLGRIITHMKGELKPLPIALKQKDPVWRTTDYGLLSIGFLH

SEQ ID NO: 277542 - protein, 643 aa, Zea mays
  Clone ID: MRT4577_184696C.1.pep
MAPGIRFSKRVRAGAQPEEQSSKRLHSTETDGHNVQEPTDGNDHIPNSPTTPGLADHFSRAAEEAMASAAHDSTGDAEGNSRTTPGLADHFSRAEEEDMASAAHDSTAPTQRAPRRPRAATKGKQLDRMTKVMQRRLPIAVEEGKKRPHEPVQAAKFASEAGIIIRETMPILTRWKDYKDDQKYYNSFVSQLNGRLSVNTEDKATKEACTDMLRSAVKNQRYRLKQKYFNGVPANEISTTSPVSYMTDEQWRALVAKWSDPKNMEISEKNKQNRSQVKFHQATGSHCYVAHLHAYKQKRNREEPSLDQTEELDAVDAFKTCHTSSKRGLSEPAREALSHMEALRAEPVAEGEMPASSVHLVSKVLSQSSSHQFMKSVGIKTSATSKASSSSHSELREQLAAEATAAVQGELDQLRKKCEEAEEQQARTQRELEEYKKITEKNSKEMEETNVLIKKLLSLHGKVVAKYVGDKHKGSKTCVWVPKVYASGGSSWIIDSGCTNHMIGEKRMFSSYEKNEYPQRAITFGDGNQGVTVFRRSDDSVAFKGVLEGQLYLVDFNKAELDTCLIAKTNMGWLWHRRLAHVGIKNLHKLLKGEHILGLTNVHFEKDTVCSACQVGKQVGTHHPHKNIMTTDRPLELLHMDLL

SEQ ID NO: 277543 - protein, 56 aa, Zea mays
  Clone ID: MRT4577_184697C.1.pep
WVFILKSWGEEAVLAVVSGCKEAGRRSAHHKNVFSEQVVAPLIPSHSSSAGASGRR

SEQ ID NO: 277544 - protein, 420 aa, Zea mays
  Clone ID: MRT4577_184698C.1.pep
MAPGIRFSKRVRAGAQPEEQSSKRLHSTETDGHNVQEPTDGNDRIPNNPTAPGLADHFSRAAEEAMASAAHDSTGDAEGNSRTTPGLADHFSRAEEEDMASAAHDSTAAKFASEVGIIIRETMPILTRWKDYKDDQKYYNSFVSQLNGRLSVNTEDKATKEACTDMLRSAVKNQRYRLKQKYFNGVPANEISTTSPVSYMTDKQWRALVAKWSDPKNMEISEKNKQNRSQVKFHQATGSRCYVAHLHAYKQKRNREEPSLDQTEELDAVDAFKTCHTSSKRGLSEPAREALSHMEALRAEPVAEGEMPASSVHLVSKVLSQSSSHQFLKSVGIKTSATSKASSSNHSELREQLAAEATAAVQGELDQLRKKCEEAEEQQARTQRELEEYKKITEKNSKEMEETNVLIKKLLSLHGNSSST

SEQ ID NO: 277545 - protein, 211 aa, Zea mays
  unsure (1)..(211): unsure at all Xaa locations
  Clone ID: MRT4577_184699C.1.pep
TKGGTEVRKYPRRGRNTTLASKKKIDPNMAPGIRFSKRVRAGAQPEEQSSKRFHSTETDGHNVQEPTDGNDHIPNSPTTPGLADHFSRAAEEAMASAAHDSTGDAEGNSRTTPGLADHFSRAEEEAMASAAHDSTGDAQANVARDEETEAPTQRAPRRPRAATKGKQLDRMTKVMQRRLPIAXEEGKKGHMNPCQLPSLHQRLASLFXKTC

SEQ ID NO: 277546 - protein, 61 aa, Zea mays
  Clone ID: MRT4577_18469C.1.pep
EKLVLGRATIYGQRNKHKLYYITHKTTTLLISSQHWNQSPHTFQLKNPAHTHFLHQHIHIT

SEQ ID NO: 277547 - protein, 427 aa, Zea mays
  unsure (1)..(427): unsure at all Xaa locations
  Clone ID: MRT4577_1846C.1.pep
MVHIVEHQDLVPEDFMLEEEAASSTPRSTNFPTPGAAAVVHSARQHTPAQTSRASRAAPGXLSATRELLRHPXSSTASPGAMKLWRDDVDRLLGMAHSGSTKPRPRSSRRQHEASTSVRSPSVRAAPTEDLRAELNRRCAGEDAPVSLERSNDLRAELNRRRAGEDARVSLERAXPTGARIQAGXPLAGVGCAALADHLRAANWPSKFWPHLPEKYDARTWLMNLTPGSIYSWEELCARFIANFASAYQQHGMEAHLHAVRQEPEETLRTFISRFTKVRGTVPCISDASIITTFLQGVHDEKMLEKLAMHDVETVTTLFALADKCARAAEGCAWHSAPQTGAAHTGGSGAVAQDGKKKKKKNRGHEKLSSTALVVAAATRGRNKRNKRPRRQRGNSGSCPIHPNSRHSAAECRKIIELAKRVSEQRE

SEQ ID NO: 277548 - protein, 64 aa, Zea mays
  Clone ID: MRT4577_184700C.1.pep
NHNTPVYLNVVRRLLTFMSYECCALEADICSCRFPASVIWTTWITPRTGSNRQHVLSPHEFVNY

SEQ ID NO: 277549 - protein, 56 aa, Zea mays
  Clone ID: MRT4577_184701C.1.pep
PPPSLNAQNLLASRVAMPAYPGSPPALGLSSCPCSPPILAWKLIESLIPPKSALTS

SEQ ID NO: 277550 - protein, 48 aa, Zea mays
  Clone ID: MRT4577_184702C.1.pep
HEVIPHRHEEADNGRPRGAEDNRGHLCTVSQRSVCRRWLYIRAAVKRE

SEQ ID NO: 277551 - protein, 99 aa, Zea mays
  Clone ID: MRT4577_184703C.1.pep
ARRLLEMKTENAGHYVLIANMYAAAGCWNELATVRKLMRDMGVMKAPGLAWADLGNGFTPFLVGDRSNPLAPEIYEVLDELTEQMRNMSNCSDLDILSM

SEQ ID NO: 277552 - protein, 133 aa, Zea mays; identical to SEQ ID NO: 275535
  Clone ID: MRT4577_184704C.1.pep

SEQ ID NO: 277553 - protein, 107 aa, Zea mays
  unsure (1)..(107): unsure at all Xaa locations
  Clone ID: MRT4577_184705C.1.pep
RTGGLGPLRPRLGPFWPGEPPKIPRPRWWAWARAVPFWLKVEFAPFVLPRSWFCFFSVPFAFLSFDSFPPALFVAFLRVARLVFCSPGPLFCWVGCFFARVFFVIXF

SEQ ID NO: 277554 - protein, 349 aa, Zea mays
  Clone ID: MRT4577_184706C.1.pep
MPEKATSAESTPSEQPIVVRMPGDGWSAFRMSKVAGSSMLQAAPAVKANSAVSQTKPRRAKYRQVNAADKSPCPVKVNQGNSEAVSKESLSCAEMLWQLCLQANGLQQSEEIVPTSVNFLTVHRNSKFSGSDVNEGITEKAANSEFTVAEQAIADSMQDDQWADILSIDAEPAFAVNRKINDIGPAVNKKAPQVKKPPVNSLSTAENVDEPRSEGNQDTGNEEQLRNETKLFSANGSQLNAGTKFGQEMENCFLSGLVLHFSRPCAVPSQCDLIKIFSQYGPVNEVKADVANSASSAQVIFKRRMDAEAAFAGAGKISALGPALVSFRLTDFPASASGNKASHVASKSE

SEQ ID NO: 277555 - protein, 133 aa, Zea mays
  Clone ID: MRT4577_184707C.1.pep
MSYYGDRRAESSIVEAFTLSPLPYPVILVLLVVTLLLGASWFFTYDDFIEEASQQLSWALLGVPIALVLLIRWISSVDSFEGYLGFYPTESRWKGRYERGPAEGSSPWGVALLVLLLLVLASFHSTIHDMWGP

SEQ ID NO: 277556 - protein, 57 aa, Zea mays
  Clone ID: MRT4577_184708C.1.pep
TTLIGYSMQGLCKYGFYDVFKALYSNILGEENTYLWRTSLYLAASASAEFFADIALA

SEQ ID NO: 277557 - protein, 133 aa, Zea mays
  Clone ID: MRT4577_184709C.1.pep
MSYYGDRRAESSIVEALTLSPLPYPVILVLLMVTLLLGASWFFTYDDFIEEASQQLSWALLGVPIALVLLIRWISSVDSFESYLGFYPRESRWKGRYERGPAEGSSPWGVALLVLLLLVLASFHSTIHDMWGP

SEQ ID NO: 277558 - protein, 47 aa, Zea mays
  Clone ID: MRT4577_18470C.1.pep
VRKEEELSPLLGPVTIAKGGVMPKIQNLLLPKKAGGGSPKVSAGYED

SEQ ID NO: 277559 - protein, 133 aa, Zea mays; identical to SEQ ID NO: 275535
  Clone ID: MRT4577_184710C.1.pep

SEQ ID NO: 277560 - protein, 133 aa, Zea mays; identical to SEQ ID NO: 275492
  Clone ID: MRT4577_184711C.1.pep

SEQ ID NO: 277561 - protein, 127 aa, Zea mays
  unsure (1)..(127): unsure at all Xaa locations
  Clone ID: MRT4577_184712C.1.pep
ARIIYLGLLMASYGRTSTSSILPNIRVRNTSPFLHPSLAPSSSWTSFLRLTPWLLLSTTSSFSHAGSPPPLPHVAPVPSTPHATPPSWSVPSPLYEPCEARRPHYATCSLTPSLLHARXRPLLTPYG

SEQ ID NO: 277562 - protein, 1845 aa, Zea mays
  unsure (1)..(1845): unsure at all Xaa locations
  Clone ID: MRT4577_184713C.1.pep
MMARLRHTARKSVIPFLPSRLAERPLRRPVAGQSSHLERLHHHLHEEQEHRRQEQQGSSFSLQQEIESVRSCSPVLPLEAPPAPPLGAPAPGVAAGGDPDDGGGDDSSSHDTDFSADQEPEGWVARPITRDAARGCHFHDALDTLLRRALDRRTWSIEYRCVVYQHSRGVYPDHWEATCLVRRPDNILQGAKVCSEHYSISERDSAEAAMQDAARRALSHYCSVLGGMSENRRRGGRRAQQEQAAQQEEVPQQQQLPPPPPMSIEQMFLMQTQAVQAIGQTLAAIQQQQQQPPPQPQMPQMPRDKCAEFMRGHPPTFAHSSDPMDAEDWLRMWNGNCIPLSAMTGRKFCLMTVKKEEFLALKQGSSSLSEYRDRFLQLPCYAPEDVNTDAKRQYRFLRGLVDPLQQNQRPPQHQQFQRQYPQHQYQNRQNNQSGGGQFQRQNQQAPRLPAPATQQNSQVAPAQVGNRACFHCGEQGHWVMQCPKXSPTAVRXNAPAKQNVSQPGAGNRSQPRYNHGRLNHLEAEAVQETPDMIICMFPVDSHIAEVLFDTGATHSFITASWVEAHSLPITTMSTPIQIDSAGGRIRADSICLNVSVEIRGIAFPANLIVMGTQGIDVILGMNWLDKYQAFISCDKRTIKLVSPLGEEVVTELVPPKPKKGSCYQMAVDSSEADPIESIKVVSEFPDVFPKDLPGMPPERKVEFAIELLPGTAPILKRAYRVSGPELVELKKQIYELSEKGYIRPSTSPWAAPVLFVEKKDGTRRMCIDYRALNEVTIKNRYPLPRIEDLFDQLRGASVFSKIDLRSGYHQLMIRPSDIPKMAFITKYGLYEFTVMSFGLTNAPAFFMNLMNSVFMDYLDKFVVVFYDDILIYSQGEEEHADHLRMVLQILREHQLYANLSKCEFWISEVMFLGHIINKEGLAVDSKKVADILNWKAPTDARGIKSFVGMAGYYRRFIEGFSKVAKPMTALLGNKLKVHEKNYPIHDLELAAVVHALKTWRHYLYGQKCDVYTDHKSLKYIFTQSELNMRQRRWLELIKDYELEIHYHPGKANVVADALSRKSQVNLMVACPMPYELAKEFHRLSLGFLNNTRGVTIELEPTLEREIKEAQKNDEKISEIRRLILDGKGKDFREDAEGVIWFKDRLCVPNVQSIRELILKEAHETAYSIHHGSEKMYQDLKKKFWWILPGPLLCAHFICLRANIRRYPGDWCRTGGGSQISSPSMAPTSGSGSGTQANRPPLSSRGAATRRGRVTSNRSTINRADAAGTPTSTPTPSADPSSAGDATASGTPTPSSSTNAPPAAAQPQSGIDNVIVEDDDTVIVGTKRKLKSDVWLEFEQVTVGGKLKAQCNWCKKQLVGDSKAGTTHLHSHLGSCQSRQVRKGLKQATLKLSKDEHGAIIVDKYVFDQQVARKELAIMICVHEYPLSMVDHVGFRRFCAALQPLFKTMSRNTIKKDILDMFIYVPAPHTGEIISDVLYEVLQDWQIEKKVSTVTLDNCTTNDNLMCCMQDKLPLSSLMLDGKLYLEEPTLPRTQELDIISWWQHAGIKYPTLRKIARDIMAIPVTTVASESVFSTGGRCTALCVAVQQSKTKTCVADLLLLSKEKHVLLSKLLSKLQRKSLLSKEMKPKISLFSAYHPQTDGQTKRTNQILEDMLRACALQDQSGWDKRLPYAEFSYNNIYQASLKMSPFQALYGRSCRTPLQWDQPGEKQVFGPDILLEAEENIKMVRENLKIAQSRQRSYADTRRRELSFEVGDFVYLKVSPIRGVRRFGVKGKLAPRYIGLYQILARRGEVAYQLSLPENLSAVHDVFHVSQLKKCLRVPEEQLPVEGLEVQEDLTYIEKPA

SEQ ID NO: 277563 - protein, 90 aa, Zea mays
  unsure (1)..(90): unsure at all Xaa locations
  Clone ID: MRT4577_184714C.1.pep
MSSSLLSPTAGRTSGSDGDSAADTHRGEKSRLTXRQTERGSQLLNYKEQKRSENAKSXAGRRRNRRRPAPRRPTSRRSWTPRSTSPTPSS

SEQ ID NO: 277564 - protein, 286 aa, Zea mays
  unsure (1)..(286): unsure at all Xaa locations
  Clone ID: MRT4577_184715C.1.pep
RCFDADSGSSSHRSDFGAIQQQQQXQQXKAPPQLSELXMPRDKRAEFMRGHPXXTFAHSSDPXMDAEDWLRTVERELHTAQCDDREKVLYGPRLLRGAXPXWWESYXXTPCPTPTTITXDRFLQLSRYAPEDVNTDAKRQYRFLRGLVDPLQYQLMNHTFPTFQHLIDRAIMTEGKRKEMEDRKRKISGPQPGSSSRPRFSGNQPQQFRQNQRPPQQHQQFQRQYPQHQYQNRQNHQSGGQFQRQNQQASRLPAPANQQNSQAAPAQVGNRACFHCGEQGHWVIGR

SEQ ID NO: 277565 - protein, 1422 aa, Zea mays
  Clone ID: MRT4577_184716C.1.pep
MSIEQMFLMQTQTVQAIGQTLAAIQQQQQQQQQAPPQPQPQMPRDKRAEFMRGHPPTFAHSSDPMDAEDWLRTVERELHTAQCDDREKVLYGPRLLRGAAQSWWESYLATHAHPDAITWEEFRGSFRQYHVLAGLMTVKKEEFLALKQGPSSVSEYRDRFLQLSRYAPEDVNTDAKRQYRFLRGLVDPLQYQLMNHTFPTFQHLIDRAIMTERKRKEMEDRKRKISGPQPGSSNRPRFSGSQPQQFRQNQRPPQQHQQFQWQYPQHQYQNRQSNQSGGQFQRQNQQAPRLPAPAAQQNSQAAPAQVGNRACFHCGEQGHWVMQCPKKATQQQSGPNAPAKQNVPQPGAGNRSHTRYNHGRLNHLEAEAVQETPGMIVGMFPVDSHIAEVLFDTGATHSFITASWVEAHNLPITTMSTPIQIDSAGGRIRADSICLNISVEIRGIAFPANLIVMGTQGIDVILGMNWLDKYQAVISCDERTIKLVSPLGEEVVTKLVPPGPKKGSCYQMAVDSSEADPIESIKVVSEFPNVFPKDLPGMPPERKVEFAIELLPGTAPIFKRAYRISGPELVELKEQIDELSEKGYIRPSTSPWAAPVLFVEKKDGTKRMCIDYRALNEVTIKNKYPLPRIEDLFDQLRGASVFSKIDLRSGYHQLRIRPSDIPKTAFISKYGLYEFTMMSFGLTNAPAFFMNLMNSVFMDYLDKFVGVFIDDILIYSQSEEEHADHLRMVLQRLREHQLYTKLSKCEFWISEVLFLGHIINKEGLAVDPKKVADILNWKAPTDARGIKSFIGMAGYYRRFIEGFSKIAKPMTALLGNKVEFKWTQKCQEAFEALKEKLTTVPVLVLPDVHKPFSVYCDACYTGLGCVLMQEGRVVAYSSRQLKVHEKNYPIHDLELAAVVHALKTWRHYLYGQKCDVYTDHKSLKYIFTQSELNMRQRRWLELIKDYELEIHYHPGKANVVADALSRKSQVNLMVARPMPYELAKEFDRLSLGFLNNSRGVTVELEPTLEREIKEAQKNDEKISEIRRLILDGRGKDFREDAEGVIWFKVRLCVPNVQSIRELILKEAHETAYSIHPGSEKMYQDLKKKFWWYGMKREIAEHVAMCGSCRRIKAEHQRPAGLLQPLQIPQWKWDEIGMDFIVGLPRTRAGYDSIWVVVDRLTKSAHFIPVKTNYSSAVLAELYMSRIVCLHGVPKTIVSDRGTQFTSHFWQQLHEALGTHLNFSSAYHPQTDGQTERTNQILEDMLRASEENIKMVRENLKIAQSRQRSYADTRRRELSFEVGDFVYLKVSPIRGVRRFGVKGKLAPRYIGPYQILARRGEVAYQLSLPENLSAVHDVFHMSQLKKCLRVPEEQLPVEGLEVQEDLTYVEKPVQILEVADRVTRRKTIRMCKVRWNHHSEEEATWEREDDLMAKYPELFASPP

SEQ ID NO: 277566 - protein, 1867 aa, Zea mays
  Clone ID: MRT4577_184717C.1.pep
MESHDLWAKRESRLVGGYEIDGFGYDYGAGKWYSFRLERMARLRHTARKSVIPFLPSRLAERPLRRPVAGQSSHLERLHHRLHEEQERRRQEQQGSSFSLQQEIESVRSCSPVLPLEAPPAPSLGAPTSGVAAGGDPDDGGGDDSSSHDTDFSANPEPEGWVARPITRDAARGCHFHDALDTLLHRALNRHTWSIEYRCVVYQHSRGVYPDRWEATCLVRRSENSLQGAEACSEHYSISERDSAEAAMQDAARRALSHYCSVLDGVADGLDLKYYPRRPSGSTGGVIVSPVGDDNPRLSSTVNLAAVLNTELDHALDELSRARAEISLLRAERAERRHLDDGSPTPVGTQHPYRSPRRGHRVVENSILSSYAARFARSVLMCDCILQISENRRRGGRRAQQEQAAPQDEVPQQQHLPPPPPMSIEQMFLMQTQAVQAIGQTLAAIQQQQQQAPPQPQMPRDKRAEFMRGHPTTFAHSSDPMDAEDWLRTVEWELHTAHCDDREKVLYGPRLLRGAAQSWWESYLATHAHPDTITWEEFRGSFRQYHVPAGLMTVKKEEFLALKQGSSSVSEYRDRFLQLSRYAPEDVNTDAKRQYRFLRGLIDPLQYQLMNHTFPTFQHLIDRAIMTERKRKEMEDHKHKISGPQPGSSNRPRFSSNQPQQFRQNQRPPQQHQQFQRHYPQHQYQNRQNNQSGGGQFQRQNQQAPRFPAPANQQNSQEAPAQVGNRACFHCGEQGHWVMQCSKKAAQQQSGPNAPTKQNVPQPGAGNRSQPRYNHGRLNHLEAKAVQETPGMIVGMFPVDSHIAEVLFDTGATHSFITASWVEAHNLPITTMSTPIQIDSAGGRIRADSICLNVSVEIRGIAFPANLIVMGTQGIDVILGMNWLDKYQAVISCDKRTIKLMSPLGEEVVTELVPPEPKKGSCYQMAVDSSETDPTESIRVVSEFPDVFPKDLPGMPPERKVEFAIELLPGIAPIFKRAYRISGPELVELKKQIDELSEKGYIRPSTSPWAAPVLFVEKKDGTKRMCIDYRALNEVTIKNKYPLPRIEDLFDQLRGASVFSKIDLRSGYHQLRIRPSDIPKTTFITKYGLYEFTVMSFGLTNAPAFFMNLMNSVFMDYLDKFVVVFIDDILIYSQSEEEHAGHLRMVLQRLREHQLYAKLSKCEFWISEVLFLGHIINKEGLAVDPKKVADILNWKAPTDARGIKSFIGMVGYYRRFIEGFSKVAKPMTALIGNKVEFKWTQKCQEAFEALKEKLTTAPVLVLPDVHKPFSVYFDACYTGLGCVLMQEGRVVAYSSRQLKVHEKNYPIHDLELAAVVHALKTWRHYLYGQKCDVYTDHKSLKYIFTQSELNMRQRRWLELIKDYELEIHYHPGKANVVADALSRKSQVNLMVAHPMPYELAKEFDSEIRRLILDGKGKDFREDAEGVIWFKDRLCVPNVQSIRELILKEAHETAYSIHPGSEKMYQDLKKKFWWCGMKREIAEHVAMCDSCRRIKAEHQRPAGLLQPLQIPQWKWDEIGMDFIVGLPRTRAGYDSIWVVVDRLTKSAHFIPVKTNYNSAVLAELYMSRIVCLHGVLKKIVSDRGTQFTSHFWQQLHEALGTHLNFSSTYHPQIDGQTERTNQILEDMLRAYALQDQSGWDKKLPYAEFSYNNSYQASLKMSPFQALYGRSCRTPLQWDQPGEKQVFGPDVLLEAEENIKMIRENLKIAQSRQRSYADTRRRELSFEVGDFVYLKVSPIRGVRRFGVKGKLAPRYIGSYQILAKRGEVAYQLGLPEGLSAVHDVFHVSQLKKCLRVPEEQLLVEGLEVQEDLTYVEKPSQILETADRVTRRKTIRMCKVRWSHHSEEEATWEREDDLMAKYPELFASQP

SEQ ID NO: 277567 - protein, 110 aa, Zea mays
  Clone ID: MRT4577_184718C.1.pep
VPYGSRPGTNHTGFRPRPHIRRRCQMRGGREAKTQHLSLEAGALQRTSLGPGRPIGWKSMRKDTSDWQRSIKSIPGLPARSTGTMARLQVLIAACPGKLVVVEPSARLLR

SEQ ID NO: 277568 - protein, 1346 aa, Zea mays
  Clone ID: MRT4577_184719C.1.pep
MDAEDWLRTVERELHTAQCDDREKVLYGPRLLRGAAQSWWESYLATHAHPNAITWEEFRGSFRQYHVPAGLMTVKKEEFLALKQGSSSVSEYRDRFLQLSRYAPEDVNTDAKRQYRFLRGLVDPLHYQLMNHTFPTFQHLIDRAIMTERKRKEMEDPNQQNSQAAPAQVGNRACFHCGEQGHWVMQCPKKAAQQQSGPNAPAKQNVPQPGAGNRPQPRYNHGRLNHLEAEAVQETPGMIVGMFPVDSHIAEVLFDTGATHSFITASWVEAHNLPITTMSTPIQIDSAGGRIRADSICLNISVEIRGIAFPANLIVMGTQGIDVILGMNWLDKYQAVISCDKRTIKLVSPLGEEVVTELVPPEPKKGSCYQIAVDSNEADPIESIKVVSEFPDVFPKDLPGMPPERKVEFAIELLPGTAPIFKRAYRISGPELVELKEQIDELSEKGYIRPSTSPWAAPVLFVEKKDGTKRMCIDYRALNEVTIKNKYPLPRIEDLFDQLRGASVFSKIDLRSGYHQLRIRPSDIPKTAFITKYGLYEFTVMSFGLTNAPAFFMNLMNSVFMDYLDKFVVVFIDDILIYSQSEEEHADHLRMVLQRLREHQLYAKLSKCEFWISEVLFLGHIINKEGLVVDPKKVATILNWEAPTDARGIKSFIGMAGYYRRFIEGFSKIAKPMTALLGNKVEFKWTQKCQEAFEALKEKLTTAPVLVLPDVHKPFSVYCDACYTGLGCVLMQEGRVVAYSSRQLKVHEKNYPIHDLELAAVVHALKSWRHYLYGQKCDVYTDHKSLKYIFTQSELNMRQRRWLELIKDYELEIHYHPGKANVVADALSRKSQVNLMVARPMPYELAKEFDRLSLGFLNNSRGVTVELEPTLEREIKEAQKNDEKISEIRRLILDGRDKDFRVDAESVIWFKDRLCVPNVQSIRELILKEAHETTYSIHPGSEKMYQDLKKKFWWYGMKREIAEHVARCDSCRRIKAEHQRPAGLLQPLQIPQWKWDEIGMDFIVGLPRTRAGYDSIWVVVDRLTKSAHFIPVKTNYNSAVLAELYMSQIVCLHGVPKKIVSDRGTQFTSHFWWQLHEALGTHLNFSSAYHPQTDGQTERTNQILEDMLRACALQDQSGWDKRLPYAEFSYNNSYQASLKMSPFQALYGRSCRTPLQWDQPGEKQVFGPDILLEAEENIKMVRENLKIAQSRQQSYADTRRRELSFEVGDFVYLKVSPIRGVRRFGVKGKLAPRYIGPYQILARRGEVAYQLSLPENLSAVHNVFHVSQLKKCLRVPEEQLPVEGLEVQEDLTYVEKPVQILEIADRVTRRKTIRMCKVRWNHHSEEEATWEREDDLMAKYPELFAS

SEQ ID NO: 277569 - protein, 56 aa, Zea mays
  Clone ID: MRT4577_18471C.1.pep
TLTEGLLQPQPNHLSSSPYGEGDDGITAFGASDGGDAAVSAYDAAVVNATIEERVR

SEQ ID NO: 277570 - protein, 78 aa, Zea mays
  Clone ID: MRT4577_184720C.1.pep
CGCKGCAWVDDVGTSDVRIVVIVGFVRIVQIKLYSQFYRVLSFNGVGEVVSPVRCCASQEMVCRDMKVFVRDDRGYRM

SEQ ID NO: 277571 - protein, 409 aa, Zea mays
  Clone ID: MRT4577_184721C.1.pep
MSENRRRGGRRAQQERAAQQEEAPQQQQLPPPPPMSIEQMFLMQTQAVQAIGQTLAAIQQQQQQQQQAPPQPQMPQMPRDKRAEFMRGHPPTFAHSSDPMDAEDWLRTVERELHTAQCDDREKVLYGPRLLRGAAQSWWESYLATHANPDTITWEEFRGSFRQYHVPAGLMTVKNEEFLALKQGPLSVSEYRDKFLQLSRYAPEDVNTDAKRQYRFLRGLVDPLQYQLMNHTFPTFQHLIDRAIMTERKRKEMEDRKRKISGPQPGSSSRPRFSGNQPHQFRQNQRPPQQHQQFQRQYPQNQYQNRQSNQSGGQFQKQNQQAPRLPAPANQQNSQAAPAQVGNKACFHCGEQGHWVMQCPKKAAQQQSGPNAPAKQNVPQPGAGNRPQQRYNHGRLNHLEAEAVQETPA

SEQ ID NO: 277572 - protein, 1449 aa, Zea mays
  Clone ID: MRT4577_184722C.1.pep
MPQMPRDKRAEFMRGHPPAFAHSSDPMDAEDWLRTVERELHTAQCDDREKVLYGPRLLRGAAQSWWESYLATHANPDAITWEEFRGSFRQYHVPAGLMTVKEEFLALKQGPSSVSEYRDRFLQLSRYAPEDVNTDAKRQYRFLRGLVDPLQYQLMNHTFPTFQHLIDRAIMTERKRKEMEDRKRKISGPQPGSSSRPRFSGNPPQQFRQNQRPPQQRQLHRQFPRHQPQHRYQNRQSNQSGGQFQRQNQQAPRLPTPANQQNSQAAPAQVGNRACFHCGEQGHWVMQCPKKAAQQQSGPNAPAKQNVSQPGAGNRPQQRYNHGRLNHLEAEAVQETPGMIVGMFPVDSHIAEVLFDTGATHSFITASWVKAHNLPTTTMSTPIQIDSAGGRIRADSICLNITVEIRGIAFPANLIVMGTQGIDVILGVNWLDKYQAVISCDKRTIKLVSPLGKEVVTELVPPEPKKGSCYQMAVDSSEADPVESIKVVSEFPDVFPKDLPGMPPERKVEFAIELLPGTAPIFKRAYRISGPELVELKKQIDELSEKGYTRPSTSPWAAPVLFVEKKDGTKRMCIDYRALNEVTIKNKYPLPRIEDLFDQLRGASVFSKIDLRSGYHQLRIRPSDIPKTAFITKYGLYEFTVMSFGLTNAPAFFMNLMNSVFMDYLDKFVVVFIDDILIYSQSEEEHADHLRMVLQRLREHQLYAKLSKCEFWISEVLFLGHIINKEGLAVDPKKVADILNWKAPTDARGIKSFIGMAGYYRRFIEGFSKIAKPMTALLGNKVEFKWTQKCQEAFEALKEKLTTSPVLILPDVHKPFSVYCDACYTGLGCVLMQEGRVVAYSSRQLKVHEKNYPIHDLELAAVVHALKTWRHYLYGQKCDVYTDHKSLKYIFTQTELNMRQRRWLELIKDYELEIHYHPGKANVVADALSRKSQVNLMVARPMPYELAKEFDRLSLGFLNNSRGVTVELEPTLEREIKEAQKNDEKISEIRRLILDGRGKDFREDAEGVIWFKDRLCVPNVQSIRELILKEAHETAYSIHPGSEKMYQDLRKKFWWYGMKRKIAEHVAKCDSCRRIKAEHQRPAGLLQPLQIPQWKWDEIGMDFIVGLPRTRAGYDSIWVVVDRLTKSAHFIPVKTSYNSAVLAELYMSRIVCLHGVPKKIVSDRGTQFTSHFWQQLHEALGTHLNFSSAYHPQTDGQTERTNQILEDMLRACALQDQSGWDKRLPYAEFSYNNSYQASLKMSPFQALYGRSCRTPLQWDQPGEKQVFGPDILLEAEENIKMVRENLKIAQSRQQSYADTRRRELSFEVGDFVYLKVSPIRGVRRFGVKGKLAPRYIGPYQILSKRGEVAYQLSLPENLSVVHDVFHVSQLKKCLRVPEEQLPVEGLEVQEDLTYVEKPAQILEIADRVTRRKTIRMCKVRWNHHSEEEATWEREDDLVAKYPELFASQP

SEQ ID NO: 277573 - protein, 944 aa, Zea mays
  Clone ID: MRT4577_184723C.1.pep
MAVDSSEADPIESIKVVSEFPDVFPKDLPGMPPERKVEFAIELLPGTAPIFKRAYRISGPELVELKKQIDELSEKGYIRPSTSPWAAPVLFVEKKDGTKRMCIDYRALNEVTIKNKYPLPRIEDLFDQLRGASVFSKIDLRSGYHQLRIRPSDIPKTAFISKYGLYEFTVMSFGLTNAPAFFMNLMNSVFMDYLDKFVVVFIDDILVYSQSEEEHADHLRMVLQRLREHQLYAKLSKCEFWISEVLFLGHIINKEGLAVDPKKVADILNWKAPTDARGIKSFIGMAGYYRRFIEGFLKIAKPMTALLGNKVEFKWTQKCQEAFEALKEKLTTAPVLVLPDVHKPFSVYCDACYTGLGCVLMQEGRVVAYSSRQLKVHEKNYPIHDLELAAVVHALKTWRHYLYGQKCDVYTDHKSLKYIFTQSELNMRQRRWLELIKDYELEIHYHPGKANVVADALSRKSQVNLMVARPMPYELAKEFDRLSLGFLNNSRGVTVELEPTLEREIKEAQKNDEKISEIRRLILEGKSKDFREDAEGVIWFKDRLCVPNVQSIRELILKEAHETAYSIHPGSEKMYQDLKKKFWWYGMKREIAEHVAKCDSCQRIKAEHQRPAGLLQPLQIPQWKWDEIGMDFIVGLPRTRAGYDSIWVVVDRLTKSAHFIPVKTNYNSAVLAELYMSRIVCLHAYHPQTDGQTERTNQILEDMLRACALQDQSGWDKRLPYAEFSYNNSYQASLKMSPFQALYGRSCRTPLQWDQPGEKQVFGPDILLEAEENIKMVRENLKIAQSRQRSYADTRRRELSFEVGDFVYLKVSPIRGVRRFGVKGKLAPRYIGPYQILARRGEVAYQLSLPESLSAVHNVFHVSQLKKCLRVPEEQLPVEGLEVQEDLTYVEKPVQILEVADRVTRRKTIRMCKVRWNHHSEEEATWEREDDLMAKYPELFASQP

SEQ ID NO: 277574 - protein, 286 aa, Zea mays
  Clone ID: MRT4577_184724C.1.pep
MEVATAARAMTPTFPPTRSWKDGLLDPSLATLLAGVTSTMRSTPCYVRHLTGVLGLSSIVVWSSSTVAGSTRTDGRRPAWCAVRRTVSGVLRSAQSTIPSLSGTQLRRPCKMPHDMSENRRIGGRRAQQERPAQQDEAPQLQQLPPLPPMSIEQMFMMQTQAVQAIGLMTVKKEEFLALKQGSMSVSEYRDRFLQLSRYAPEDVNTDAKRQYRFLRGLVDPLQYQLMNHTFPTFQHLIDRTIMTEMKRKEMEGRKRKISGPQPGSSNRPRFSGNQPQQFRQNQRPP

SEQ ID NO: 277575 - protein, 89 aa, Zea mays
  Clone ID: MRT4577_184725C.1.pep
EKKTLDLDIKKVSESHLIHLVQRPLLCGNTQMQLEQNLELSEFNKQVLGVLPKLTCSLYFDVTFSSSCGLEKTFETALIGFLGVLYAMA

SEQ ID NO: 277576 - protein, 1053 aa, Zea mays
  unsure (1)..(1053): unsure at all Xaa locations
  Clone ID: MRT4577_184726C.1.pep
HIVEVLFDTRATHSFITASWVEAHXNLLITTMSTPIQIDSAGGRIRADSICLNVSVEIRGIAFPANLIVMGTQGIDVILGMNWLDKYQAVISCDKRTIKLVSPLGEEVVTELVPPEPKKGSCYQMAVDSSEADPIEXIKVVSKFPXDVFPKDLPGMPPEQKVEFAIELLPGTAPIFKRAYRVSGPELVELKKQIDEMPEKGYIRPSTSPWAAPVLFVEKKDGTRRMCIDYRALNEVTIKNKYPLPRIEDLFNQLRGASVFSKIDLRSGYHQLRIRPSDIPKTTFITKYGLYEFTVMSFGLTNVPAFFMNLMNSVFMDYLNKFVVVFIDDILIYSHSEEEHASHLKMVLQRLREHQLYAKLSKCEFWISEVLFLGHIINKEGLDVDPKKVADILNWKAPTDARGIKSFIGMAGYYRRFIEGFLKIAKPMTALLGNKVEFKWTQKCQEAFEALKEKLTTAPVLVLPDVHKPFSVYCDACYTGLGCVLMQEGRLVAYSSRQLKVHEKNYPIHDLELAAVVHALKTWRHYLYGQKCDVYTDHKSLKYIFTQSELNMRQRRWLELIKDYELEIHYHPGKANIVADALSRKSQVNLMDARPMPYELAKEFDRLSLGFLNNSRGVTVELEPTLEREIKEAQKNDEKIKAXDFREDXQKSIRELILKEAHETAYSIHPGSEKMYQDLKKKFWWYGMKREIAEHVAMCDSCRRIKAEHQRPAGLLQPLQIPQWKWDEIGMDFIVGLPRTRAGYDSIWVVVDRLTKSAHFIPVKANYSSAVLVELYMSRIVCLHGVPKKIVSDRGTQFTSHFWQQLHEALGTHLNFSSAYHPQTDGQTERTNQILEDMLRACALQDQSGWDKRLPYAEFSYNNSYQASLKMSPFQALYGRSCRTPLQWDQPGEKQVFGPDILLEAEENIKMVRENLKIAQSRQRSYADTRRRELSFEVGDFVYLKVSPIRGVRRFGVKGKLAPRYIGPYQILARRGEVAYQLSLPENLSIVHDVFHVSQLKKCLHVPEEQLPVEGLEVQEDLTYIEKPAQILEIADRVTRRKTIRMCKVRWNH

SEQ ID NO: 277577 - protein, 221 aa, Zea mays
  unsure (1)..(221): unsure at all Xaa locations
  Clone ID: MRT4577_184727C.1.pep
RTRHVISMCNSSGRFYLLLPPDSTSPPSLFASASSXXLWHRRLGHXGHEALSRLASSSAITCNNDSHVDLCNACQLGRHVRLPFSLSQSRALKKFDLVHCDLWTSLVSSISRFKYYLAILDDCSHLLWTFPLRLKSDTFSTIAQFFAFVATQFGTTIKSVQCDNGREFDNSTARTFFLTHGVALRMSCPYTSQQNGKVERVLRTINIIRSLLFQSHLPRAE

SEQ ID NO: 277578 - protein, 564 aa, Zea mays
  unsure (1)..(564): unsure at all Xaa locations
  Clone ID: MRT4577_184728C.1.pep
MATTAASSLLKSSFAGSRLPSATRTTTPSSVAVATPRAGGGPIRASISSPNPPYDLTSFRFSPIKESIVSRGMTRRYMTDMITHADTTVVIVGAGSAGLSCAYELSKDPTVSVAIVXQSVSPGGGAWLGGQLFSAMVVRRPAHLFLDELGVGYDEAEDYVVVKHAAXQRRARDEGARHERRRGRDRAPHARGRARHDRHRDGGRRDRRRPEDGPDVRRHDDLRPEGGAPGAEGTGQAQRRGRDHPRGVAGAARGVRDCVQGRRGRGRLSEHPRASMQAASYLGRRHHGVSSFNLGLCCCWTNEFPSIGXLICLVSVSCSCSTMPHTSRVLCHVGATRGVSCCCQNEXRRWNCDEKKKKNWAWATTRPRTTWWSSTXLFTSTVMSRLLARPNVKLFNAVAVEDLIVRRGRVGGVVTNWALVSMNHDTQSCMDPNVMEAKVVVSSCGHDGPFGATGVKRLQDIGMINAVPGMKALDMNAAEDEIVRLTREVVPGMIVTGMEVAEIDGAPRMGPTFGAMMISGQKAAHLALKALGRPNAVDGTIPEVSPALREEFVIASKDDEVVDA

SEQ ID NO: 277579 - protein, 102 aa, Zea mays
  Clone ID: MRT4577_184729C.1.pep
MATTAASSLLKSSFAGSRLPSATRTTTPSSVAVATPRAGGGPIRASISSSPTTGVKRLQDIGMISAVPGMKALDMNAAEDEIVRLTREVVPGMIVTGMEVAE

SEQ ID NO: 277580 - protein, 127 aa, Zea mays
  Clone ID: MRT4577_18472C.1.pep
QRGKIGPPKKSRGFPARAGGGSQFSLWGGVLKLGVIRGKGVPGGKWFSVKISTKNTSGKKKGKSRGGLRGGLTQINGVGLTARFPGGKPGGPVVLINRPTPGEGGFAFWAPGGFFFSPGRRAKGDCL

SEQ ID NO: 277581 - protein, 355 aa, Zea mays
  Clone ID: MRT4577_184730C.1.pep
MATTAASSLLKSSFAGSRLPSATRTTTPSSVAVATPRAGGGPIRASISSSPTPPYDLTSFRFSPIKESIVSREMTRRYMTDMITHADTDVVIVGAGSAGLSCAYELSKDPSVSVAIVEQSVSPGGGAWLGGQLFSAMVVRRPAHLFLDELGVGYDEAEDYVVVKHAALFTSTVMSRLLARPNVKLFNAVAVEDLIVRRGRVGGVVTNWALVSMNHDTQSCMDPNVMEAKVVVSSCGHDGPFGATGVKRLQDIGMISAVPGMKALDMNAAEDEIVRLTREVVPGMIVTGMEVAEIDGAPRMGPTFGAMMISGQKAAHLALKALGRPNAVDGTIPEVSPALREEFVIASKDDEVVDA

SEQ ID NO: 277582 - protein, 47 aa, Zea mays
  Clone ID: MRT4577_184731C.1.pep
RSLGGYNTHGEERTLRKAASTVWEKNGEPSDKVDVMHNGSSTWKQNA

SEQ ID NO: 277583 - protein, 115 aa, Zea mays
  unsure (1)..(115): unsure at all Xaa locations
  Clone ID: MRT4577_184732C.1.pep
KEARAVRHADVMDEHWWAKMQTVPELVKDCTTIIWIAYELHADVNFGQYMYCGYHPNRPSVSQRAMPVPGYHAYNELEKNPEKHFVRCIIDXLQARLGILLLEILFRHYYNKAYL

SEQ ID NO: 277584 - protein, 89 aa, Zea mays
  unsure (1)..(89): unsure at all Xaa locations
  Clone ID: MRT4577_184733C.1.pep
IAWSTSCSFGRRPTYFKCGDDDTARHXFDSMPKRKEASRTSMMAGNGTHARGKEAXDISDTTQKGGCAPEDISXLGHLYARSHSGMVDQ

SEQ ID NO: 277585 - protein, 74 aa, Zea mays
  Clone ID: MRT4577_184734C.1.pep
LIAKVIQTRKTKIQPQSQLLDRGINNCKRRRRSNRWSEKNNSLESLQKKNRSFRIPHKVKSTLFSITPYRCRYT

SEQ ID NO: 277586 - protein, 241 aa, Zea mays
  Clone ID: MRT4577_184735C.1.pep
MKSSLRSRQEPRRVSNGVIIGAMLLSLCVLSIVKARYCATPFGKAEDQLQEQMNSSIRMEPEESSPARTPGEEEEEDDGENGASATTTTAPAVTKTPAAVAAGGTRGKGKPTCYMTSKRSERCDASGDIRVDGNRSTIYVSGIDREWKTKPYARYHDPVAMAHVREYTLKPLPEAAPAPACTRNHSVPGFLFSNGGFSGNLYHDYTDVLVPLFISTHQFRGRVQFLVSGDKPWGVGKFTPF

SEQ ID NO: 277587 - protein, 88 aa, Zea mays
  unsure (1)..(88): unsure at all Xaa locations
  Clone ID: MRT4577_184736C.1.pep
YPTSHADVCPNQLISRTQNDMRTCYQNIHTTMKHLQNNILAFPTCEFLPLLHSRPILKTXHASPMAEPRTNSTSSALYPSRPYHSPTP

SEQ ID NO: 277588 - protein, 153 aa, Zea mays
  unsure (1)..(153): unsure at all Xaa locations
  Clone ID: MRT4577_184737C.1.pep
LRSASTPPCCYSTYDRGGHSRGRTCTKSCVTSARNPRGRPRPVGRRRAGASRRPWSCPLDRGANILTPGYPLSXTIVHGVNILVAXTGNAEPAGLTADLRAVGFNTTCGTYMXCDXVSGLEGLPRSXHQEWSPADVRSALMTPDYARYYAGWS

SEQ ID NO: 277589 - protein, 215 aa, Zea mays
  unsure (1)..(215): unsure at all Xaa locations
  Clone ID: MRT4577_184738C.1.pep
VYPLRSGRQWSFAGVPPGCAPERTASAPSPTTCSSSSSPASAAPAPPRARGSSRAGGAASRPASVRSSSAASPSTGSKPRSAASPPRSRSSRSASPRSAAPTPPAATRCSASAPPAPTRCSAPPRGSSRRSSSSTSPPIWSPAPSSSTCLACPAPPPSRCESXSSSACPTAPSSRRWTRCPCPAESRTPTSTPCSATDRDCARSGSTVSCLNKAT

SEQ ID NO: 277590 - protein, 170 aa, Zea mays
  Clone ID: MRT4577_184739C.1.pep
PFCSSTFYSCSSLQFSKPFSVYDYIKAGSIEGKVVEIGLTSTSLINPEKLPVIVPNSLFSSQMIVNRSRANWRASVTKIPIRIEDIEKVPSASEDIKTMLRSNQNVSLDSDVPYCYLSRLESSYGELTIGCNLKNMRKDEWLSAQQEILLGAARIIKSHGIELGSTMQCC

SEQ ID NO: 277591 - protein, 143 aa, Zea mays
  unsure (1)..(143): unsure at all Xaa locations
  Clone ID: MRT4577_18473C.1.pep
TGRVGASNXFINKHEHGCVSDHGLASLMNPVTARSRSLGYCAPEVADTRKASQSSDVYSFGVFVLELLTGKSPVQITGGGGGDVVHLVRWVQSVVREEWTAEVFDGELLRYPNIEEEMVEMLQIAMACVFRTPEPRPKMADVV

SEQ ID NO: 277592 - protein, 135 aa, Zea mays
  unsure (1)..(135): unsure at all Xaa locations
  Clone ID: MRT4577_184740C.1.pep
PPGREDKPHPPPEGGFLDAPKGFAPLRQVFGKQMGLSDQDIFALFGGPPLGRGPKKRFGFXGAWITNPLVFYNFFFKELLSGAKKGFFXLPNDKTLLRDPVFPPFVEKYSPNKKAFFYGYKKAPPKLSQLGDGDA

SEQ ID NO: 277593 - protein, 53 aa, Zea mays
  Clone ID: MRT4577_184741C.1.pep
SAPNSYLTMLWQHAAWRPHSSRPSTMTVGALCRLGSRRSSSVLLPRGSCLCFW

SEQ ID NO: 277594 - protein, 79 aa, Zea mays
  Clone ID: MRT4577_184742C.1.pep
TLPLLPTKELFQNVSSIGKEFFFRQMNSRVLVSDIFVLVSMCLANLFASLCILAKILFCASRTQFVLMFICCWVSLSNY

SEQ ID NO: 277595 - protein, 62 aa, Zea mays
  Clone ID: MRT4577_184743C.1.pep
LLQICRTNSHQHFKSIHILCLYLIFRLILIPLNADCLTLQLWNMLQQSSTPTTRAGTSALKH

SEQ ID NO: 277596 - protein, 62 aa, Zea mays
  Clone ID: MRT4577_184744C.1.pep
RSTKQAGSPIARKGEERNPADKARSFCCTAMRALLCVAPRQRLAGSRPAPQETEQARKKKHL

SEQ ID NO: 277597 - protein, 722 aa, Zea mays
  Clone ID: MRT4577_184745C.1.pep
MGTQGIDVYLGMNWLDNYQAVISCDKRTIKLVSPLGKEVVTELVSPEPKKESCYQMAINSSEAGPLETIKVVSEFPVVFPKDLPGMPPERKVEFAIELLPGTAPIFKRAYRVSGPELVELKKQIDELSEKGYIRPSTSPWAAPVLFVEKKDGTRRMCIDYRALNEVMIKNKYPLPRIEDLFEHLRGASVFSKIDLRSGYHQLRIRPLDISKTAFITKYGLYEFTVMSFGLTNAPTFYMNLMNSVFMDYLDKFVVVFIDDILIYSQSEAEHADHLRMVLQRLREHQLYAKLSKWFSKIAKPMTVLLGNKVEFKWTQKCQEAFEALKEKLTTVPVLVLPDVHKPFSVYCDACYTGLGCVLMQEGRVVAYSSRQLKVHEKNYPIHDLELAAVVHALRTWRHYLYGHKCDVYTDHKSLKYIFTQSELNMRQRRWLELIKDYELEIHYHPGKANVVADALSRKSQSIRQLILKEAHETAYSIHPGSEKMYQDLKKKFWWYEMKREIAEHVAMCDSCRRIKAEHQRPAGLLQPLQIPQWKWDEIDQSGWDKRLPYAEFSYNNSYQASLKNSPFQALYGRSCRTPLQWDQPGEKQVFGRDILLEAEENIKMVRENLKIVQSRQRSYADTRRRELIFEDGDFVYLKVSPIRGVRRFGVKGKLAPRYVGPYQILARRGEVDYQLSLPEGLFAVHDVFHVSQLKKCLRVTEEQLPVEGLEVQEDLTCIEKPT

SEQ ID NO: 277598 - protein, 117 aa, Zea mays
  Clone ID: MRT4577_184746C.1.pep
MDAEDWLRTVEQELHTAQCDDKEKVLYGPCLLRGAAQSWWESYLATHANLDTITWEEFRGLMTVKKEEFLALKQGSSSVSEYRDRFLQLSRYAPEDVNTDAKRQYRFLKGLVDPLHY

SEQ ID NO: 277599 - protein, 720 aa, Zea mays
  Clone ID: MRT4577_184747C.1.pep
MSIEQMFLMQTQAVQAIGQTLAAIQQQQQQQQQAPPQPQMPRDKRAEFMRGHPPTFAHSSDPMDAEDWLRTVERELHTAQCDDREKVLYGPRLLRGAAQSWWESYLATHAHPDAITWEEFRGSFRQYHVPAGLMTVKKEEFLALKQGPSSISEYRDKFLQLSRYAPEDVNTDAKRQYRFLRGLVDPLQYQLMNHTFPTFQHLIDRAIMTERKRKEMEDRKRKISGPQPGSSNRPRFSGNQPQQFRQNQRPPQQHQQFQRQYPQHQYQNRQSNQSGGQFQRQNQQAPRLPAPTAQQNNQAAPAQVGNRACFHCGEQGHWVMQCPKKAAQQQSGPNAPAKQNVPQPGAGNRSQPRYNHGRLNHLEAEAVQETPDMIVVGLPRTRAGYDSIWVVVDRLTKSAHFIPVKTNYSSAVLAELYMSRIVCLHGVPKKIVSDRGTQFTSHFWQQLHEALGTHLNFSSAYHPQTDGQTERTNQILEDMLRAYALQDQSGWDKRLPYAEFSYNNSYQASLKMSPFQALYGRSCRTPLQWDQPGEKQVFGPDILLEAEENIKMVRENLKIAQSRQRSYADTRRRELSFEVGDFVYLKVSPIRGVRRFGVKGKLAPRYIGPYQILARRGEVAYQLSLPENLSAVHDVFHVSQLKKCLRVPEEQLPVEGLEVQEDLTYVEKPVQVLEVADRVTRRKTIRMCKVRWNHHSEEEATWEREDDLMAKYPELFASQP

SEQ ID NO: 277600 - protein, 85 aa, Zea mays
  Clone ID: MRT4577_184748C.1.pep
MPLRPVHGFASLLVIFACHCHGGGSEQGADVAAERLERDVTSPLATVPVVDPTAAAAATTTQSPATGGSWCVASPSARRRRCRWR

SEQ ID NO: 277601 - protein, 498 aa, Zea mays
  Clone ID: MRT4577_184749C.1.pep
MVPDTNVVADALSRKSQVNLMVARSMPYELAKEFDRLSLGFLNNSRGVTVELEPTLEREIKEAQKNDEKISEIRRLILDGRGKDFREDAEDVVWFKDRLCVPNVQSIRDLILKEAHEIAYLIHPGSEKMYQDLKKKFWWYGMKREITEHVAMCDSCRRIKAEHQRPAGLLQPLQIPQWKWDEIGMDFIVGLPRTRADYDSIWVVVDRLTKSAHFIPVKTNYSSAVLAELYMSRIVCLHGVPKKIVSDRGTQFTSHFWQQLHEALSTHLNFSSAYHPQTDGQTERTNQILEDMLRACALQDQSGWDKRLPYAEFSYNNSYQASLKMSPFQALYGRSCRTPLQWDQPREKQVFGPDILLETEENIRMVRENMKIVQSRQRSYADTRRRELSFEVGDFVYLKVSPIRGVRRFGVKGKLAPRYIGPYQILSRRGEVAYQLSLPENLSAVHDVFHVSQLKKCLHVPEEQLPVEGLEVQEDLTYVEKPVQILEVADRVTRRKAI

SEQ ID NO: 277602 - protein, 65 aa, Zea mays
  Clone ID: MRT4577_18474C.1.pep
ALTNALTFFGLKDDAHSSRDQLTRQHDRILQYRDMCSSYLAYRRTAECIHMHRLRHTAVSVYRDH

SEQ ID NO: 277603 - protein, 44 aa, Zea mays
  Clone ID: MRT4577_184750C.1.pep
RPPTPCGWRSQPPDLATPPPPSAGGTQRPPHPSQPRGPPPRLRR

SEQ ID NO: 277604 - protein, 59 aa, Zea mays
  Clone ID: MRT4577_184751C.1.pep
CQILYDFFNKESANDILNPYFILKSFVFFLSIPITKRTIELGTLIYLNTQMELVLYHPI

SEQ ID NO: 277605 - protein, 1489 aa, Zea mays
  unsure (1)..(1489): unsure at all Xaa locations
  Clone ID: MRT4577_184752C.1.pep
MRLTPCYVGHLTGILGPSSIAVWSTSTVAGSTRTAGRQPAWCAVRRTVSRVLRSAQSTILSLSGTQLRQPCKMLHGVRFRTTARFSMSENRRRGGRRAQQERAAPQDEVPQQQHLPPPPPMSIEQMFLMQTQAVQAIGQTLAAIQQQQQQQQQQQAPPQPQMPQMPRDKRAEFMRGHPPTFAHSSDPMDAEDWLRTVERELHTAQCDDREKVLYGPRLLRGAAQSWWESYLATHAHPDAITWEEFRGSFCQYHVPAGLMTVKKEEFLALKQGPLSVSEYRDRFLQLSRYAPEDVNTDAKQQYRFLRGLVDPLQYQLMNHTFPTFQHLIDKAIMTERKRKEMEDPNQQNSQAAPAQVGNRACFHCGEQGHWVMQCPKKAAQQQSGPNAPAKQNVPQPGADNRPQPRYNHGRLNHLEAEAVQETPGMIVAGGRIRADSICLNISVEIRGIAFPANLIVMGTQGIDVILGMNWLDKYQAVISCDKRTIKLVSPLGEEVVTELVPPEPKKGSCYQIAVDSSEADPIERIKVVSEFPDVFPKDLPGMPPERKVEFAIELLPGTAPIFKRAYRISGPELDELKKQIDELSEKGYIRPSTSPWAAPVLFVEKKDGTKRMCIDYRALNEVTIKNKYPLPRIEDLFDQLRGASVFSKIDLRSGYHQLRIRPSDIPKTAFISKYGLYEFTVMSFGLTNAPAFFMNLMNSVFMDYLNKFVVVFIDDILVYSQSEEEHADHLKMVLQRLREHQLYAKLSKCEFWINEVLFLGHIINKEGLAVDPKKVADILNWKAPTDARGIKSFIGMAGYYRXFIEGFSKIAKPMTALLGNKVEFKWTQKCQEAFEALKEKLTTAPVLVLPDVHKPFSMYCDACYTGLGCVLMQEGRVVAYSSRQLKVHEKNYPIHDLELAAVVHALKTWRHYLYGQKCDVYTDHKSLKYIFTQSELNMRQRRWLELIKDYELEIHYHPGKANIVADALSRKSQVNLMVARPMPYELAKEFDRLSLGFLNNSRGVTVELEPTLEREIKEAQKNDEKISEIRRLILDGRGKDFREDAEGVIWFKDRLCVPNVQSIRELILKEAHETAYSIHPGSEKMYQDLKKKFWWYGMKREIAEHVAMCDSCRRIKAEHQRPAGLLQPLQIPQWKWDEIGMDFIVGLPRTRVGYDSIWVVVDRLTKSAHFIPVKTNYSSAVLAELYMSRIVCLHGVPKKIVSDRGTQFTSHFWQQLHEALGTHLNFSSAYHPQTDGQTERTNQILEDMLRACALQDQSGWDKRLPYAEFSYNNSYQASLRMSPFQALYGRSCRTPLQWDQPGEKQVFGPDILLEAEENIKMVRENLKIAQSRQRSYADTRRRELSFEVGDFVYLKVSPIRGVRRFGVKGKLAPRYIGPYQILARRGEVAYQLSLPENLSAVHNVFHVSQLKKCLRVPEEQLPVEGLEVQEDLTYVEKPVQVLEVADRVTRRKTIRMCKVRWNHHSEEEATWEREDDLMAKYPELFASQP

SEQ ID NO: 277606 - protein, 1516 aa, Zea mays
  Clone ID: MRT4577_184753C.1.pep
MSENRRRGGRRAQQERAAQQDEVPQQQHLPPPPPMSIEQMFLMQTQAVQAIGQTLVAIQQQQQAPPQPQMPQMPRDKRAEFMRGHPPTFAHSSDPMDAEDWLRTVERELHTAQCDDREKVLYGPRLLRGAAQSWWESYLATHAHPDAITWEEFRGSFRQYHVPAGLMTVKKEEFLALKQGPLSVSEYRDRFLQLSRYAPEDVNTDAKRQYRFLRGLVDPLQYQLMNHTFPTFQHLIDRAIMTERKRKEMEDRKRKISGPQPGSSNRPRFSGNQPQQFRQNQRPPQQYQQFQRQYPQHQYQNRQSNQSGGQFQRQNPQAPRLPAPANQQNNQAAPAQVGNRACFHCGEQGHWVMQCPKKAAQQQSGLNAPAKQNVPQPGSGNRSQPRYNHGRLNHLEAEAVQETPGMIVGMFPVDSHIAKVLFDTGATHSFITTSWVEAHNLPITTMSTPIQIDSAGGRIRADSICLNISVEIRGIAFPANLIVMGTQGIDVILGMNWLDKYQAVISCDKRTIKLVSPLGEEVVTELVPPEPKKGSCYRITVDSGEADPIESIKVVSEFPDVFPKDLPGMPPERKVEFAIELLPGTTPIFKRAYRISGLELVELKKQIDELSEKGYIRPSTSPWAAPVLFVEKKDGTKRMCIDYRALNEVTIKNKYPLPRIEDLFDQLRGASVFSKIDLRSGYHQLRIRPSDIPKTAFISKYGLYEFTVMSFGLTNAPAFFMNLMNSVFMDYLDKFVVVFIDDILIYSQSEEEHADHLRMVLQRLREHQLYAKLSKCEFWISEVLFLGHIINKEGLAVDPKKVADILNWKAPTDARGIKSFIGMAGYYRRFIEGFSKIAKPMTALLGNKVEFKWTQKCQETFEALKEKLTIAPVLVLPDVHKPFSVYCDACYTGLGCVLMQEGRVVAYSSRQLKVHEKNYPIHDLELAAVVHALKTWRHYLYGQKCDVYTDHKSLKYIFTQSELNMRQRRWLELIKDYELEIHYHLGKANVVADALSRKSQINLMVARPMPYELAKEFDKLSLGFLNNSRGVTVELEPTLEREIKEAQKNDEKISEIRRLILDGRGKDFREDAEGVIWFKDRLCVPNVQSIRELILKEAHETAYSIHPGSEKMYQDLKKKFWWYGMKREIAEHVAMCDSCRRIKAEHQRPAGLLQPLQIPQWKWDEIGMDFIVGLPRTRAGYDSIWVVVDRLTKSAHFIPVKTNYSSAVLVELYMSRIVCLHGVPKKIVSDRGTQFTSHFWQQLHEALGTHLNFSSAYHPQTDGQTERTNQILEDMLRACALQDQSGWDKRLPYAEFSYNNSYQASLKMSPFQALYGRSCRTPLQWDQPGEKQVFGPGILLEAEENIKMVRENLKIAQSRQRSYADTRRRELSFEVGDFVYLKVSPIRGVRRFGVKGKLAPRYIGPYQILARHGEVAYQLSLPENLSAVHDVFHVSQLKKCLRVPEEQLPVEGLVVQEDLTYVEKPVQILEVADRVTRRKTIRMCKVKWNHHSEEEATWEREDDLMAKYPELFASQP

SEQ ID NO: 277607 - protein, 72 aa, Zea mays
  Clone ID: MRT4577_184754C.1.pep
GLQHPDAAVPAADGIGHAARRACASTSPTLAMEPCSLYSPSFPVHAVSYSVLVVAASSLATFNSAAPSCHRF

SEQ ID NO: 277608 - protein, 129 aa, Zea mays
  Clone ID: MRT4577_184755C.1.pep
GRGPYCHTHNREVLLPVHASGHRRYSCLLRTSRARLLGTVANMRLGEQPPHVHLRNRHRRALGGAVVRAPWEPPSSCSSRYSSPLVHRGGASKLNPSDLGSFYRRLDLGAAEPDAALGQGFSKLYDDSM

SEQ ID NO: 277609 - protein, 349 aa, Zea mays
  unsure (1)..(349): unsure at all Xaa locations
  Clone ID: MRT4577_184756C.1.pep
MLMMQTQAVQAIGQTMAGIQQQQQPPPQPQMPQMPRDKRAEFMRGHPPMFAHSSDPMDAEDWLRTVERELHTAQCDDREKVLYGPRLLRGAAQSWWESYLATHANPDTITWEEFRGSFRQYHVPAGLMTMKKEEFLALKQGSSSYQLMNHTFPTFQHLIDRAIMTERKRKEMEDCKRKISGPQPGSSNRPRFSSNQPQQFRQNQRPPQQQQFQRQFPQHQNRQNNQXRRRSVPEAESAGTSSSXPANQQNSQAAPAQVGNRACFHCGEQGHWVMQCPKKAAQQQSGPNAPAKQSVSQPGAGNCSQPRYNHGRLNHLEAEAVQETPGMIVGMFLVDSHIAEVLFDTGAMH

SEQ ID NO: 277610 - protein, 1490 aa, Zea mays
  Clone ID: MRT4577_184757C.1.pep
MSIEQMFLMQTQAVQAIGQTLAAIQQQQQQQQQQAPPQPQMPQMPRDKRAEFMRGHPPTFAHSSDPMDAEDWLRTVERELHTAQCDDMEKVLYGPRLLRGAAQSWWESYLATHANPDTITWEEFRGSFRQYHVPAGLMTVKKEEFLALKQGSSSVSEYRDRFLQLSRYAPEDVNTDAKRQYRFLRGLVDPLQYQLMNHTFPTFQHLIDRAIMTERKRKEMEDRKRKISGPQPGSSSRPRFSGNQPQQFRQNQRPPQQRQQHQQFQRQYPQHQYQNRQSNQSGGQFQRQNQQAPRLPAPANQQNSQAAPAQVGNRACFHCGEQGHWVMQCPKKAAQQQSGPNAPAKQNVSQPGAGNRPQQRYNHGRLNHLEAEAVQETPGMIVGMFPVDSHIAEVLFDTGATHSFITASWVEAHNLPTTTMSTPIQIDSAGGRIRADSICLNISVEIRGIAFPANLIVMGTQGIDVILGMNWLDKYQAVISCDKRTIKLVSPLGKEVVTELVPPEPKRGSCYQMAVDSSEADPVESIKVVSEFPDVFPKDLPGMPPERKVEFAIELLPGTAPIFKRAYRISGPELVELKKQIDELSEKGYIRPSTSPWAAPVLFVEKKDGTKRMCIDYRALNEVTIKNKYPLPRIEDLFDQLRGASVFSKIDLRSGYHQLRIRPSDIPKTTFITKYGLYEFTVMSFGLTNAPAFFMNLMNSVFMDYLDKFVVVFIDDILIYSQSEEEHADHLRMVLQRLREHQLYAKLSKCEFWISEVLFLGHIINKEGLAVDPKKVADILNWKAPTDARGIKSFIGMAGYYRRFIEGFSKIAKPMTALLGNKVEFKWTQKCQEAFEALKEKLTTSPVLVLPDVHKPFSVYCDACYTGLGCVLMQEGRVVAYSSRQLKVHEKNYPIHDLELAAVVHALKTWRHYLYGQKCDVYTDHKSLKYIFTQTELNMRQRRWLELIKDYELEIHYHPGKANVVADALSRKSQVNLMVARPMPYELAKEFDRLSLGFLNNSRGVTVELEPTLEREIKEAQKNDEKISEIRRLIPDGRGKDFREDAEGVIWFKDRLCVPNVQSIRELILKEAHETAYSIHPGSEKMYQDLKKKFWWYGMKREIAEHVAKCDSCRRIKAEHQRPAGLLLPLQIPQWKWDEIGMDFIVGLPRTRAGYDSIWVVVDRLTKSAHFIPVKTSYNSAVLTELYMSRIVCLHGVPKKIVSDRGTQFTSHFWQQLHEALGTHLDFSSAYHPQTDGQTKRTNQILEDMLRACALQDQSGWDKRLPYAEFSYNNSYQASLKMSPFQALYGRSCRTPLQWDQPGEKQVFGPDILLEAEENIKMVRENLKIAQSRQRSYADTRRRELSFEVGDFVYLKVSPIRGVRRFGVKGKLAPRYIGPYQILSKRGEVAYQLSLPENLSAVHDVFHVSQLKKCLRVPEEQLPVEGLEVQEDLTYVEKPAQILEIADRVTRRKTIRMCKVRWNHHSEEEATWEREDDLVAKYPELFASQP

SEQ ID NO: 277611 - protein, 115 aa, Zea mays
  Clone ID: MRT4577_184758C.1.pep
MWTRLGPGIAAAAAGRAGLQLLRGRSASTRRRTSRRPTSGTRCSTTASPSTLCFNRTLSSNSHARSEYHRHNTYIWLKMMTGHFGGTVSMYYVANITRQVTDVYRTSSPSGHSVQ

SEQ ID NO: 277612 - protein, 1501 aa, Zea mays
  unsure (1)..(1501): unsure at all Xaa locations
  Clone ID: MRT4577_184759C.1.pep
MLICSVLLKNSILFSYAARIARSVLMCGCILQMSENRRRGGRRAQQERAAQQEEVPQQQHLPPPPPMSIEQMFLMQTQAVQAIGQTLAAIQQQQQQQAPPQPQMPQMPRDKRAEFMRGHPPTFAHSSDPMDAEDWLRTVERELHTAQCDDREKVLYGPRLLRGAAQSWWESYLATHAHPDTITWEEFRGSFRQYHVPAGLMTVKKEEFLALKQGPLSVSEYRDKFLQLSRYAPEDVNTDAKRQYRFLRGLVDPLQYQLMNHTFPTFQHLIDRAIMTERKRKEMEDRKRKISGPQPGSSSRPRFSGNQPQQFRQNQRPPQQHQQFQRQYPQNQYQNRQSNQSGGQFQRQNQQPPRLPAPANQQNSQAAPAQVGNRACFHCGEQGHWVMQCPKKAAQQQSGPNAPAKQNVPQPGAGNRSQPRYNHGRLNHLEAEAVQETPGMIVGMFPVDSHIAEVLFDTGATHSFITASWVEAHNLPITTMSTPIQIDSSGGRIRADSICLNISVKIRGIAFPANLIVMGTQGIDVILGMNWLDKYQAVISCDKRTIELVSPLGEEVVTELVPPEPKKGSCYQMAVDSSEADPIESIKVVSEFPDVFPKDLPGMPPERKVEFAIELLPGTAPIFKRAYRISGPELDELKKQIDELSEKGYIRPSTSPWAAPVLFVEKKDGTKRMCIDYRALNEVTIKNKYPLPRIEDLFDQLRGASVFSKIDLRSGYHQLRIRPSDIPKTAFISKYGLYEFTVMSFGLTNAPAFFMNLMNSVFMDYLDKFVVVFIDDILIYSQSEEEHADHLRMVLQRLREHRLYAKLSKCEFWISEVLFLGHIINKEGLSVDPKKVADILNWKAPTDARGIKSFIGMAGYYRRFIEGFSKIAKPMTALLGNKVEFKWTQRCQEAFEALKEKLTTTPVLVLPDVHKPFSVYCDACYTGLGCVLMQEGRVVAYSSRQLKVHEKNYPIHDLELAAVVHALKSWRHYLYGQKCDVYTDHKSLKYIFTQSELNMRQRRWLELIKDYELEIHYHPGKANVVADALSRKSQVNLMVARPMPYELAKEFDRLSLGFLNNSRGVTVELEPTLEREIKEAQKNDEKISEIRRLILEGKGKDFREDAEGVIWFKDRLCVPNVQPIRELILKEAHEIAYSIHPGSEKMYQDLKKKFWWYGMKREIAEHVARSXWKWDEIVXAHFIPVKTNYNSAVLAELYMSRIVCLHGVPKKIVSDRGTQFTSHFWQQLHEALGTHLNFSSAYHPQTDGQTERTNQIREDMLRACALQDQSGWDKRLPYAEFSYNNSYQASLKMSPFQALYGRSCRTPLQWDQPGEKQVFGPDILLEAEENIKMVRENLKIAQSRQRSYADTRRRELSFEVGDFVYLKVSPIRGVRRFGVKGKLAPRYIGPYQILARRGEVAYQLSLPENLSAVHNVFHVSQLKKCLRVPEEQLPVEGLEVQEDLTYVEKPVQILEIADRVTRRKTIRMCKVRWNHHSEEEATWEREDDLMAKYPELFASQP

SEQ ID NO: 277613 - protein, 83 aa, Zea mays
  Clone ID: MRT4577_18475C.1.pep
FKGGEGDLEKRLTLPLPIRLAFFLGHRRRIPGHTPPARGAKSPGGRYGKHASSLLALTPPKMAGRPPVVGSQHLFLFGPSFSF

SEQ ID NO: 277614 - protein, 75 aa, Zea mays
  Clone ID: MRT4577_184760C.1.pep
FFDKPSHGLHWTLIIYSFTYLRWHGLMVPSVPNTMLYPVNIWFMPHHTQLILILPPNKLSTCCLKLLLKTVANRK

SEQ ID NO: 277615 - protein, 90 aa, Zea mays
  unsure (1)..(90): unsure at all Xaa locations
  Clone ID: MRT4577_184762C.1.pep
VLARNVRSRLRPPLAASAGVSSAAAQAERAIRDGPRNEWSRPGVEAVYDSPVVEVVFDGAQVHRSVHRFREVQQXSCLSXKSGGCSGDCC

SEQ ID NO: 277616 - protein, 115 aa, Zea mays
  Clone ID: MRT4577_184763C.1.pep
KAVRAPSTPTRSSSWEGALTLSIMGKRIRGGGYMTSPSSVAPHGRVHRDRGGGHPAALHLPPARSERTPRLPGTARVRRTRRRGRWGSLAIDEELHRVFGARRPRRCLRLEGKSK

SEQ ID NO: 277617 - protein, 95 aa, Zea mays
  unsure (1)..(95): unsure at all Xaa locations
  Clone ID: MRT4577_184764C.1.pep
SVRHSLCWTAGVSXGSCGSLEQVDPPSRAGMPSACKLAEAKRCCCRTFALLAQGFVQRPKPETLLNFFTQTRKGGSFLVGSRERGFLVGRRGELF

SEQ ID NO: 277618 - protein, 62 aa, Zea mays
  Clone ID: MRT4577_184765C.1.pep
NWDRTFPFYLALQPNTTLKTLFGRKGTSSLQPFELPIMVQIRSEPACPLDLGIQDLKHRQPD

SEQ ID NO: 277619 - protein, 145 aa, Zea mays
  Clone ID: MRT4577_184766C.1.pep
MEHDMTATAGEEALEVEREELSDSESGCESIEISDLKRRMWKDQMLLSKLEGRAGGFVVGAGPSSSRPLAPPTAAGAGGDEETPEVRCRRKAMLRAQDGVLRHMLKMMEACNARGFVYGIIDEAGDPMSGFSDSLRGWWKDNVSF

SEQ ID NO: 277620 - protein, 252 aa, Zea mays
  Clone ID: MRT4577_184767C.1.pep
VLLPVKELVAICREEGVDKVFVDAAHAIGQVPIDVRDIGADFYTSNLHKWFFCPSAVAFLHIRKDDPVASQLHHPVVSSEYGNGLPMESAWIGVRDYSAQLVVPDAVDFMRRFEGGIEAISKRNHEKVIEMGTMLAEAWGTFLGSPPEMCGSMAMVGLPGCLGIESDDDAMRVRDMLRNQFKVEVPIFNNSTSVEEGQEMAKGDQVTGYVRISHQVYNVTEEYEVLRDAVGKLVLDGFSCTKLRPSEKVISN

SEQ ID NO: 277621 - protein, 51 aa, Zea mays
  Clone ID: MRT4577_184768C.1.pep
QLSRQHPSSKKQPSLGQCKTPVDSDKIFSAKDTQRDLLRVAADKLSNLLLM

SEQ ID NO: 277622 - protein, 47 aa, Zea mays
  Clone ID: MRT4577_184769C.1.pep
MCTHCCLALSVQDLHVAHSHCMIMYYMAPVTGSLVLYPSRMVPGGHV

SEQ ID NO: 277623 - protein, 56 aa, Zea mays
  Clone ID: MRT4577_18476C.1.pep
QINCTEAISNYMVHLLNSNPEMLGRRSCPPFPVQLLLLLLLLLLLALLLLLHLLPL

SEQ ID NO: 277624 - protein, 187 aa, Zea mays
  Clone ID: MRT4577_184770C.1.pep
AEWSATKKGSVVFYYGRSLMIDGSRGLFFSGAIHYPRSPPEMWPKLIERAKEGGLNTIETYIFWNAHEPEPGKYNFEGRFDLIKYLKMIQEHDMYAIVRIGPFIQAEWNHGGLPYWLREIDHIIFRANNDPYKKEMEKFVRFIVQKLKDAELFASHGGPIILTQIENEYGNIKNDHATDGDKYLEWA

SEQ ID NO: 277625 - protein, 58 aa, Zea mays
  unsure (1)..(58): unsure at all Xaa locations
  Clone ID: MRT4577_184771C.1.pep
DRLQLREIKHVRISMVAFSVFKVQTAPPGKGPVSNWAAYISQPMXHSTMFGSLGGSLC

SEQ ID NO: 277626 - protein, 121 aa, Zea mays
  unsure (1)..(121): unsure at all Xaa locations
  Clone ID: MRT4577_184772C.1.pep
FLSLEVLNAWGCIDGRAGYNNCARAALDTVLKVINRKAHGPWEADMPLXIEEEEVAPSQDRDXRPTILLTXLXHTDVYLWEDKAQTLVFAHIFGHEAGRIIKSVGEGHTDVCPPDHXLPVF

SEQ ID NO: 277627 - protein, 236 aa, Zea mays
  Clone ID: MRT4577_184773C.1.pep
PFPVPPPRDLFLLSPVLSPTTITVIIHKQKGRQAVSPSAGTSADGARRPRRVLSPVSFALRAPGFKKPPHAIQPAVRGSRSPPGCHRFFLSFRFSATATATISGAGLRVVRPDSFPGPCNHARAWAPLVAESFCSAQFPAGRRRRLRTAAHHGGRSTSCWWGTEALLSASVCLLREALESRLTNKGCSCPSMIHLKPPAEFQLLVAAFAPLVTACRPLPTALAHSQRTTLALGSWK

SEQ ID NO: 277628 - protein, 60 aa, Zea mays
  unsure (1)..(60): unsure at all Xaa locations
  Clone ID: MRT4577_184774C.1.pep
XTCSSTWFMPALSFSSXSFSLVLTHTLYIGTVSISYRKTDTYVTGPCLHPASDAHTDTYS

SEQ ID NO: 277629 - protein, 149 aa, Zea mays
  unsure (1)..(149): unsure at all Xaa locations
  Clone ID: MRT4577_184775C.1.pep
YRVQTRTRRELAPRGGAHVSTERRRRRSRTRGPTPPGRTASRPHRRRVPPGHRHRQPPPHPXDXRRRTSPPTPTLRRAPPRHPCRRCAPSWRAPRGVRSSPARRRSCPGRRRCLAPHRRGTWPGSCPCRCRPPLPAALPTRPPADATVS

SEQ ID NO: 277630 - protein, 87 aa, Zea mays
  Clone ID: MRT4577_184776C.1.pep
RRHQNNAYHINDCPDRVSMATLSEGRGSSRSHHMSSSRVQTVWHWPNMYSTVYEFVLRQGSVLVQFVREPMFMHGSVVQSPCLESSV

SEQ ID NO: 277631 - protein, 1489 aa, Zea mays
  Clone ID: MRT4577_184777C.1.pep
MSIEQMFLMQTQAVQAIGQTLAAIQQQQQQQQQAPPQPQMPQMPRDKRAEFMRGHPPTFAHSSDPMDAEDWLRTVERELHTAQCDDREKVLYGPRLLRGAAQSWWESYLATHAHPDAITWEEFRGSFRQYHVPAGLMTVKKEEFLALKQGPLSVSEYRDKFLQLSRYAPEDVNTDAKRQYRFLRGLVDPLQYQLMNHTFPTFQHLIDRAIMTERKRKEMEDRKRKISGPQPGSSNRPRFSSNQPQQFRQNQRPPQQRQQHQQFQRQYPQNQYQNRQSNQSGGQFQRQNQQVPRLPAPANQQNNQVAPAQVGNRACFHCGEQGHWVMQCPKKAAQQQSGPNAPAKQNVPQPGAGNRSQPRYNHGRLNHLEAEAVQETPGMIVGMFPVDSHIAEVLFDTGATHSFITASWVEAHNLPTTTMSTPIQIDSAGGRIRADSICLNISVKIRGIAFPANLIVMGTQGIDVILGMNWLDKYQAVISCDKRTIKLVSPLGKEVVTELVPPEPKKGSCYQMAVDSSEADPIESIKVVSEFPDVFPKDLPGMPPERKVEFAIELLPGTAPIFKRAYRISGPELDELKKQIDELSEKGYIRPSTSPWAAPVLFVEKKDGTKRMCIDYRALNEVTIKNKYPLPRIEDLFDQLRGASVFSKIDLRSGYHQLRIRPSDIPKTAFISKYGLYEFTVMSFGLTNAPAFFMNLMNSVFMDYLDKFVVVFIDDILIYSQSEEEHADHLRMVLQRLREHQLYAKLSKCEFWISEVLFLGHIINKEGLAVDPKKVADILNWKAPTDARGIKSFIGMAGYYRRFIEGFSKIAKPMTALLGNKVEFKWTQKCQEAFEALKEKLTTAPVLVLPDVHKPFSVYCDACYTGLGCVLMQEGRVVAYSSRQLKVHEKNYPIHDLELAAVVHALKTWRHYLYGQKCDVYTDHKSLKYIFTQSELNMRQQRWLELIKDYELEIHYHPGKANVVADALSRKSQVNLMVARPMPYELAKEFDRLSLGFLNNSRGVTVELEPTLEREIKEAQKNDEKISEIRRLILDGKGKDFREDAEGVIWFKDRLCVPNVQSIRELILKEAHETAYSIHPGSEKMYQDLKKKFWWYGMKREIAEHVAMCDSCRRIKAEHQRPAGLLQPLQIPQWKWDEIGMDFIVGLPRTRAGYDSIWVVVDRLTKSAHFIPVKTSYNSAVLAELYMSRIVCLHGVPKKIVSDRGTQFTSHFWQQLHEALGTHLNFSSAYHPQTDGQTERTNQILEDMLRACALQDQSGWDKRLPYAEFSYNNSYQASLKMSPFQALYGRSCRTPLQWDQPGEKQVFGPDILLEAEENIKMVRENLKIAQSRQRSYADTRRRELSFEVGDFVYLKVSPIRGVRRFGVKGKLAPRYIGPYQILARRGEVAYQLSLPENLSAVHNVFHVSQLKKCLRVPEEQLPVEGLEVQEDLTYVEKPAQILAIADRVTRRKTIRMCKVRWSHHSEEEATWEREDDLVAKYPELFASQP

SEQ ID NO: 277632 - protein, 359 aa, Zea mays
  unsure (1)..(359): unsure at all Xaa locations
  Clone ID: MRT4577_184778C.1.pep
QYHVHAGLMTVKKKEFLALKQGPLSVSEYRDRFLQLSRYAPEDVNTDAKRQYRFLRGLVDPLXYQLMNHTFPTFQHLIDRAIMTERKRKEMEDRKRKISGPQPGSSSRPRFSSNQPQQFRQNQRPPQQHQQRQQYQQFQRQYPQHQYQNRQSNQSGGGQFQKQNQQAPHLPAPANQQNSQAAPAQVGNRACFHCGEQGHWVMQCPKKAAQHQSGPNAPAKQNVSHGDDSSSHDTDFSANPEPEGWVARPITRDAATGDRERGIPRKGSFSAKEPGSEPPITDQGFEGWPSEGFNSRLRSRGPDTHYWSGVRRPAPRRAPWPPQATRAPRPLLIRGSKAGPRRVHSRLRHRARDDQGYVR

SEQ ID NO: 277633 - protein, 35 aa, Zea mays
  Clone ID: MRT4577_184779C.1.pep
PQGPGPGLSEERVYRQRFAITLVATFYRLLKLNSY

SEQ ID NO: 277634 - protein, 61 aa, Zea mays
  Clone ID: MRT4577_18477C.1.pep
PQSLGAGIYLFILLGGEGRNKLGLRNRKPNFRFCSYWVRATQLAKNLVQSQIFFCDPKEGA

SEQ ID NO: 277635 - protein, 1855 aa, Zea mays
  Clone ID: MRT4577_184780C.1.pep
MARLRHTARKSVIPFLPSRLAERPLRRPVAGQSSHLERLHHRLREEQERRRQEQRSSSLSLHQEIESVRSCSPVLPLEPPPAPPLGAPASGVAAGGDPDNGGGDDSSSHDTDFSANPEPEGWVARPITRDAARGCHFHDALDTLLRRAFDRHTWSVEYRCVVYQHSRGVYPDRWEATCLVRCPENSLQGAEACSEHYSISERDSAEAAMQDAARRALSHYCSVFGGAADGLDLKYYPRRSSGSTGGVIVSPVGEGNPRLSSTVNLAAVLNTELDHALDELSRARAEIALLRAERAERRYLDGGSPAPVGTQHPVWVSPAFWFTYYVNKMSENRRRGGRRAQQERAAPQDEVPQQQHLPPPPPMSIEQMFLMQTQAVQAIGQTLAAIQQQQQQQQQQAPPQPQMPQMPRDKRAEFMRGHPPTFAHSSDPMDAEDWLRTVERELHTAQCDDREKVLYGPRLLRGAAQSWWESYLATHANPDTITWEEFRGSFRQYHVPAGLMTVKKEEFLALKQGSSSVSEYRDRFLQLSRYAPEDVNTDAKRQYRFLRGLVDPLQYQLMNHTFPTFQHLIDRAIMTERKRKEMEDRKRKISGPQSGSSSRPRFSGNQPQQFRQNQRPPQQHQQRQQYQQFQRQYPQNQYQNRQSNQSGGQFQKQNQQAPRLPAPANQQNSQAAPAQVGNRACFHCGEQGHWVMQCPKKAAQQQSGPNAPAKQNVSQPGAGNRSQQRYNHGRLNHLEAEAVQETPDMTVGMFPVDSHIAEVLFDTGATHSFITASWVEAHNLPTTTMSTPIQIDSAGGRIRADSICLNISVKIRGIAFPANLIVMGTQGIDVILGMNWLDKYQAVISCDKRTIKLVSPLGEEVVTELVPPEPKKGSCYQMTVDSSEADPIESIKVVSEFPDVFPKDLPGMPPERKVEFAIELLPGTAPISKRAYRISGPELVELKKQIDELSEKGYIRPSTSPWAAPVLFVEKKDGTKRMCIDYRALNEVTIKNKYPLPRIEDLFDQLRGASVFSKIDLRSGYHQLRIRPSDIPKTAFITKYGLYEFTVMSFGLTNAPAFFMNLMNSVFMDYLDKFVVVFIDDILVYSQSEEEHADHLRMVLQRLREHQLYAKLSKCEFWISEVLFLGHIINKEGLAVDPKKVADILNWKAPTDARGIKSFIGMAGYYRRFIEGFSKIAKPMTALLGNKVEFKWTQKCQEAFEALKEKLTTAPVLVLPDVHKPFSVYCDACYTGLGCVLMQEGRVVAYSSRQLKVHEKNYPIHDLELAAVVHALKTWRHYLYGQKCDVYTDHKSLKYIFTQSELNMRQRRWLELIKDYELEIHYHPGKANVVADALSRKSQVNLMVARPMPYELAKEFDRLSLGFLNNSRGVTVELEPTLEREIKEAQKNDEKISEIRRLILDGRGKDFREDAEGVVWFKDRLCVPNVQSIRELILKEAHETAYSIHPGSEKMYQDLKKKFWWYGMKREIAEHVAMCDSCRRIKAEHQRPAGLLQPLQIPQWKWDEIGMDFIVGLPRTRAGYDSIWVVVDRLTKSAHFIPVKTNYNSAVLAELYMSRIVCLHGVPKKIVSDRGTQFTSHFWQQLHEALGTHLNFSSAYHPQTDGQTERTNQILEDMLRACALQDQSGWDKRLPYAEFSYNNSYQASLKMSPFQALYGRSCRTPLQWDQPGEKQVFGPDILLEAEENIKMVRENLKIAQSRQRSYADTRRRELSFEVGDFVYLKVSPIRGVRRFGVKGKLAPRYIGPYQILARRGEVAYQLSLPENLSAVHDVFHVSQLKKCLRVPEEQLPVEGLEVQEDLTYVEKPAQILEIADRVTRRKTVRMCKVRWSHHSEEEATWEREDDLMAKYPELFASQP

SEQ ID NO: 277636 - protein, 135 aa, Zea mays
  unsure (1)..(135): unsure at all Xaa locations
  Clone ID: MRT4577_184781C.1.pep
GSADNKLRITLFLPKAGTVGCGDNTVTNNLYTISEKGIKGRLNRLPXSSCDGDMAMATAKNGXPDLRKKAMPXAAIVRHRKPRRRKDGVXMYFEDNAGVIANPNGEKKCSAITGPIGKECTDLWPMIASAVNAID

SEQ ID NO: 277637 - protein, 140 aa, Zea mays
  Clone ID: MRT4577_184782C.1.pep
LFCRPRLGRHATPPREPPSCPLRRCRLASHIQQQPPTLQYPHRQRFLRRRTVGRGRDGDPPRRRAHREYRQGHHPLPQVDRHPEFKSRCLFVVRTNGDWEDFSYHKCLRAYLQKKYPSYSDKFLKKHLVNKSSNLFRVQK

SEQ ID NO: 277638 - protein, 119 aa, Zea mays
  Clone ID: MRT4577_184783C.1.pep
IRTIPNSTVSSIPHTHARTTTLKKRRRRSIGQVNNKPTHHFYERSVLCSLYHHAGEVAVLQGSSERNWPSARADPLLGRQGAEHGGEVAGDGEEGAARRRRRRCRRRSGRREPALGGRW

SEQ ID NO: 277639 - protein, 141 aa, Zea mays
  unsure (1)..(141): unsure at all Xaa locations
  Clone ID: MRT4577_184784C.1.pep
CYVVLMKKMYQYYVSTTPSASSVAPSSTSAVDMIKSSIKEELDSYIFDGQGHDDSIDTSDLXKYLADPILKVGKSNQHTFDILAWWKAHKEEYPLLGXLARDVLAMQVSTESAFSAGGRVLDPFRTRLDPTMVEALVCGSG

SEQ ID NO: 277640 - protein, 85 aa, Zea mays
  Clone ID: MRT4577_184785C.1.pep
NKISPIPLYNNPKIFLGTPFKNSHSLKIKFKKLFQPGGPHFLTTRLVFPRQIFGPPTKNPGGQNLKFPEGKLSTIKRGVKFPNRS

SEQ ID NO: 277641 - protein, 46 aa, Zea mays
  Clone ID: MRT4577_184786C.1.pep
KSRKIDKINPRHLRQRIRHPTSSKRPASGMFLSLPVFYTVCIKPYI

SEQ ID NO: 277642 - protein, 58 aa, Zea mays
  Clone ID: MRT4577_184787C.1.pep
SGVGSQPWSKMIAASDTATGVSSAQDELVSTLYKMKRISVNNVSAAVDLVWPGQSDVS

SEQ ID NO: 277643 - protein, 81 aa, Zea mays
  unsure (1)..(81): unsure at all Xaa locations
  Clone ID: MRT4577_184788C.1.pep
HREHGLFGNIPFRAKVIYTGISLFIXLVCSQVPLYGTLYTTVAEPSFXLRVIPCLNXGTVMEIGITPNGTSGMXMQLLVGS

SEQ ID NO: 277644 - protein, 139 aa, Zea mays
  unsure (1)..(139): unsure at all Xaa locations
  Clone ID: MRT4577_184789C.1.pep
NFKPPPNXFQRGPPPPXGKMPKPHFPPLTPGPKFFPPENPFFFPFPEGGPRVFPPFIFPPKGXGPPFKPPFRGPKKKNXGGNPPPGGPRGHFTKNPPAKGFPYWGVPPPGXGPPFPKRGPXKNPSLAGKKPPPPLLGGE

SEQ ID NO: 277645 - protein, 64 aa, Zea mays
  Clone ID: MRT4577_18478C.1.pep
FPSRATLTINLNINRFSTFPSTPTSGTGIYPARRCLQSTNYASFAFKTSIIFPLSPILLHLLVH

SEQ ID NO: 277646 - protein, 219 aa, Zea mays
  unsure (1)..(219): unsure at all Xaa locations
  Clone ID: MRT4577_184790C.1.pep
MEQEPHRPMELPPGFRFHPTDEELITHYLARKAADARFAALAVAEADLNKCEPWDLPSLARMGEKEWYFFCLKDRKYPTGLRTNRATEAGYWKATGKDRDVFRGKALVGSKKTLVFYTGRAPRGEKSGWVMHEYRLHAKLHGHGHGXRSRRRRPQAGRRVQERVXLCRVFKKSLAVGGAAAAPAAGKRGGTETSSNSKTGDVAAIAHLPPLMDVSGSGA

SEQ ID NO: 277647 - protein, 402 aa, Zea mays
  unsure (1)..(402): unsure at all Xaa locations
  Clone ID: MRT4577_184791C.1.pep
MEQEPHRPMELPPGFRFHPTDEELITHYLARKAADARFAALAVAEADLNKCEPWDLPXSNARAGIATRSCFCTDRVMHGFIKEEEEGSXICDLVAPALARMGEKEWYFFCLKDRKYPTGLRTNRATEAGYWKATGKDRDVFRGKALVGSKKTLVFYTGRAPRGEKSGWVMHEYRLHAKLHGHGHGXRSRRRRPQGRRVQERVXLCRVFKKSLVVGGAAAAAAPTAGKRGGTETSSNSKTGDVAAIAHLPPLMDVSGSGSGAGPPXAAAHVTCFSDALEGQFLDQTTTTPPPEAATAATDDDGHLGALVAASSSPFQLPGFAHYYYGGGPPHLHQHHGAASLVQLLEGSVPPCNKGGERERERLSASQDTGLTSDVNPEISSSSGQRFDHDHDHDHHLCCWGY

SEQ ID NO: 277648 - protein, 222 aa, Zea mays
  unsure (1)..(222): unsure at all Xaa locations
  Clone ID: MRT4577_184792C.1.pep
MEQEPHRPMELPPGFRFHPTDEELITHYLARKAADARFAALAVAEADLNKCEPWDLPSLARMGEKEWYFFCLKDRKYPTGLRTNRATEAGYWKATGKDRDVFRGKALVGSKKTLVFYTGRAPRGEKSGWVMHEYRLHAKLHGHGHGHGQGXRRRRPQGRRVQERVXLCRVFKKSLVVGGAAAAAAPTAGKRGGTETSSNYKTGDVAAIAHLPPLMDVSGSGA

SEQ ID NO: 277649 - protein, 78 aa, Zea mays
  Clone ID: MRT4577_184793C.1.pep
AYVLRQFYSLVPIRRHSILRGVILRCRFADTLDLNSVSMEFCESAYSKMLCQLPMIPEATIRAMSSSIQFSLDVTRFM

SEQ ID NO: 277650 - protein, 65 aa, Zea mays
  Clone ID: MRT4577_184794C.1.pep
PRVRKKKIYRKYIEKITERKKTRHDNKLTYTTNKTSYDIIYNILRMLKLSYSIIYASASNLSTQH

SEQ ID NO: 277651 - protein, 111 aa, Zea mays
  unsure (1)..(111): unsure at all Xaa locations
  Clone ID: MRT4577_184795C.1.pep
GPVVYILFSFFVFFFLLFLFVFATPNPXXSPTVSALPPPPPXPPPPPPPSPPXPPPPSPPPPSPPSPPPPPXPSPPPLPPLTPPPPPSLXLFLFPPSPXFFFPSPPPPPPP

SEQ ID NO: 277652 - protein, 88 aa, Zea mays
  Clone ID: MRT4577_184796C.1.pep
TNIIMPTHKEIRIGNSGVHRFWDGSRSAHDAGAGAVTRDGDGVGVVVGLAAAELGAGVGDDKCAEHISFGMMPRQGRGMRWRGWRAWR

SEQ ID NO: 277653 - protein, 271 aa, Zea mays
  unsure (1)..(271): unsure at all Xaa locations
  Clone ID: MRT4577_184797C.1.pep
PAGDSRASTKYATSSDEDNSSDDEDNLLALFANLNMXQKEKLNELIGAIHEKDELLDSQEDFLIKENKKHVKVKNAYAQEVEKCEXLTSELSTCHDVISNLRNENAKLIAKVDRLDVCDDLIVSLRHDNASLITKIDKLIASLSSLKIENKKLIDKAKNLNVCNVSISNLRNENTILHAKIVELNTCKPSTSTVEHVTICTRCRDVNIDAIHDHIAMIKQQNDHIAKLDAKIAEHELENEKFKFARSMCWGPSASEGPQKHDLTMSLEYNV

SEQ ID NO: 277654 - protein, 54 aa, Zea mays
  unsure (1)..(54): unsure at all Xaa locations
  Clone ID: MRT4577_184798C.1.pep
PTRPLSQIQVIKEAVELPLTFPELYXYIGIRPSKGVILXGEPGTGKPLLAKNKF

SEQ ID NO: 277655 - protein, 55 aa, Zea mays
  Clone ID: MRT4577_184799C.1.pep
AMHGFQKRSLGDLKTSLCTSVHRGAQLWLWELLLAKAQEWASNLERLGLPANQFG

SEQ ID NO: 277656 - protein, 89 aa, Zea mays
  Clone ID: MRT4577_18479C.1.pep
AGVHGSCRRCRPRGTRSGELSLGCCFVAAAGGVVLGRPSACGCCRPGGRLRGRLGRPRSVVRRAPRGARGRVGNEARERGRVGGRVGRA

SEQ ID NO: 277657 - protein, 79 aa, Zea mays
  unsure (1)..(79): unsure at all Xaa locations
  Clone ID: MRT4577_1847C.1.pep
GPTXARENSARPHAPIFFPAAIGPLIRELFKILADTPSENPAMIKFSRKNPRPTCNGPYPYTPFILSADTEEPPEHLCP

SEQ ID NO: 277658 - protein, 78 aa, Zea mays
  Clone ID: MRT4577_184800C.1.pep
FRSTHRVRPRVRLRVVSSKLLMEVTANVSSRACRPLSVRVSAETDGADNSTAEEPMSPTGRILEEMGVCIVIVMALST

SEQ ID NO: 277659 - protein, 82 aa, Zea mays
  Clone ID: MRT4577_184801C.1.pep
GFGREKKKKKKKKKKKKKKKKKKKKKKKKKKKKKKKKKKNRKKKKRGPWAPGFFPFKGGSRAPWAKPGKSLILGENGLPLKF

SEQ ID NO: 277660 - protein, 72 aa, Zea mays
  Clone ID: MRT4577_184802C.1.pep
MAGALLLLLVPTVGLLAALAFLTRPRALIALKDSHDFMTGGSSDIRLAMASDDAREGARVSIQARNLGRLKE

SEQ ID NO: 277661 - protein, 84 aa, Zea mays
  Clone ID: MRT4577_184803C.1.pep
TVQSSLFLFTNYPLCQSSLKIGFPQRFPFVSKSAVLGDTTRVRPHRYKRTLLVMERSVEGWRFDYVHPPLYMLYMAVLMSLNGG

SEQ ID NO: 277662 - protein, 97 aa, Zea mays
  unsure (1)..(97): unsure at all Xaa locations
  Clone ID: MRT4577_184804C.1.pep
RDPAASIYRRLRSAPNXTTTTSRFLQIDTGSNAGLPNPAIRYEPAQHEAIGFPDKSKHSSSQRALGEAMSQGGRPSCDLEDEMRLSSGCERVQQWFV

SEQ ID NO: 277663 - protein, 75 aa, Zea mays
  Clone ID: MRT4577_184805C.1.pep
FFFFFFFFFFFFTVKNTLCPSHKATFVAGCKNFATCFIYNKGKLRPGLNPPPVTNSKATNIFKRPTFFGSLKSLS

SEQ ID NO: 277664 - protein, 78 aa, Zea mays
  Clone ID: MRT4577_184806C.1.pep
PVAQRRSMSINTQSVKRGPDSCAIQLKLIARYGLYGLAPIVKRDPVCLRAWCGWGPCSLCSLASGVAPLGLLRSSARL

SEQ ID NO: 277665 - protein, 50 aa, Zea mays
  Clone ID: MRT4577_184807C.1.pep
KYRIAGTHWALPSLITSQIGSEPIGPLPSLIHLPNRIGANYAIFCLRCAI

SEQ ID NO: 277666 - protein, 113 aa, Zea mays
  Clone ID: MRT4577_184808C.1.pep
HGEGQEGELNNSQPCADTKPRRVIDHKPSAGAGTHSRHTAGSTASYRARPLPLTPPSGGQVRTGTQGRSPRLPPLADWRRAVPQCMCNLCCLMLSGRRQPCRLTVGSGPPGSR

SEQ ID NO: 277667 - protein, 68 aa, Zea mays
  Clone ID: MRT4577_184809C.1.pep
PRPKKFGPPHAQFPLLPRGLFFGSRGIKFYSQLCSPELFVNVDKIAGLCNLGLMFCQNGFYFSPPFGV

SEQ ID NO: 277668 - protein, 109 aa, Zea mays
  Clone ID: MRT4577_18480C.1.pep
MTATTTTAAGGGKVQPRGLPAALSLLLLLVLAAGLGGGAEAQQTCAGQLRGLAPCLRYSVPPLPGQVPPAPGPECCSALGGVSRDCACGTFSIINSLPAKCGLPPVSCQ

SEQ ID NO: 277669 - protein, 85 aa, Zea mays
  Clone ID: MRT4577_184810C.1.pep
SSLISCDGSARRCRMVASRGVLVVAILLLMLLPGGVEFSWSLHCVPCSASLFYTPIIYLVRVDARQLQPASANPECACAQASAHA

SEQ ID NO: 277670 - protein, 193 aa, Zea mays
  unsure (1)..(193): unsure at all Xaa locations
  Clone ID: MRT4577_184811C.1.pep
MAAPPAIPRRGLFIGGGWREPTLGRRIPVINPATEDTIGDIPAATAEDVELAVAAARSAFLLDGGSRWARASGATRAKYLNAIATKIKEEISYLALLETVDSGKPKDEAVADMDDVAACFEFYAGLAEALDGKQHAPISLPMEEFKTYVLKEPIGVVGLITPWNYPLLVATWKXAPALAAGCTAVLKPSELAS

SEQ ID NO: 277671 - protein, 63 aa, Zea mays
  Clone ID: MRT4577_184812C.1.pep
SVRDAWQPHEKVVVVGSLLAYTPQCGRCPQRGRRVSSPARQVFWPSWLGIRLAAFSVFGLLTD

SEQ ID NO: 277672 - protein, 162 aa, Zea mays
  Clone ID: MRT4577_184813C.1.pep
NSARGLVPRASSSPLPHPDDPASNPIPLPPSGPAGLASSSSSSLLSASGRRLPRLPPLIGPRNRVPLSASCRLSRRYLSPKTPGSGRSLRPSRGDRGAVDGGEDDAVAAAAGGAQVPRAAVGAACGGAPASFTFAFAVRLARDSGLAGARGAGRRAAQGRRR

SEQ ID NO: 277673 - protein, 46 aa, Zea mays
  Clone ID: MRT4577_184814C.1.pep
NKTLRAKKKKKKKKKKKKKKKKKKKKKKKKKKKKIKKKKKKKNKKN

SEQ ID NO: 277674 - protein, 169 aa, Zea mays
  unsure (1)..(169): unsure at all Xaa locations
  Clone ID: MRT4577_184815C.1.pep
TPPGSGKANAGRTEQTGAAGRTKRSGYGDRNGVXTADAEGPANTQASAQCPSHHDASTNTINSATAVDXEEGRATQRRIALAAKTYXNAIESDQDXDPDAYQKXEATAPRETRKRSDXPIQRSYKDAXLEEARKKDAAANQLKGTSNDAYDNGPNATEDGAKMRAQTKE

SEQ ID NO: 277675 - protein, 144 aa, Zea mays
  unsure (1)..(144): unsure at all Xaa locations
  Clone ID: MRT4577_184816C.1.pep
MASQGVSHALLLDCEMVWHNVASNVVSNVQARADDGGGDSGGRINLNLNLTLILLNECMKELVEFMCECKSKLMNTLIVGGGIGTAIXNMTVDIKVEPGSVGKSEFNDKFIYNLVANVEVNDEHDYVNEIFNGVLNDVEAYLDA

SEQ ID NO: 277676 - protein, 625 aa, Zea mays
  unsure (1)..(625): unsure at all Xaa locations
  Clone ID: MRT4577_184817C.1.pep
SRVRPLPQPLLGGASPAPARAASSFLHPLLHTRHRVSTAPAAASSFVPASHSSHANDAMLLRRAADVADRSAGLTSPHPNFGCVIARPQLNTDSADSWVVGEGFLYAQGTPCAELLASQEAGEHARGGTAYLNLEPGDCFGDNTAVGSLVQAGITRVVVGLRHPLKHLRGKAIQALRNEGIQVDVVGEDLQSKLFKEALRSCLTVNAPLLYRAAFHVPFSVLKYAMTADGKIAASSGHASWISGKASRGRVFELRGRSDAVIVGGNTVRFDDPRLTARHVKGHVPVRIVMSQSLNLPEEANLWNLNDAYTIVATQRGARRDFQRKLAMKGVEVVEFDMLNPRAVMSYCYDRGYLAVLWECGGTLAASAISASVIHKVYAFWAPKIIGGLNAPTPVGELGMSQMTQAINLIDVSYEQIDRDMLMSGFIEPIPDLSPVIPSVEEIPSIDPEVSPYETNIISFYKTWDIFGAFSNFSPHSIHMPXKWRLFHMANSGTLXQAHKFVGVDNPQARDIVQEIKLAKSPEEAARIGRTRQKGFPELVRTDWESTKIDVMYRAIKCKFSTYPHLTNMLLSTAGSVLVEASPHDLFWGGGREGEGLNYLGRLLMQLRSEILGTVPASAEVGEAD

SEQ ID NO: 277677 - protein, 156 aa, Zea mays
  Clone ID: MRT4577_184818C.1.pep
MQIFVKTLSSTRTITLEVEPSDTVADVKAKVYESEGVPPAEQRLIFAGKQLRDGHTLADYNIPKETMLSLCCRLLGGGPKKRNRKTFTTPKKGTHEHKNPGLDAVLGRYRIDEATGKVERLRMQCPNPECGPGVLMAAHADRHVCGRCGLTFVIEK

SEQ ID NO: 277678 - protein, 206 aa, Zea mays
  unsure (1)..(206): unsure at all Xaa locations
  Clone ID: MRT4577_184819C.1.pep
GGAAXGCGGADAEGQHHSLHELQDTTLGSLLSALMQHCDPPQRRFPLEKGVPPPWWPAGAEPWWQQAAVPGDLGPPPYKKPHDLKKAWKVAVLTAVIKHMSPDVDKARRLVRQSKCLQDKMTAREIVAWLAVLRQEEELYVQLHPGARPAPSSAAMIPFCASSGEYDVDGEDDAGRNQQPTSNPGAATFLELSSSFMDDAGHNKFV

SEQ ID NO: 277679 - protein, 96 aa, Zea mays
  Clone ID: MRT4577_18481C.1.pep
PKIKGSNFIKFYFFFPENPGPAPCGRPPPPRGPFKSTPGHPPFQLAPGVAKTCQTPPRKTWGLALFIGYFTGKGAIPSWGPCPKSQGSKLSRGLVL

SEQ ID NO: 277680 - protein, 71 aa, Zea mays
  Clone ID: MRT4577_184820C.1.pep
ILAPPHYTICTTSTSAAFDVLVMGVAITKVPQILFLCCQPYMMNFLFHPKYSRTRSRGCSRQSRICKLLAK

SEQ ID NO: 277681 - protein, 63 aa, Zea mays
  Clone ID: MRT4577_184821C.1.pep
GDPMGFFNFFRDFIHSYPLLHIVSANVTHNIIQFAAPNKILVTHTEALRKYAHPPYIFWGGNN

SEQ ID NO: 277682 - protein, 458 aa, Zea mays
  Clone ID: MRT4577_184822C.1.pep
MAAAPPRPRVMVLPFPAQGHVMPLMELSHRLVDHGFEVDFVNTDFNHARIVTALAAGGGETRAAAHAGIHLVSFPDGMGPDGDRADIVRLAQGLPAAMLGRLEELARAQRARWVVADVSMNWVLDLAGTVGVRVALFSTYSATVFALRTLIPKMIEDGIIDESADVRRNEKIKLSPNMPVIDAADLPWSKFDGSPEIRRIMVKGIVKSNPTLARADTIVCNTFHAIESEVLALLPTAALAVGPLEAPRSTSASQLWPEDRACLVWLDAQPPGSVVYVAFGSFTVFDTARLQELADGLALTGRPFLWVVRPNFANGVDQGWLDKFRCRVGDTGLVVGWAPQQRVLSHPAVACFISHCGWNSTMEGVRHGVPFLCWPYFADQFLNQKYICDVWGTGLRVRADERGVFTKEEIRDKVNQLLADDTIRARALSLKRAACESITDGGSSHQDLLKLVNLLKEQ

SEQ ID NO: 277683 - protein, 237 aa, Zea mays
  unsure (1)..(237): unsure at all Xaa locations
  Clone ID: MRT4577_184823C.1.pep
VHLQLSGFVNTXXFNHARIVSALAAGGGETRAAAHAGIHLVSFPDGMGPDGDRADIVRLAQGLPAAMLGRLEELARAQRTRWVVADVSMNWVLDLAGTVGVRVALFSTYSATVFALRTLIPKMIEDGIIDESXERTEHHKHPCRLQTCRSEFMLDTLFPCAADVRRNEKIKLSPNMPVIDAADLPWSKFDGSPEIRRIMVKGIVKSNPTLARADTIVCNTFHAIESEVLALLPRPRW

SEQ ID NO: 277684 - protein, 82 aa, Zea mays
  Clone ID: MRT4577_184824C.1.pep
GPFFFFFLPLTIDAMLITFHWTKLLHTSPDASSVHSVPRIPHGKNLAHILHTRTKVKYVAGSELALIISSRRNRRVPPTRPA

SEQ ID NO: 277685 - protein, 83 aa, Zea mays
  Clone ID: MRT4577_184825C.1.pep
ACVRTRATEGLPLAGNSRPPCEGKMTRTRGDLLVTSAWQRRARKHASLDAFTRTEGMEGGLSIARMCGKGPREREAVLNTTYY

SEQ ID NO: 277686 - protein, 252 aa, Zea mays
  unsure (1)..(252): unsure at all Xaa locations
  Clone ID: MRT4577_184826C.1.pep
LGPRGGGKSSAQRVAIGISFGNSYSSIAFTTGEGKAEVIANEDGDRQIPTALSYVEGEELHGGQAKPQIVRNAKNTVAYFRDFLGQDYKSIDPSPCHQSAHPIEHENSIAFSIRDGTEEQENTISIVDITTRHLKRLRTSASDYLGKDVNAAVITVPTNFSDAQKEALKKASTSAGMEVLQFISEPTAAVLAYDARPGAQLADKVVVVADLGGTRADVAVVASRGGIYTILATXHDYDVSGFQLDQVLMDTL

SEQ ID NO: 277687 - protein, 93 aa, Zea mays
  Clone ID: MRT4577_184827C.1.pep
LSIDNVHMKIVADKSEFIVIIITNHVDSGEKKTQTVGCDLRRNPVACHFIIWAGFDICGAPSPNILHHRVCWLQLSWWWHRRHHRVGWLQFSS

SEQ ID NO: 277688 - protein, 53 aa, Zea mays
  Clone ID: MRT4577_184828C.1.pep
SSGRTARDEQVIACLRPTGEGRQEGGGGDYLTSVISLMLTNEDQRNRETWIRT

SEQ ID NO: 277689 - protein, 232 aa, Zea mays
  Clone ID: MRT4577_184829C.1.pep
SSVDPVRPSPGTWPLEITGPPLLHLRTKMEEEDSMLKLNSCLSNGIKPGGRNEASMASPGRPSARNVTGKAAETGSSSGRRSSTPSTDENMHKPNRNKLALHLFHFLSPSPRQRRTNGTRRRRSSRSGKDSSLLGKLSPDLPPAVNFHHGSSPRERTCRQALLEDAWTKLQLDITSNAIETNLDSVLNLILHLLDGGETWLPSPCSLTTAAPPEEEGQGAGRHFSCATLNGG

SEQ ID NO: 277690 - protein, 95 aa, Zea mays
  Clone ID: MRT4577_18482C.1.pep
TPKGDWDPRGRPEYYYYYDRSPLTSLPSQSDSRPTIDYIFPTDNGKTPKPEPPTDVKMHSEREENMSLHHEIHLAILRHDADEMEGEPNRRRGET

SEQ ID NO: 277691 - protein, 35 aa, Zea mays
  Clone ID: MRT4577_184830C.1.pep
YGRLGLSETVKSSSRNGLNCLGKQMGSWHRFSAQF

SEQ ID NO: 277692 - protein, 177 aa, Zea mays
  unsure (1)..(177): unsure at all Xaa locations
  Clone ID: MRT4577_184831C.1.pep
MAAQEELDFRPLDEGSLLAYINGTPAXLASRLGGGGRLHSIETKEAGDGYLNFVYIAPAEAGAIAVQPALPYXRCAPHSXWPMTRERAYFDVSTLQQHGRLCAEHTPEEYHFERNLPLMGMLYIEPPHIILHKELVAGVEDPLLDDHMYDYMRNTLFFKYLLYDNTSHHNRGDAKYS

SEQ ID NO: 277693 - protein, 53 aa, Zea mays
  Clone ID: MRT4577_184832C.1.pep
FGVFFFFFFVFTHHTHACIPRHSQALHTCLHTLTQSRKMRPVVTGKGHNHMKT

SEQ ID NO: 277694 - protein, 58 aa, Zea mays
  Clone ID: MRT4577_184833C.1.pep
IQFPCFNIKKKKKKKKKKKKKKKKKKKKDPKKKKKKKKKKKKKKKKGPMGPKMHIFVP

SEQ ID NO: 277695 - protein, 109 aa, Zea mays
  Clone ID: MRT4577_184834C.1.pep
RDPRGPIKTRLASCTTHSQMAGLRIKFVPVPPMGGATAPAAVGDLAAAVAATVVVGAAAASVIPIDRSACSIRLLWFYPLLLYWFMLGPPPPPWVMVTPFPVVLCTYPM

SEQ ID NO: 277696 - protein, 38 aa, Zea mays
  Clone ID: MRT4577_184835C.1.pep
HDPRSGHPAWHMNIYTHYWASVDVIRLGSSCDMSLCQT

SEQ ID NO: 277697 - protein, 105 aa, Zea mays
  Clone ID: MRT4577_184836C.1.pep
ALNSACWSLKKNSFPLRRPSSGSAPTGGRAKTGSRLRSPQSPPSSAPRTRRLLPEPSKLETSKFKAAAAPGNDYNLAVVKGGAPPPGYGAPPLKPRKPQTGPSPC

SEQ ID NO: 277698 - protein, 56 aa, Zea mays
  unsure (1)..(56): unsure at all Xaa locations
  Clone ID: MRT4577_184837C.1.pep
MAGGFRVLHLVRPFLAFLPEVQSAHRGIXLGXKXIYTXISLFIGREXSQXPLYGID

SEQ ID NO: 277699 - protein, 75 aa, Zea mays
  unsure (1)..(75): unsure at all Xaa locations
  Clone ID: MRT4577_184838C.1.pep
PPXKKKRGAPPPQXXHXXKTFPCPPXHPWKRVLSVHWDGRXRWHQGVREDLXASQLGSHGGMVQNXQGQKGASSP

SEQ ID NO: 277700 - protein, 172 aa, Zea mays
  Clone ID: MRT4577_184839C.1.pep
GFFEMQPPSSVPAATSPTPAVAGALPTDSPAGNPRPRHQTTDQPFTYRCCPVPARFAGAPVSPGFHPSVGWPTLPRPCLKPAAGRQAATAPHDKKVQFAVPSLPAKQLRRPHRTAKQLRRPHRLASAAQGAFTPRRIDGTSCQPQLSSQLRIKEQLCEIESIEDDVAAGWTT

SEQ ID NO: 277701 - protein, 143 aa, Zea mays
  unsure (1)..(143): unsure at all Xaa locations
  Clone ID: MRT4577_18483C.1.pep
WAPFFDQKFARPFWIFFWPAPEEPREVFAKEPKENLAFLXAHLRGQRFFGGEALGFFDIPPFALAPWVGVIKKPPRVVLFAGEGFPPPPEWAHPYVNNPPFKQCFRTPPKLFIFFSPRKKISFFQTRAPPPTFFGPPFSPPSQ

SEQ ID NO: 277702 - protein, 55 aa, Zea mays
  Clone ID: MRT4577_184840C.1.pep
SKVLKSRCQIHIQEVFFETGGSVVDRQIFKFPALNNIVQPRIRARAAWSQAFIVS

SEQ ID NO: 277703 - protein, 135 aa, Zea mays
  unsure (1)..(135): unsure at all Xaa locations
  Clone ID: MRT4577_184841C.1.pep
GTLADSAPTSVLEKLDDXVFGSGYTTERKDKPFGTSTNWRNMKSPDASAXSAQRRDGTTKTGRRMMKRPDLLCQSKQRLEVWRGRVNNPANWWDNRADKPTLKHPDFKNKRFRASSMDRNQITSMGGRCTAVLEL

SEQ ID NO: 277704 - protein, 60 aa, Zea mays
  Clone ID: MRT4577_184842C.1.pep
ESCGECCTHYISWRRLDLRNRGPTRLRPSLLQPLSLLKLLQMVEYGNPIFVNNLLLTLRF

SEQ ID NO: 277705 - protein, 84 aa, Zea mays
  Clone ID: MRT4577_184843C.1.pep
FWGTQGPRQTRGGPPLAQFFLSLGPRAHRDFWGGKRHYFFINPPPEKNFSHFVGGGIGRPLHFLAPNPPKFEGFRPIGQPPWPP

SEQ ID NO: 277706 - protein, 110 aa, Zea mays
  unsure (1)..(110): unsure at all Xaa locations
  Clone ID: MRT4577_184844C.1.pep
FSKRGRGPPPXSLHHLTSAVASPHPSTGPVDPLPGSLVLLLLRTRPSKFSAQFFSRGGPPPPESSCLATCCGSIWRAPRRREGCAPSCCLSGGDRWGPAARAASRSGPLR

SEQ ID NO: 277707 - protein, 80 aa, Zea mays
  Clone ID: MRT4577_184845C.1.pep
AGQSPSTAARALSFPSSIKYLAEVLSVCAGRSTEAVVICHSEVSPVQRSLVRHRAPTCCSSIARDAYWWSSPRSLTRTRR

SEQ ID NO: 277708 - protein, 78 aa, Zea mays
  Clone ID: MRT4577_184846C.1.pep
HLSQPVRNLEWYLGAEFRKRERGSLQTTAFFLLMRFALERQKWKETERRLVKPISPKKRKMTLTSTVGKSSFPEWIQS

SEQ ID NO: 277709 - protein, 107 aa, Zea mays
  unsure (1)..(107): unsure at all Xaa locations
  Clone ID: MRT4577_184847C.1.pep
IEERVXKXIXILILFXHPHIIXLYKVIDTPADIYFFMEDIKSGELFDYIVEKGRLHXKETRRFFQQIISGVXYFHKNMVSHLYLKPKNLLFDSKFNIKNAYFGLNNV

SEQ ID NO: 277710 - protein, 91 aa, Zea mays
  Clone ID: MRT4577_184848C.1.pep
LFTVSTSFLNFVFCLCLDKQIIFKMKAQLSIVLFAFLAVSMVSADTLTEKLRALYQENAESVGKLAEQIETLRKDASLSLSDKQNQIEQSV

SEQ ID NO: 277711 - protein, 226 aa, Zea mays
  Clone ID: MRT4577_184849C.1.pep
MEWTTVETRDGAKLSVRLFKPPASGTGLEPEPREDVAVVLVHPYTILGGVQGLLRGMAEGVARRGYTAVTFDMRGAGRSTGRASLTGSTEVGDVVAVCRWVAENIKPRGILLVGSSAGAPIAGSAVDKVDEVIGYVSIGYPFGLMASVLFGRHNDAILKSEKPKLFIMGTKDGFTSVKQLQNKLKSAAGRADTHLIEGAGHFQMEGPAFDAQMVEIIIKFINSLPK

SEQ ID NO: 277712 - protein, 67 aa, Zea mays
  unsure (1)..(67): unsure at all Xaa locations
  Clone ID: MRT4577_18484C.1.pep
MAMPKPVLSLLVHLHAAVLFLPAPAGGAVYNVLRYGARPDGVKDATXSFLRAREPPRLSPLPVPPPP

SEQ ID NO: 277713 - protein, 33 aa, Zea mays
  Clone ID: MRT4577_184850C.1.pep
VVICLFAIAIGIVIVVSFGIPPLEFEGSLVNQL

SEQ ID NO: 277714 - protein, 61 aa, Zea mays
  Clone ID: MRT4577_184851C.1.pep
PCAPARTAPPRCCWLLLEFAAGSRRTCSRRPAADRTVKPARGIIVILGAGLKGGVDAMAFR

SEQ ID NO: 277715 - protein, 123 aa, Zea mays
  Clone ID: MRT4577_184852C.1.pep
GPGNLKFLLHHFFFFLGRAQALLFKLGNRQISISGRGSWGLKKQGPLVYFSCNNLGFSHLRSRKKNSVGGLTHYNTKMGPFSGGGLLTPNLFFNVHDNPPRWKMGVSGGRAKGPLSVFLPKPG

SEQ ID NO: 277716 - protein, 59 aa, Zea mays
  Clone ID: MRT4577_184853C.1.pep
PLMLSILWTGSTQGRSLLGYLARTSSSWSSSAYWPAGCWSSLRCFPRRDLRRQLLTPSS

SEQ ID NO: 277717 - protein, 158 aa, Zea mays
  Clone ID: MRT4577_184854C.1.pep
MSSQTGGGKESDAGPGQHRQMQSLARQGSLYNLTLDEVQNHLGEPLLSMNFDELLKSVFPDGVDSDGAVTGKPDRTSSLQRQGSILMPPQLSKKTVDEVWKGIQGGPETSTVVDGLQRRERHPTLGEMTLEDFLVKLGVVTEGLVKDSADFPSIWIQL

SEQ ID NO: 277718 - protein, 148 aa, Zea mays
  Clone ID: MRT4577_184855C.1.pep
MASGEEGKGETVLVTGASGFIGSTLVRGLLGRGYNVRAGVLDPDDRAETDHLLALAAGAGRLSFFRCDLLDGAALLDAARGCSGVFHLASPCTVDPVKDPQVCTSSCRAQCSIVVTVTSRRRLPARRRAHTHDPRTPTLLRRLRCRIS

SEQ ID NO: 277719 - protein, 328 aa, Zea mays
  unsure (1)..(328): unsure at all Xaa locations
  Clone ID: MRT4577_184856C.1.pep
MASGEEGKGETVLVTGASGFIGSTLVRGLLGRGYNVRAGVLDPDDRAETDHLLALAAGAGRLSFFRCDLLDGAALLDAARGCSGVFHLASPCTVDPVKDPQNQLMVPAVEGTLNVVRAAKDAGGVRRVVVTSSISAVVPNPGWPAGEVVDEXCWTDIDYCEKNGVWYPASKTLAEKAAWKFAEENGLDVVVVNPGTVLGPMIPPAINASMAMFCRLLQGCTEEYADFFLGPVHVEDVAMAHILVFESASASGRHLCVHSICHWSDFAAKVAELYPDYKVPKFPMDTQPGLVRQEVGSKKLTALGLQITPMEKIIRDAVESLKSRGHIS

SEQ ID NO: 277720 - protein, 74 aa, Zea mays
  Clone ID: MRT4577_184857C.1.pep
WIGPPTCCVWSAGSMRAQCWGGSSSRYFASWMYCLCGGGLLSPEEVHINPSCEAEWLWGSIKLVRTSLEPNSEL

SEQ ID NO: 277721 - protein, 163 aa, Zea mays
  Clone ID: MRT4577_184858C.1.pep
PNPKWHGWELVGRKNRDPPTQGTTRFNPGRVGGPGHLNRGPPPFPPGANFFLPTLFGNRTGQVHPTVTVWFVPGFFRHTHTGGGPRYRWVLKRKIPCFFCIYARGGFPRHGGTPIPWGLGPPLLCARAYLVGFLGFLRGGIFVLGGGFWGPGGGGALGFAGGR

SEQ ID NO: 277722 - protein, 57 aa, Zea mays
  Clone ID: MRT4577_184859C.1.pep
VCCDPSPPVVCLRPLRRGPGLFLKAWATIGALLVMKDAFPFQKRGFVWIFKRQSAPL

SEQ ID NO: 277723 - protein, 67 aa, Zea mays
  Clone ID: MRT4577_18485C.1.pep
CLHHPSPPPIRRRWNRVTKKSRRGRHLIQAHAGCASTSSDSPSRRDSTPPGAALAPRFLLPVMNWCH

SEQ ID NO: 277724 - protein, 36 aa, Zea mays
  Clone ID: MRT4577_184860C.1.pep
RQLGHGSGFRAIQLDSRAPGSALIKADDWGIRRFSP

SEQ ID NO: 277725 - protein, 85 aa, Zea mays
  Clone ID: MRT4577_184861C.1.pep
MLQTVRLFGVLAIYSIIFDNVFVSDFVSFRTSRLGTLNNRLLCQTSIAVESSRSNQQQQVSCGNQQMCARGPKIITVSCMELTVP

SEQ ID NO: 277726 - protein, 47 aa, Zea mays
  unsure (1)..(47): unsure at all Xaa locations
  Clone ID: MRT4577_184862C.1.pep
FSNXDKHFSCFEXHWIAISSSSAASSVLCLSAVPSLDCTCXMDTNFL

SEQ ID NO: 277727 - protein, 74 aa, Zea mays
  Clone ID: MRT4577_184863C.1.pep
LPSRLAVADAAHAVTASSGSSEQREATMAHAWQASISQAVAGTHALHACLPLPEASHLPFTMYLERIRAMTGIT

SEQ ID NO: 277728 - protein, 50 aa, Zea mays
  Clone ID: MRT4577_184864C.1.pep
EASRIHRMPSTSWMVSLVLLHCAAFSIILCVSLNASLPMTPCQEEQARVR

SEQ ID NO: 277729 - protein, 48 aa, Zea mays
  Clone ID: MRT4577_184865C.1.pep
PAGTSTTCLLLSSEMLSPSHKQVNVFHPISSTSSSHAFDKSTKRGYLI

SEQ ID NO: 277730 - protein, 89 aa, Zea mays
  unsure (1)..(89): unsure at all Xaa locations
  Clone ID: MRT4577_184866C.1.pep
VMNGFQNRKPMKGKVFQEPLVHEVPRSVDWREKGYVTPVKNQGQCGSCWAFSATGALEGQMLXKTGRLISLSEQNLVDCSGPQGNEGCN

SEQ ID NO: 277731 - protein, 162 aa, Zea mays
  Clone ID: MRT4577_184867C.1.pep
MRGTLEYLSDLLGGGSSSSRRRYNRRRTQFQTVELKVRMDCDGCEMKVRNALSRMKGVHSVEIDRKQSKVTVQGYVEPHKVVKRVQATGKKAAEIWPYVPYSLVAHPYAAPAYDRKAPPGYVRRVDAVMPVSSYGGPTAAGPQEERLVNMFSDDNPNACSIM

SEQ ID NO: 277732 - protein, 89 aa, Zea mays
  Clone ID: MRT4577_184868C.1.pep
AGPNTKGSQFFICPVATPGLNGKHFVFVQVVEGMDVVKAIKKVGPRKGSPSKVVKVLDWGRLPKVSLIGVVGPPPPGHGGLPLGRFLGV

SEQ ID NO: 277733 - protein, 83 aa, Zea mays
  Clone ID: MRT4577_184869C.1.pep
KVTFPDSNVKKKKKKKKKKKKKKKKKKKKKKKKKKKKKKKKIKKKKKKKKKKKVFSFPREGLLKRGKFWKIYKKIGGPFEPFF

SEQ ID NO: 277734 - protein, 63 aa, Zea mays
  Clone ID: MRT4577_18486C.1.pep
SGNIPLRSPLFTGTLLKGEIPIWGATHALPDVSPPPCVDRSYLPVAQKLSVHNNPMLTPINVI

SEQ ID NO: 277735 - protein, 174 aa, Zea mays
  unsure (1)..(174): unsure at all Xaa locations
  Clone ID: MRT4577_184870C.1.pep
MSSSRPAHSSSSSSRTRQSSRARILAQTTLDAELNAEYEESGDSFDYSKLVEAQRSTPPEQQGRSGKVIAYLQHIQRGKLIQPFGCLLALDEKSFRVIAFSENAPEMLTTVSHAVPNVDDPPKLGIGTNVRSLFTDPGATALQKALGFADVXSLLNPILGQCXTSGKPFYAIVH

SEQ ID NO: 277736 - protein, 59 aa, Zea mays
  Clone ID: MRT4577_184871C.1.pep
PSTGQFQSFNLDHLEGGTQGLVEGFWLIDKVRAEEGGLLNILCLHSICVNSNKLEELET

SEQ ID NO: 277737 - protein, 39 aa, Zea mays
  Clone ID: MRT4577_184872C.1.pep
MESVLSSKYINAARWFNHIDTLARLNRITAEGQGVKVES

SEQ ID NO: 277738 - protein, 49 aa, Zea mays
  Clone ID: MRT4577_184873C.1.pep
MGSYMAHTESTFLGTHLEDPAPHNGCIATELVYHLGNKVTNEPKKVTKT

SEQ ID NO: 277739 - protein, 135 aa, Zea mays
  Clone ID: MRT4577_184874C.1.pep
MTKVQSMVASSRRKSRKAHFSAPSSVRRVIMSAPLSKELREKHGVRSIPIRKDDEITVVRGSNKGREGKVSSVYRLKYCIHVNGIVREKSNGQSVPIPIAPSKVVITKLKLDKDRESILERKSAGREEKKKQREA

SEQ ID NO: 277740 - protein, 95 aa, Zea mays
  unsure (1)..(95): unsure at all Xaa locations
  Clone ID: MRT4577_184875C.1.pep
APRAWYDCLKDFLIKNGFAIGKSDSTLFTRKVITEXFVCQIYVATIIFGRANAKFCVELSTGLAHRFRVYIMRTVASFEELLFGPHADGDLVSRK

SEQ ID NO: 277741 - protein, 94 aa, Zea mays
  unsure (1)..(94): unsure at all Xaa locations
  Clone ID: MRT4577_184876C.1.pep
TTILLSIFYPPLKSYTSCGSXXNTXXGPLTNPSKLTKCYYDGSTTSHPPXYDTQVILYPQAIFNDPFRTGNNILVIYYCYTPTDYPIPTNKNFI

SEQ ID NO: 277742 - protein, 80 aa, Zea mays
  Clone ID: MRT4577_184877C.1.pep
EVGEGQGECELCLLWFLIPANAKFEKKPHGMLEIWLILVGFLHSRKLVILHCKMFALEMGSCSLKGGEGQRPHVSPGFYW

SEQ ID NO: 277743 - protein, 52 aa, Zea mays
  Clone ID: MRT4577_184878C.1.pep
QYQYEESIIPYNKMKFESTLTNTSITKKDFSFNHTLCKSGLNFDMYRTHLTS

SEQ ID NO: 277744 - protein, 61 aa, Zea mays
  Clone ID: MRT4577_184879C.1.pep
LVLFHNHEADVVYPRRRGCWCVRTSLTLASASQRARRTVIPFLRARTDDVYSIAGACCCTT

SEQ ID NO: 277745 - protein, 108 aa, Zea mays
  Clone ID: MRT4577_18487C.1.pep
MPHYFFLAPTDPSSVSQKLRVPASSCSPPSYFGVSNLSPIRAPVRSPAFFWYRTSLLWMLREATVVRKPYTTFEDEALGDSTRRISRSKCSARIMTEPPYLARSCLHR

SEQ ID NO: 277746 - protein, 59 aa, Zea mays
  Clone ID: MRT4577_184880C.1.pep
RDVVGAHPTHMQIPGIIWHLGLLPNIYFNPGIIQKPYGWHFGRHLNSRSWNEGVPNGLG

SEQ ID NO: 277747 - protein, 338 aa, Zea mays
  Clone ID: MRT4577_184881C.1.pep
MAEPHHTSSNGAAHGDADDASEKMPPKRLQRYDSLHMEAGMFPAGGSTHAAKVGWATTLHLAFQSIGVVYGDMGTSPLYVFSSTFTNGINNTDDLLGVMSLIIYTVILLPLIKYCFIVLRANDNGDGGTFALYSLISRYARVSLIPNQRAEDAMVSHYKLESPTYPMKRAHWIKKKMESSPKFKVLLFLVTVLATSMVIGDGVLTPSMSVLSAVGGIQQRATNLTQGQIVGISIAILIVLFLVQCFGTDKVGYTFAPIILAWFLLIAGIGVYNLIKHDVSVLKAFNPKYIVDYFKRNGKQGWISLGGVILCITGTEAMFADLGHFNGRAIQIGFSVVL

SEQ ID NO: 277748 - protein, 50 aa, Zea mays
  Clone ID: MRT4577_184882C.1.pep
YTNSHPLNTHYLSTFLLIHQHICTNNIPQFIFACASKHLNTYTITTLMLI

SEQ ID NO: 277749 - protein, 120 aa, Zea mays
  unsure (1)..(120): unsure at all Xaa locations
  Clone ID: MRT4577_184883C.1.pep
CFFFYFRFSKLFYFVXATTKILCSVTYIFLLAVFLQRCDWVNPNGGNPPAVETWGGGKKTRFFWGGGRPQKKTGGGAGRKTAHTLWRRTKHVKKGGYALFYLHKKKPPTSFFFKGGPRGA

SEQ ID NO: 277750 - protein, 198 aa, Zea mays
  unsure (1)..(198): unsure at all Xaa locations
  Clone ID: MRT4577_184884C.1.pep
GTSRPAGNLFDESRCLLLYAHDARPNHFVTTATFFTVKTHFAHLXLNPGESALXYDLYGVFPTDDDLNTAMTPNRLPEDALANISYHKEXRTRXWKLKKVTSEVXATSNAKXGKIYKTLYHLEGFLRHXMLATTTCLIDTNLLHNEDYTFDMQSTVADDIPTPAPLXELIEDFTLVDNARCTLREQLAIRHTHAATGV

SEQ ID NO: 277751 - protein, 42 aa, Zea mays
  Clone ID: MRT4577_184885C.1.pep
DKHPIHIITSLTPETSNYVDLNDQLHAHSPIRHDLLHTNHTN

SEQ ID NO: 277752 - protein, 116 aa, Zea mays
  unsure (1)..(116): unsure at all Xaa locations
  Clone ID: MRT4577_184886C.1.pep
LNILVSPPLLVSWRFGQKALTVRSSHYLANVTGHGEAPXSGALSPLLLVVPLRLTASFAPFLSLASFAFLPCFLAFFAGFSSEGLIWGFLLGFHFTAFRNLLLKEMXLGRGSSYWA

SEQ ID NO: 277753 - protein, 51 aa, Zea mays
  Clone ID: MRT4577_184887C.1.pep
PCLFISLHARIDFRNIKPLLNSIHYTTIFYYLKLFHISITTTTFIFNFHTV

SEQ ID NO: 277754 - protein, 53 aa, Zea mays
  Clone ID: MRT4577_184888C.1.pep
IISDVKKKPNVPCNLRFPAINVSCVGSLKDLKPLCPKFSFQAKIKGGWMFFIP

SEQ ID NO: 277755 - protein, 58 aa, Zea mays
  Clone ID: MRT4577_184889C.1.pep
NYVPENRDVTWCMLTHVLHHADLTDRQNANPAESVAQYDRSAGVRDPNGLLFMFGMAL

SEQ ID NO: 277756 - protein, 83 aa, Zea mays
  unsure (1)..(83): unsure at all Xaa locations
  Clone ID: MRT4577_18488C.1.pep
MNGEWVKKMAGAVRTVGKGSMRMMNMAVHMTTTTDDXKALEHPVLNLXVITIPDIVEVNIFKDDFIIQFVNPKVSSXICANTC

SEQ ID NO: 277757 - protein, 101 aa, Zea mays
  Clone ID: MRT4577_184890C.1.pep
MSDSMRKGLGEQASEKITPDSQKSTTEKASESLTGAGDRIAGAVQPEGQKSTGQKLGDATRSGGDDASNQGQGVMKQAQDMASNAGQSISDTLSGATGQKK

SEQ ID NO: 277758 - protein, 132 aa, Zea mays
  unsure (1)..(132): unsure at all Xaa locations
  Clone ID: MRT4577_184891C.1.pep
MATWGAHVPLLLLHLGVLKSCSLAAVRLXHELDITRRDGRGKVLDNGRLLTLALDRTCGSMFQNRHEYLFGKIDMHAAAWLRAQSTPGTRHRATTLHVRSGRARTIADRTRELPGTTQHRSSSYTHATPTMR

SEQ ID NO: 277759 - protein, 83 aa, Zea mays
  Clone ID: MRT4577_184892C.1.pep
VLLYEKSTSTWQSSFTLPISTFSKGYSLAGPFRSISSAFQRLHCIYWYPLVSHSKFLPSYLHTLITELVIAGMTYMLHLNASI

SEQ ID NO: 277760 - protein, 174 aa, Zea mays
  Clone ID: MRT4577_184893C.1.pep
QFQVLLICFIICTFSYGLTGVIGYLMFGKSLSSQVTLNLPANHFASNIAIYTTLINPFTKFALLITPIAEAIEDKLHVDKNKTVSILIRTALVVSTTIVALAVPFFAYVVALTGSFLSSTVTILLPCVCYREFSSRTSRNLRLELVVCLGIIMIGVGLVLVGTYSSLKKIVHSF

SEQ ID NO: 277761 - protein, 54 aa, Zea mays
  Clone ID: MRT4577_184894C.1.pep
VSGFWFDTTLRSNFINPSSSHLHLLNNTDSPKTMITASPKHVNCRVASIFPETQ

SEQ ID NO: 277762 - protein, 67 aa, Zea mays
  Clone ID: MRT4577_184895C.1.pep
EASIRASHYALAGPSRRMYWCNEPLVLPQIEHELLLLQLINRQRGWQLVPTGSARRGLQPRRTGLML

SEQ ID NO: 277763 - protein, 60 aa, Zea mays
  Clone ID: MRT4577_184896C.1.pep
GVWEIVKSVTRSRAIFCTSKFSRSGRIVVILKMGLLQNPSALFFTTVYTESVMFPQRADT

SEQ ID NO: 277764 - protein, 106 aa, Zea mays
  unsure (1)..(106): unsure at all Xaa locations
  Clone ID: MRT4577_184897C.1.pep
PTRPPTRPPTRPPTRTPTRWDPHQTLHQLITKIYRFNTXTHVIVLSATNLADVSDPALNRTGRFDRLVMLXAPDRFGKESILKIHVKRRXLPLNKHVHLINIAAMT

SEQ ID NO: 277765 - protein, 85 aa, Zea mays
  unsure (1)..(85): unsure at all Xaa locations
  Clone ID: MRT4577_184898C.1.pep
HTHLPISRASTSTSHKXAQVNWARWCSCTASRRYGTRGATRCXPRPRRGTAPSRRXTAALTGCLTTRLSLDKHLLTTLVADSVCY

SEQ ID NO: 277766 - protein, 97 aa, Zea mays
  unsure (1)..(97): unsure at all Xaa locations
  Clone ID: MRT4577_184899C.1.pep
MMITSNPRATQLGRKTYPQHVGTVHKNLFIMIMNQLCNVEEEYTXRVLTHRHRXCSFVPYNVWRGNFLTMYVLYXHNCDVANVNRTEHHVLDLSQDG

SEQ ID NO: 277767 - protein, 66 aa, Zea mays
  Clone ID: MRT4577_18489C.1.pep
RIHSSASSWDSADIRSQLSSPFVQLLRDKLRPGAPIPETKQRLGRPIPELYTGEPTQEALARLYMK

SEQ ID NO: 277768 - protein, 85 aa, Zea mays
  unsure (1)..(85): unsure at all Xaa locations
  Clone ID: MRT4577_1848C.1.pep
TTRARRDHPSNLCLAGDRLHTVRQAKGSVDAKPASANQVSRGDNLAMDTRGVIWMNSRPADALEPARQDELEYMATKXENKVPEP

SEQ ID NO: 277769 - protein, 169 aa, Zea mays
  Clone ID: MRT4577_184900C.1.pep
SSPLTELRQLAVAVIRSMCAACYADSIAVSSPSALFSSRRDQTSWISRYKELRAPGEDTMAAVLAAYATLRAADAIACGDSSFPCSHRLKHGFNMRNFTSSNYHYPLRCFRTSTSLSASVLTSHISVVGLHVLDPSVTLAMRVLSLPEIVAWILPAYRKETRRFLSTDT

SEQ ID NO: 277770 - protein, 158 aa, Zea mays
  unsure (1)..(158): unsure at all Xaa locations
  Clone ID: MRT4577_184901C.1.pep
FSSTLSPSRLRVPRSPRTSPLQPRTTTRSPPPSPLSPPPRPLTPSLRPPSLLFPRPSPSLATTLLALPPPSSPLSRPTTLLLLLPLPTTALLPTXVYTHPAQPPVVPTQPAAQPPXSTASPPLLPSPSLVLPASALPLPLLLVSSWPLSLCKRGRAPI

SEQ ID NO: 277771 - protein, 96 aa, Zea mays
  Clone ID: MRT4577_184902C.1.pep
SGILPARPASPLRTRAGGLGLASPPAFPSDAAPAPRCTVSVCYATLAEATLCTWGAPLSALAWEDALDAVLSPLTIPAVDDAFQAAEDPAVISMEG

SEQ ID NO: 277772 - protein, 100 aa, Zea mays
  Clone ID: MRT4577_184903C.1.pep
RFNTSRRSLPTNDNRRLPYPRPAAVQQQYSMRRPDHKAENSSSTIYHMLQCETRLHLLPTRGAGVEHPAQARRVHGDSSSVFYGRWPSLEYGMRPPLLLP

SEQ ID NO: 277773 - protein, 63 aa, Zea mays
  Clone ID: MRT4577_184904C.1.pep
TEWFSREVASVLLLGNQRGFLNSFLLSPDGSVFFLMISLGCIGRRVLRLAPIRPFGPCSEDKY

SEQ ID NO: 277774 - protein, 52 aa, Zea mays
  Clone ID: MRT4577_184905C.1.pep
SHAFEKNKKKIINYKKKKKKKRTRFKKILAHSKLPNLTFPSIQLHILFYNLT

SEQ ID NO: 277775 - protein, 85 aa, Zea mays
  unsure (1)..(85): unsure at all Xaa locations
  Clone ID: MRT4577_184906C.1.pep
MSKLQSDSVKDAISHIVGDAIEKMMKFTETVELQIGLNNYDPQKDKRVTGSVKLPHIPRPSMNVCMLGDAHHVXDADKMGLDYMD

SEQ ID NO: 277776 - protein, 69 aa, Zea mays
  unsure (1)..(69): unsure at all Xaa locations
  Clone ID: MRT4577_184907C.1.pep
PVGLVNIARLSEYPRDAHMQTYKKQWVXRTAEQRADPRSKSGCTHWCLGLVQNTWNXLLYCKLFFASTV

SEQ ID NO: 277777 - protein, 117 aa, Zea mays
  Clone ID: MRT4577_184908C.1.pep
GGGEPPFCRLKAAKGLMRNQHKQSQGIPPPRHKRTMPHNLTRKKELSLQRITGFHPCKQPLETRSDLRVPRKANKLETIQTQHTTHSGVIAEKLLLTMAMGAKKTFFSGGEGKIPAD

SEQ ID NO: 277778 - protein, 127 aa, Zea mays
  Clone ID: MRT4577_184909C.1.pep
RLGELRAAASYDIFSATRDFFKLLLYLKTKGRFYTHSRLPPRTCLLARHALWPVRPSPTTCTLLPRRTQTIRGGACHGPAPPSLPNRPTGMACAWRFSLRARSRTYVLPKHHTVAFPPWLLLLILLL

SEQ ID NO: 277779 - protein, 44 aa, Zea mays
  Clone ID: MRT4577_18490C.1.pep
SVVLGYTAMAYRRGLAAPWGSMLALPKEQLGPLLVGVLALFFAR

SEQ ID NO: 277780 - protein, 89 aa, Zea mays
  Clone ID: MRT4577_184910C.1.pep
RVRGRCGTGAGSAYLPERISACCGSKVGCMHGAVQVDVGGSSSQAHVLCSLCRSDRRRAKTLGHARGNDRRSAIRRCDARLHMPNGVVW

SEQ ID NO: 277781 - protein, 172 aa, Zea mays
  Clone ID: MRT4577_184911C.1.pep
MATATAVGGPDRVETAASSAAAVLAVAVASQRLLGLLALAVQTVNVGAEIYNKDQRAIYKLLSGRIKSENVPENKDGSDDDDDDDDDEDNDDEGGDDDDDAEEEFSGEEDGGDDDDEDDDPEANGEGGSDNDNDDDEDGDDDGDEDDEGDEDDEDEDDDEDDEDQPPSKKKK

SEQ ID NO: 277782 - protein, 129 aa, Zea mays
  unsure (1)..(129): unsure at all Xaa locations
  Clone ID: MRT4577_184912C.1.pep
AKEPDRTRRERXAHXRRXXAGSATTTQTSGGGGSQPPPPVFLPPGEXXPXPEHRPPSEQPPPPDHRPPPGHRPPPXQGPPPEQQPPPPGHYPTQPPRPQPDPQPHPCPSQQPNPSPSQLQGTGGEGSTP

SEQ ID NO: 277783 - protein, 224 aa, Zea mays
  Clone ID: MRT4577_184913C.1.pep
MGPTGQCRTLLLLLLAAAAAAAAPEHESLLRLPSSARSLAPKTPRSAGADLIRALNLHPRDAFPRRPGGVGVGGSDALPAGTLVERPIRLASLVAGDDGTSVSNLGHHAGYYRLPTTHDARLFYFFFESRQHKEEDPVVIWLTGGPGCSSELALFYENGPFNIADNMSLLWNEFGWDQESNLIYVDQPTGTGFSYSSDSRDTRHNEATVSNDLYDFLQAFFKEH

SEQ ID NO: 277784 - protein, 228 aa, Zea mays
  unsure (1)..(228): unsure at all Xaa locations
  Clone ID: MRT4577_184914C.1.pep
MAQQKNAHVPKFGNWDSDGNVPYTLFFENARKGKGAGAAGGRMINPNDPAENPEAFSVAAPSPPPGRHERRPSDAXRRRRCRPTPTTPPGRRTTAXAAGEPPRRAAGYSVDQSPAHPYSSESAGYGLVASSVDRSRAKGASRGNETPTRGSAVPKFGDWDANPASADGYTHIFNKVREEKQTXGGEASGXARTACVPTAPSSTTTTATSHRNSRALGGASRERLPDEW

SEQ ID NO: 277785 - protein, 130 aa, Zea mays
  Clone ID: MRT4577_184915C.1.pep
QYSRRPSTETPHLTMSSVRHRTGEVGRYGDQKEGRGPGFDPRTELTNDKRAGVALAPMSYNSYYLSQVIQQRQTKDKLKQDFDIRYQLQGGFMGWSSFDIHSHSDWKPSIIPSLHPYNYMARIHAALIDE

SEQ ID NO: 277786 - protein, 101 aa, Zea mays
  unsure (1)..(101): unsure at all Xaa locations
  Clone ID: MRT4577_184916C.1.pep
CFFFFFFFFFFFFIKRKSGFSLYFXSNHIIGAQLIYGFRRCNRVNQHAGGGGGVPGHKDWRQTCWGGLQTEELCFFFFYTPPTIPFFGSQLGPCFLLVNLP

SEQ ID NO: 277787 - protein, 53 aa, Zea mays
  Clone ID: MRT4577_184917C.1.pep
KNSFFGGKKKKKKKKKKKKKKKKKKKKKKKKKKKKKKKKKKKKKPKKKKKKKK

SEQ ID NO: 277788 - protein, 86 aa, Zea mays
  Clone ID: MRT4577_184918C.1.pep
KACIGIRPSHNPALSHVLHALRIVCLSYAHRTELTHRYHHMALGPRTVPVSLGQVTVAWTFILASRLFRAPIARVKRHSILSHLSG

SEQ ID NO: 277789 - protein, 50 aa, Zea mays
  unsure (1)..(50): unsure at all Xaa locations
  Clone ID: MRT4577_184919C.1.pep
SLVPPLKILQIRMIISSASTAYLPIFDMHEVVQVLYLVALXLXLCYGNLK

SEQ ID NO: 277790 - protein, 71 aa, Zea mays
  Clone ID: MRT4577_18491C.1.pep
MGPKRFPVVDSYGRRSLNVFVDSCLDHCGGTCRRLILFLFFAKLYPTFDSILATTLSVAIIIWGGVAKYNT

SEQ ID NO: 277791 - protein, 220 aa, Zea mays
  unsure (1)..(220): unsure at all Xaa locations
  Clone ID: MRT4577_184920C.1.pep
MAAVDTFLFTSESVNEGHPDKLCDQVSDAVLDACLAEDPDSKVACETCTKTNMVMVFGEITTKANVDYEKIVRETCRNIGFVSNDVGLDADHCKVLVNIEQQSPDIAQGVHGHFTKRPEEIGAGDQGHMFGYATDETPELMPLSHVLATKLGARLTEVRKNGTCPWLRPDGKTQVTVEYRMRGGAMVPIRVHXVLIFTQHDETKSNDEIADDLMEHVIMP

SEQ ID NO: 277792 - protein, 59 aa, Zea mays
  Clone ID: MRT4577_184921C.1.pep
TLFHDLRPKPIVWRLCHLPYQQPITSNLQRQLPRRAVQLGLQRLAGTGASTGYEPLHPH

SEQ ID NO: 277793 - protein, 48 aa, Zea mays
  Clone ID: MRT4577_184922C.1.pep
KKHLNIHPKLKPICPDNGKKLILQVIKTIAYIFKSTLNICKQTLPKHF

SEQ ID NO: 277794 - protein, 68 aa, Zea mays
  Clone ID: MRT4577_184923C.1.pep
MAPRKGKEKISEQFISLGPQVAEGENVFGVCHICASFNDTFVHVTDLSGKETICRVTGGMRVGGRRDA

SEQ ID NO: 277795 - protein, 105 aa, Zea mays
  unsure (1)..(105): unsure at all Xaa locations
  Clone ID: MRT4577_184924C.1.pep
PDAGPIGGALRELELGNGRXXESSVSDPASASAEMALKAPSDGNAKKRKXSGKGKGKDGPGSTAXTKEESSGXKRCKXAEXSNGAXXXSGKGNAAXXXQQDKGGK

SEQ ID NO: 277796 - protein, 112 aa, Zea mays
  unsure (1)..(112): unsure at all Xaa locations
  Clone ID: MRT4577_184925C.1.pep
SAGPSRPSRPPAXAESPRVSASGRVVFRGLERCASTPASAGVGPRRPRGMERSYSANVRVDPVISVFGFGHLFMPSSPAKERKADRERDVVGGRRNNRPEKLAMVLMRDPQD

SEQ ID NO: 277797 - protein, 66 aa, Zea mays
  unsure (1)..(66): unsure at all Xaa locations
  Clone ID: MRT4577_184926C.1.pep
MASMKLYGAVMSWNVTRCATALEEGGFDYENVPINFGTGEHKSPEHLVRKPFGQVXTLQDGEFYLF

SEQ ID NO: 277798 - protein, 267 aa, Zea mays
  unsure (1)..(267): unsure at all Xaa locations
  Clone ID: MRT4577_184927C.1.pep
LAGLYVMSASGGKIYLXNMMTSKTMTTFMPAPPTATFIAFHPQDNNIIAIGMDVGPXQAGPVRVDDRPSKPFGHSKRITGLAFSNVLNGFTFTEFDALIQVWNTDTLARDNNRFLLIPSVRQSNRFDNQVEFHRDXMHFLXTXETLKAIYETTKLEPVKHXQLIYAIIMDATVGIFNASSLRLLCRILAASYLPPNIGPSVHPVVVAAHPSEASQFALGLTDGGVFVLEPLESERKWGNPPPVENGSASNLSTPPPNGASSSDQPER

SEQ ID NO: 277799 - protein, 974 aa, Zea mays
  unsure (1)..(974): unsure at all Xaa locations
  Clone ID: MRT4577_184928C.1.pep
SSIEEKFKETVHKLEQESGFYFNIKYFEDEVLNGNWDEVERYLGGFTKVDDNRYSMKIFFEIRKQKYLEALDKHDRSKAVEILVKDLKVFASFNEELFKEITQXITHPAVSGGAIGFGTPTNRALLLKRPRTPTTGNPGMDYPSGDSDHISKRTRPVGMSEEMNLPVNMLPVTYPQSHNYQQDDFHKAVARTLSQGSAPMSMDFHPLQQTLLLVGTNVGDIGLWDVGTKERLVVRNFKVWDLGKCTMTLQAALVKDPAVSVNRIIWSPDGTLFGVAYSRHIVQIYSYNGGDDIRQHLEIDAHVGGVNDIAFAHPNKQLCIITCGDDKTIKVWEATSGAKQFTFEGHEAPVYSVCPHYKENIQFIFSTALDGKIKAWLYDNLGSRVDYDAPGHWCTTMAYSADGSRLFSCGTSKDGESHLVEWNESEGAVKRTYQGFRKRSMGVVQFDTTRNRFLAAGDEFMIKIWDMDSTGLLTTIDADGGLTASPRIRFNKEGTLLAVSTADNGIKILANADGLRLLRTLENRSFDASRNASEAVTKPLINPLTAAANAAAASSSGAGAPSAITAMNGDSRSLVDVKPRIADESLDKSKVWKLMEITESSQCRSIKLADNMRTSKISRLIYTNSGLAILALTSSAVHLLWKWPRSDRNSGKATASVSPTLWQPPSGILMTNDTTDNNPEEAVHCFALSKNDSYVMSASGGKISLFNMMTFKTMTTFMPAPPAATFLAFHPQDNNIIAIGMDDSTIQIYNVRIDEVKSKLRGHSKRITGLAFSNVLNVLVSSGADAQLCVWNTDGWEKQKNRFLQIPSGRQSNILDTRVQFHQDQMHFLVVHETQIAIYETTKLEPVKQWPVRENSPPITHATFSCDSQLIYASFMDATVGIFNGSSLRLQCRILPASYLPPNISPSVHPVVVAAHPSEASQFALGLTDGGVFVLEPLESERKWGNPPPVENGSASNLSTPPPNGASSSDQPER

SEQ ID NO: 277800 - protein, 59 aa, Zea mays
  Clone ID: MRT4577_184929C.1.pep
DCAPIPSLAVGVSVLSHILQSRSCSYPHYHAPQYGRGRPSHCYCSADEGLIPAYDPGSA

SEQ ID NO: 277801 - protein, 153 aa, Zea mays
  Clone ID: MRT4577_18492C.1.pep
HDPDRHGRGIPKDLPPDTALLDLQNNKITEIKDGDFKNLKNLHTLILINNKISKISPGAFAPLVKLERLYLSKNQLKELPEKMPKTLQELRVHENEITKVRKSVFNGLNQMIVVELGTNPLKSSGIENGAFQGMKKLSYIRIADTNITTIPQG

SEQ ID NO: 277802 - protein, 102 aa, Zea mays
  Clone ID: MRT4577_184930C.1.pep
STVAARLQSFMLRAEEVALLSMACMSGGRDLANNTAGAGRDLDPMLATRTISHGRELENGGTGSSTVSWGVINCGAWRELPNAGIATVVHGVDAAYHSLSVL

SEQ ID NO: 277803 - protein, 106 aa, Zea mays
  Clone ID: MRT4577_184931C.1.pep
IAIYLSVYLHSSYHLSPIDLTVAVANMVMERQCRSWKGGRFVLVWQNRTRHLVPRLALRRHSRKKRIQAHLLVGVRRQPVLQNHLKQRWARATCKQLMPKQNLLKD

SEQ ID NO: 277804 - protein, 82 aa, Zea mays
  unsure (1)..(82): unsure at all Xaa locations
  Clone ID: MRT4577_184932C.1.pep
PLLARFVVSRPAGPVGGVPPVRPRLLVRAGVLERVGGVGVHCLQGARCLGVCSLAALALSSDARFRSGGLFRXRGRSRGSPP

SEQ ID NO: 277805 - protein, 41 aa, Zea mays
  Clone ID: MRT4577_184933C.1.pep
GGPLCSHHRMPCFRPYVPCVSTCIRPGKRLRLATKLYSHQA

SEQ ID NO: 277806 - protein, 70 aa, Zea mays
  Clone ID: MRT4577_184934C.1.pep
RFVFITKFAVFCGFKNAIFFVHIWTGNYKEFFFFHRATIPKKNKVESLKSLIYKDYTPFPPNFNVKFFRW

SEQ ID NO: 277807 - protein, 114 aa, Zea mays
  unsure (1)..(114): unsure at all Xaa locations
  Clone ID: MRT4577_184935C.1.pep
CSVVSRNRLEIEPNRLEVYFFSLSVVXLAARVVVADQISTPTDQQLLARDGNRSWIAMALQYVDAHGRRAGSRRLYASSPTLPAEARHHSPSARPFYSPADRRSTIISSTQFIM

SEQ ID NO: 277808 - protein, 71 aa, Zea mays
  Clone ID: MRT4577_184936C.1.pep
NSVHHSLELWSCGITEAYLVVSYYPLSIVMVGVGDGPWDAMQHFDDCIPERAFDNFQVIIILLYDVEIPKP

SEQ ID NO: 277809 - protein, 168 aa, Zea mays
  Clone ID: MRT4577_184937C.1.pep
MPPRDDQSVQTLPRRAKLLEYFQPELVEVNGVMKAICKYCGAMLRSSSTNSLRNHVADTCPKISVEDRKQFIATMEKGPAEASFVFDSQKARECMVKWCISAEVAFNKFDDPFFAQWMESMQPSFSGVARQTMQNDCITRFKMMRQELRNELQSLNSRICLTTNLWTP

SEQ ID NO: 277810 - protein, 237 aa, Zea mays
  Clone ID: MRT4577_184938C.1.pep
DPRGRPGCTVMPLGLSGLTRIQLPIHVLTQHTLLPTRAIRSSARSTTTDRGLERQLSEYLHQQQLAREPRRPQRQETMSFISPGLRRGLMLSTPLILSTPLLAYQFRNAQRIHCDGPDPITKITSDLKSNYAAEARTPVVTQSGAVNPKAIRQISMGSILGVIGGLGISVFSKPLAILIGLGIFAVQFIESRGIHIIPYSFLQRRLKSMNVRSLVQDNVAFKLSFGLTFAMAAFAEF

SEQ ID NO: 277811 - protein, 60 aa, Zea mays
  unsure (1)..(60): unsure at all Xaa locations
  Clone ID: MRT4577_184939C.1.pep
VAPXSSSKQHISLSISAMAEVGQAQDAVKLFNRLTFDDVHVNDISLNDYLGVTVGKHTTF

SEQ ID NO: 277812 - protein, 63 aa, Zea mays
  Clone ID: MRT4577_18493C.1.pep
FLMVQIIQPLCHFLLVFYIQLFSALNDYIYLFTVPALCRLHSSGWLTQMMLCIMLTIHTSDPS

SEQ ID NO: 277813 - protein, 68 aa, Zea mays
  Clone ID: MRT4577_184940C.1.pep
PMRTYGSTQACAGHRVAHVYGRQDYLHPRGLLHLTPLNSTAYICTHWLTRGPVDNLLALGRHKPMSPS

SEQ ID NO: 277814 - protein, 49 aa, Zea mays
  Clone ID: MRT4577_184941C.1.pep
LPDICTWHHPVWSAEHMFAEHPALDSMKKELGLTSRSSWLYFSALRWIE

SEQ ID NO: 277815 - protein, 212 aa, Zea mays
  Clone ID: MRT4577_184942C.1.pep
RVVLGCQCRLLVSDPSLVRRCLPEDACRSSPFPGFFAQQRRPRGLPEPCFVQGPRPVFGLLDCPRLVGCADSAVPLTSRGGLLLVRVGDLPVLCNPLTGRFKSLPPLKHNCGSSANYSTGYAILTAADCSSSSGVDGDELSFFKVLTMTIQKDAMQYRLHTFSSAGDWGWSTRSGRVTTTCACRSPSKTRSCAAAPRGGSSATSRACTRLTS

SEQ ID NO: 277816 - protein, 91 aa, Zea mays
  Clone ID: MRT4577_184943C.1.pep
EELKYSPKGVLYSRGPDDYKIPTVTEIPEEFYLTMVRSRNPIAIYSSKGLGEAGMFLGSSVLFAIYDAVTTARKERGLSDIFPLNSPATPE

SEQ ID NO: 277817 - protein, 96 aa, Zea mays
  Clone ID: MRT4577_184944C.1.pep
NPTIGNINLCTCLQKLSVKFSFFKHVLTQALECATSKTAGSSVNSKDKDPNPTNKEAARRKPITPPTCRTLYKTTRAGLEFPFAYSLASRAWPARA

SEQ ID NO: 277818 - protein, 61 aa, Zea mays
  unsure (1)..(61): unsure at all Xaa locations
  Clone ID: MRT4577_184945C.1.pep
MGRMHSRGKGISXSSLSHKRTIPIWLKTATTEVEEMITMAAKKGQMPSQIEVLLRDQYGIP

SEQ ID NO: 277819 - protein, 73 aa, Zea mays
  Clone ID: MRT4577_184946C.1.pep
YKYSRITPKAQVSVIRSRYNIHPSLTWCTFIYKFVQGVDPSSTSQYQYSHEDQKLVHLYSTHMAVHPGCSKPV

SEQ ID NO: 277820 - protein, 45 aa, Zea mays
  Clone ID: MRT4577_184947C.1.pep
MASSAYAAWDAAEEADIDASASQEELIGRARFISPRSRSLPSLGQ

SEQ ID NO: 277821 - protein, 58 aa, Zea mays
  Clone ID: MRT4577_184948C.1.pep
PTRPPTRPRNLFPLATTKYTPFKLLMRARVDSSRTTYRWFQIILPHRIISTPAHLFAS

SEQ ID NO: 277822 - protein, 51 aa, Zea mays
  Clone ID: MRT4577_184949C.1.pep
NPSSQNLLLELNLHKKKVFCTKIPQHDTQQTRSHRKLVFIHATLVGGTGTS

SEQ ID NO: 277823 - protein, 44 aa, Zea mays
  unsure (1)..(44): unsure at all Xaa locations
  Clone ID: MRT4577_18494C.1.pep
KPDLLVLELLHVSFFLSLSSSQXSVCASRRRLGXYQLRTLGGRW

SEQ ID NO: 277824 - protein, 376 aa, Zea mays
  unsure (1)..(376): unsure at all Xaa locations
  Clone ID: MRT4577_184950C.1.pep
MTSVGLLSSGYEASTSGTTDRLPDEMNGMSIRDEKEVEAVVVNGNGMEVGHTIVTTVGGRNSQQRQTISYVAERIVGQGSFGVVFQARCLETGERVAIKKVLQDVRYKNRELQTMQVLDHPNVVCLKHYFCSTTDKEELYLNLVLEYVPETVHRVIKHYNKMNQRMPLIYVKLYMYQICRALAYLHNCVGVCHRDIKPQNILVNPHTHQLKLCDFGSAKVLVQGEPNISYICSRYYRAPELIFGATEYTTAIDVWSAGCVLAELLLGQPVFPGDSGVDQLVEIIKVLGTPTRDEIKRMNPNYTEFKFPQIKAHPWHKIFHKRMPSEAVDFVSRLLQYSPNLRCTALEALIHPFFDELXDPNSRXWPVPPLFNFTNS

SEQ ID NO: 277825 - protein, 49 aa, Zea mays
  Clone ID: MRT4577_184951C.1.pep
ICGHKITIFFVKSQTFFFTLKSCCPVLIAGDFFQVATTNVAISRNTETP

SEQ ID NO: 277826 - protein, 157 aa, Zea mays
  Clone ID: MRT4577_184952C.1.pep
FTPRLLERPSVRAWPCGRTTCASHHAPLGKHVRPEVKHRHKQPSARLQDSRQAASACLQMLAKRACDYRTTSNDNDKQGSCLGSHWGSLLGLVELKILQRRGTDTKAQKCLKRKVEQTKKGIVRNKEKQSGWDSFFSKVHLVLVIYEMIHRTSGKRK

SEQ ID NO: 277827 - protein, 324 aa, Zea mays
  Clone ID: MRT4577_184953C.1.pep
MAMATSYGSMANPPITSRTPFLSKQASNWIPATISNGNGTGGMFTVASRKSRNGFQFCAVTGDPGSRNVSDVNFPSDYTELLTQAKEAAESAFKDGKQLLEIEFPTAGLQTVPGDGEGGNEMTGSMLLIREFCDRFVPAEKATRTRVFFPEANEVSFARQSAFEGCSLKLDYLTKPSLFEDFGFTTKVKMADRVKPQDETFLVAYPYFNVNEMLVVEELYKEAVVGTSRKLIIFNGELDRIRSGYYPAFFYPKLAELSRTFLPKLDTVYYIHNFKGAKGGTLFRCYPEPWKVLRKASSGSYVCLHQQEEMPSLKEVALDILPSV

SEQ ID NO: 277828 - protein, 36 aa, Zea mays
  Clone ID: MRT4577_184954C.1.pep
PKERKRKRKKKKKKKKKKKKKIKKNKKKKKKKKKKL

SEQ ID NO: 277829 - protein, 59 aa, Zea mays
  Clone ID: MRT4577_184955C.1.pep
YIYIMKVLILLTAYTLNQMRQSAHICISTCVNGVLGMTGPAGPRCSGEFGSACRSPRVR

SEQ ID NO: 277830 - protein, 59 aa, Zea mays
  Clone ID: MRT4577_184956C.1.pep
MYISEAVHQVCSLTSVCIIMTVRIFDSDVSERRCECLYGMRDHVSCNVYCRLDAPSHVT

SEQ ID NO: 277831 - protein, 52 aa, Zea mays
  Clone ID: MRT4577_184957C.1.pep
PTASAHASGDFNVTYPIWEEEAGLTMCRPPTLQLKCDSSRTYLIRSDYQAYQ

SEQ ID NO: 277832 - protein, 104 aa, Zea mays
  Clone ID: MRT4577_184958C.1.pep
PRTTRIAFRTRSEIEILDDGYKWRKYGKKSVKNSPNPRNYYRCSTEGCNVKKRVERDKDDPSYVVTTYEGMHNHVSPSTVYYASQDAASGRFFVAGTQPPGSLN

SEQ ID NO: 277833 - protein, 132 aa, Zea mays
  unsure (1)..(132): unsure at all Xaa locations
  Clone ID: MRT4577_184959C.1.pep
LPPYNYQPEHKKXNGGENGKRTPGFSKEKENRQPGEKRHGKKQRTXHPTPKKRAQTGKKDRGQNGRAPKGAKKTKXPGGKQHAQGQPKERRNKTGRGQTTTGNTRTEGETEERPEGPTREDKRPPAREKAAS

SEQ ID NO: 277834 - protein, 120 aa, Zea mays
  unsure (1)..(120): unsure at all Xaa locations
  Clone ID: MRT4577_18495C.1.pep
VERVSVVFFTDHAGETLGGRGATSSQCSPPSGAIVGRGYRMSLECARDALLQKTMDNKENTSELFSRSRDKLRVDLMNISMTTLXEKYFPKNKEYFTKLVIDVVLRLKGSTHLESIEILK

SEQ ID NO: 277835 - protein, 191 aa, Zea mays
  unsure (1)..(191): unsure at all Xaa locations
  Clone ID: MRT4577_184960C.1.pep
MAGEGDIKLLGMVVSPFVVRVRMALHMKGVSYEYIEQDLFNKSELLLRSNPVNKKVPVLIHGGKPIYESLVIMQYADEVWSGKGASILPADPHERAVARFWAAYVDDKMFPAYIDIMKAATEEARAEKAKEALVGLANLEEAFAQCSKGKPFFAGDSVGYLDLAVGCNLFWLEAIRKMXXGWTFFDVGKTP

SEQ ID NO: 277836 - protein, 41 aa, Zea mays
  Clone ID: MRT4577_184961C.1.pep
ANTIAARFYLYLLKLSARRNTSRSGNVNDFSLRELRLKKKK

SEQ ID NO: 277837 - protein, 91 aa, Zea mays
  Clone ID: MRT4577_184962C.1.pep
IFFFFFFFFFFFCFYDTTEPILTGGGRPLAGLILNDQHLLNNKVQSFIFPKVSLYRNARSRKFPAGRLLSPSFLFTVRGEGFRPLQMQYLF

SEQ ID NO: 277838 - protein, 98 aa, Zea mays
  Clone ID: MRT4577_184963C.1.pep
RTFRRLLRCSGAVTYGADIIRTLLKVNTTKLEMQVGLIDLRIRIIWLYIGRSLVWWAQDIQRHFTTLQNGLDLSNRHISDYKASEVQLAKIWCICDGS

SEQ ID NO: 277839 - protein, 78 aa, Zea mays
  unsure (1)..(78): unsure at all Xaa locations
  Clone ID: MRT4577_184964C.1.pep
ANPVSWAIXGVVASQFGENQGELSVPGGKPLVVNQFFKDNLGIQHDLLGYVVLVHFAYIIGFFFVFGYSIKFFNFQKR

SEQ ID NO: 277840 - protein, 106 aa, Zea mays
  unsure (1)..(106): unsure at all Xaa locations
  Clone ID: MRT4577_184965C.1.pep
LSRPINDEGFFFLSMGNTDYVLHHEPTQASNFAFHAYHNRLFNVHKDRVGYRKWFGGNPAYGGAAGACSXLMEFSLDYTKTWVAYDTKAIMPGGERTNTGLVSVCR

SEQ ID NO: 277841 - protein, 155 aa, Zea mays
  Clone ID: MRT4577_184966C.1.pep
MEPSNKLVAVLLVSLAMAAATVVQPSYAQNSPQNYLTPHNNARAAVGVGPVTWSTKLQQFAESYAAKRAGDCRLQHSGGPYGENIFWGSAGADWKAADAVRSWVDEKQWYSYATNSCAAGKVCGHYTQVVWRASTSIGCARVVCRDNRGVFIICN

SEQ ID NO: 277842 - protein, 156 aa, Zea mays
  unsure (1)..(156): unsure at all Xaa locations
  Clone ID: MRT4577_184967C.1.pep
LGCAPRVVWERSSPVRDGGAGCVEEANELIQGYNGRLAARLDELRLALAGADVVFCDVYKGMMEIISNXPRFEETREACCGLGPMRATVGCVSKEMVCGAPEHHVWWDIYSPTEAADALVTNWSWSSDGSDATSICGPISLQQLAAAAVPSTSPGA

SEQ ID NO: 277843 - protein, 108 aa, Zea mays
  Clone ID: MRT4577_184968C.1.pep
HDSVAACTADGCDHVRRPPDLLHLPGTLHPKSALALNNPHLTNRLPFHQVPLAYPPTFHETSNFWPKLRVATPLCAYASLLTSLHLTNDKSPNVSSASSTPTTWIDVA

SEQ ID NO: 277844 - protein, 123 aa, Zea mays
  Clone ID: MRT4577_184969C.1.pep
DGGGVKEEHEEEDEGELEEGEWMPSMEGFVRYLVDSRLVFGTIERVVAESTDVACNKICEKILEGRELEFYKWDTDAELLLKDAREKLNELSKHWTRKDRNLCLKEAAKCFQYLGKMVRLIIL

SEQ ID NO: 277845 - protein, 111 aa, Zea mays
  unsure (1)..(111): unsure at all Xaa locations
  Clone ID: MRT4577_18496C.1.pep
ILGYRMSLECARDALLQKTMDNKENTSELFSRSRDKLRVDLMNISMTTLSXKILSQDKEYFTKLVIDVVLRLKVYKWFNESWLSFTLNYDIFIYKILLFKKVAPTWNLLKF

SEQ ID NO: 277846 - protein, 316 aa, Zea mays
  Clone ID: MRT4577_184970C.1.pep
MPLIDAAASAVAPPPPRRVAQLRFFSTRRPGILSLTATSCSPSPPPPVAAEVPAAPQEAKSKPRPRRYPKQYPGESVGVAEEMRFVAMRLRNPKRTTIKDKSGTEDADAGAGVSEGEAEEDDGGGVKEEHEEEDEGELEEGEWMPSMEGFVRYLVDSRLVFGTIERVVAESTDVAYVYFRKSGLERSASISKDLEWFRKQGIAIPEPSTSGSTYAAYLTELSESNAPAFLSHYYNIYFAHITGGVTIGNKICEKILEGRDLEFYKWDTDAELLLKDAREKLNELSKHWTRKDRNLCLKEAAKCFQYLGKMVRLIIL

SEQ ID NO: 277847 - protein, 81 aa, Zea mays
  Clone ID: MRT4577_184971C.1.pep
GLLGARLPRGGARFYGNWYYIMRVAFTADKVSSSSRADVVKVIKEGKKRLPSEFARWAAGEEDADPYQITFDYRTLLVSDW

SEQ ID NO: 277848 - protein, 83 aa, Zea mays
  Clone ID: MRT4577_184972C.1.pep
CTHCYTRRDWREIRRVLLLYSTVGDSARDETGTPRAHAETWIYRSAVRLRSARTAHGLTRRLIGHFIGRLGLSGSRQQQLDGG

SEQ ID NO: 277849 - protein, 162 aa, Zea mays
  Clone ID: MRT4577_184973C.1.pep
MGLRWTVILMSAFCIRMIKGGFRYRALRLTGMGWEIVVLLRKIRHMNFCMCDKLINKLPHEFECVFIIILKRLDVFYFTYIGGTCGRLKRCQVAFPLPDDLLVLVHIEVRQSIGSLELASRCCLGIPQSDPQNWPLRVGRSVMVQDLLIPRRKLELAPRERS

SEQ ID NO: 277850 - protein, 91 aa, Zea mays
  unsure (1)..(91): unsure at all Xaa locations
  Clone ID: MRT4577_184974C.1.pep
RRLRMLLNNRNVVLGQDGQTNSGGDVIPNIGSPGQSGGSRNDIDILIKXXKKFALLQQQQQQQSHSQQQQLQQPALSGHHLQVQNSSPSAW

SEQ ID NO: 277851 - protein, 59 aa, Zea mays
  unsure (1)..(59): unsure at all Xaa locations
  Clone ID: MRT4577_184975C.1.pep
PPVCXDSLLSSGNNAEYFFFFFFFFFAFFFFFFFFFFFFFFWPHIKNTYIKKKGGWVGF

SEQ ID NO: 277852 - protein, 44 aa, Zea mays
  Clone ID: MRT4577_184976C.1.pep
PLAELLSTNTLRDGHQSHRGLLPSRLQVAPHRSRRRLRLVASDR

SEQ ID NO: 277853 - protein, 93 aa, Zea mays
  unsure (1)..(93): unsure at all Xaa locations
  Clone ID: MRT4577_184977C.1.pep
PPLHFSPPHPFSASSPLLPAALAPESPPRDWALHPPRIRCRTSSPIDIPRFPPPVPVAAPACFTSLPFPDPGGGRGFPXFARSCGGGLPPGAP

SEQ ID NO: 277854 - protein, 142 aa, Zea mays
  unsure (1)..(142): unsure at all Xaa locations
  Clone ID: MRT4577_184978C.1.pep
VGGVFFXVFGGVFFPVGGFLVLCCPGVLCGGVPVCGVRVVFRGPLPVPVSLCVGPGGRPXLPLGGCVFFCPLWGVPSLWWCFFSRVCVARFRGLLLVGRPCFGASLLPGFFCFXGGRPVFLGIKFSFPXPAXFGCYKKKXXX

SEQ ID NO: 277855 - protein, 154 aa, Zea mays; identical to SEQ ID NO: 205433
  Clone ID: MRT4577_184979C.1.pep

SEQ ID NO: 277856 - protein, 93 aa, Zea mays
  Clone ID: MRT4577_18497C.1.pep
ATPYALYKQASYHDFYWCVAAGLCITVVVLPLNAVELIMSIKSNPTHVPAVELCHNVVCPCDILLSSPVLDCPISICAQLKPCGFMLIDSSKT

SEQ ID NO: 277857 - protein, 80 aa, Zea mays
  Clone ID: MRT4577_184980C.1.pep
KDVHQWRLPSESCPEVNNLNCEGAVLVRITGEIRCDRGNSSLAYDAFYSNVLSLSYVTCLRLNWVIPLANWMTPLISCFL

SEQ ID NO: 277858 - protein, 54 aa, Zea mays
  Clone ID: MRT4577_184981C.1.pep
PFYGIIAIDRGESIRWGWGNYIDAQPFLSGKSYAQLSREHKIVLNFSGGSGEIC

SEQ ID NO: 277859 - protein, 114 aa, Zea mays
  Clone ID: MRT4577_184982C.1.pep
MLILEEQQSEIDQYNNDPLLSWKEVASESAFSAGGRVVHKYRSRLDPQLVEALICTKDWIRAKRKDPYNVTSLLDDLSNIIDTVSDDNVDHDGDASDVVDHNVDDNDIVQVEED

SEQ ID NO: 277860 - protein, 174 aa, Zea mays
  Clone ID: MRT4577_184983C.1.pep
MRLLQAEELFRKVLEVGSKNKAARLLGLDVGSKYVGVAISDEKNRVAMPLSVLCRTKTNINLMADDFKTLVSMYSIAGFVVGYPFKIYGQPCASAIQVSLAGELCKTGKLDDLPYAYWDENFTSKCVEALLHPLNLKDLDDAKTMTDKFAAVCILQGYLDNMNRKLRSTDKSEA

SEQ ID NO: 277861 - protein, 270 aa, Zea mays
  Clone ID: MRT4577_184984C.1.pep
MAPRLLACFGRGGGGATASAPDDATGEGQLEAPPAGPVLVELFGSQGCGASPEADAVAARLAQDSGSGDGAVVVLAFHVDYWDYRGWKDPFASSAWTVRQKAYVEALRLDTLFTPQVVLQGRAHCVGTDQDALALAVRDAPRYPAPAIKVTFQRPSPATLQASFTGTLRSRVEGPGGASVLVALYESGLVTDCGRGENKGKSLLNDHVVRRLEKVAAVREGASPKKTVSGTVQFPLWDGFRATKCGLVLFVQNAALQVLGVQHFDLPDNV

SEQ ID NO: 277862 - protein, 217 aa, Zea mays
  unsure (1)..(217): unsure at all Xaa locations
  Clone ID: MRT4577_184985C.1.pep
MHADWRATTMQPPLELSPPAPAPREVVVAEWPSKKICHCLVSTSASSEHRVWADLPDSLLHLIIALLSSFHDLLAFTGTCHSWRAAVFSFPSSIYAFVFPPLHLKAGLRKANRDYGTWYYLLSNYKWRLCDPVRTDLSLRRSAPRNAPNXLRYLGCSYGHLIFSCLEHLLLVDVYTCTKVKLPKLQANSGCAIYCGILMAPLSSSSSCLLLFSKSSM

SEQ ID NO: 277863 - protein, 136 aa, Zea mays
  Clone ID: MRT4577_184986C.1.pep
MMGVMAILGIQLNAISVVNLVMSIGIAVEFCVHITHAFMIGTGDKETRARQALSTMGASVFSGITLTKLVGVIVLRFAKSEVFVVYYFQMYLALVIIGFLHGLIFLPVLLSLCGPPTKWAKPKEQSQPPSASSERT

SEQ ID NO: 277864 - protein, 132 aa, Zea mays
  Clone ID: MRT4577_184987C.1.pep
MAILGIQLNAIAVVNLVMSIGIAVEFCVHITHAFMIGAGDRETRARQALSTMGASVFSGITLTKLVGVIVLRFAKSEVFVVYYFQMYLALVIIGFLHGLIFLPVVLSLCGPPPKSAKPIEQSQPPSASTERT

SEQ ID NO: 277865 - protein, 41 aa, Zea mays
  Clone ID: MRT4577_184988C.1.pep
LAGLKVSEFFLSIHQGLGQQYIAMKYMKLVSKPDTFYTEEA

SEQ ID NO: 277866 - protein, 51 aa, Zea mays
  Clone ID: MRT4577_184989C.1.pep
HLKAQTQFQNICESTGWFLSEELKVTYNTLHCHRPFITLNQMRRTGQQNKD

SEQ ID NO: 277867 - protein, 105 aa, Zea mays
  Clone ID: MRT4577_18498C.1.pep
MGRTIKKAKKAQSKKSKKKTESSSSSNPAIASGPAKVWQPGVDTLEDGEELQFDPQAYNYLRGFGIGWSCLSFDVVRDQLGLVRSEFPHTFYGVAGTQVVLIFMP

SEQ ID NO: 277868 - protein, 72 aa, Zea mays
  Clone ID: MRT4577_184990C.1.pep
WLYDLRVLRAAQGEVAQDRPPFHVILFGFLMQAVLLNPTPCTQVRSRTFGDHFKNSVNINVWAYTSILVYGN

SEQ ID NO: 277869 - protein, 72 aa, Zea mays
  unsure (1)..(72): unsure at all Xaa locations
  Clone ID: MRT4577_184991C.1.pep
MTEEPFLPRERVFRQQHYSQNLPKPTYLKGGXHKNTSDARGLALAACTMSMMERGVANMFNEAANTEGEATG

SEQ ID NO: 277870 - protein, 56 aa, Zea mays
  Clone ID: MRT4577_184992C.1.pep
MCAHHAREFHACHLDYLISCKVLCNCHNNLGPYASHPGKAGNDYTRSCDPITECRG

SEQ ID NO: 277871 - protein, 93 aa, Zea mays
  unsure (1)..(93): unsure at all Xaa locations
  Clone ID: MRT4577_184993C.1.pep
GPGKWGDKWRRRXLRDHIQGIAKTKIRRLARRGGVKRISRLIYEETRGMLKIFLKNVIRERGAYTEXARRXTVTAMYIGXALRRQGRTLYGLP

SEQ ID NO: 277872 - protein, 77 aa, Zea mays
  unsure (1)..(77): unsure at all Xaa locations
  Clone ID: MRT4577_184994C.1.pep
MSCNCGSSCGCGSGGKCGKKYPDLEETSTAAQATVGRGVAPENKAAPEFLNDAAXSGQAANGRTCSGTCKXCEPCNC

SEQ ID NO: 277873 - protein, 130 aa, Zea mays
  Clone ID: MRT4577_184995C.1.pep
RKARFGRTRAPPVGKVPEVPKKPGGPKVFLPAVQFEQVFPAGLVPKGPPPESILETPPVLLGVNKDQNFFGLARGSFWVPHVGPFWGVSAQMGVFFPFPLFRFKDIRFFLVFPLNRPDLIFLGGETLARP

SEQ ID NO: 277874 - protein, 105 aa, Zea mays
  Clone ID: MRT4577_184996C.1.pep
FQPITHTCLLRGKEILSLQLQVILLCFLTITQSNQEGHVHLKRRGFDHKARPAFRYENLIDLCTVVPITAAVFSGFSASTVTAIGLESATFWSMVLSEKNQAPSL

SEQ ID NO: 277875 - protein, 132 aa, Zea mays
  Clone ID: MRT4577_184997C.1.pep
IINPLNFDPDFVHRAWLPPWLAAQYAHYVTSSFVGGCLRSLELTWETCYAECFCAFFILVSFISNFKMNYTNKMTIYMSTYLTFQASEKLAHAKKWVETHIEATKMKWISVKEKLVVLKNVEPYVQKVSTRC

SEQ ID NO: 277876 - protein, 315 aa, Zea mays
  Clone ID: MRT4577_184998C.1.pep
MAMQTGVATSKVLILVGAGMTGSILLRNGRLSDVLGELQEIMKGVNQGTSSGPYDIALIQAQIRNLAQEVRDLTLSKPITILNGKSDSGGSLSSYILPAAAVGAMGYCYMWWKGLSLSDVMFVTKHNMANAVQSMSKQLEQVSSALAATKRHLTQRLENLDGKMDEQVEVSKAIRNEVNDVKDDLSQIGFDVESIQKMVAGLEGKIELLENKQDVANTGIWYLCQVAGGLKDGINTRFFQETSEKLKLSHSAQPENKPVKGLEFFSESTMEQKVADSKPIAVTVDAEKPEKTAAVMGTTVHRSIRFSYRKAGLAL

SEQ ID NO: 277877 - protein, 119 aa, Zea mays
  Clone ID: MRT4577_184999C.1.pep
HEDVPSLVDSGYNLVSSLGVGVGGRRAHRSEEDLMPFPGGGTCSEGEASFPWGNLDWSVMNVKVSWCHRQGHHLVHLLYRNSGAVLVKRLGRTNDEVARAPGGAGVDITTHFRVLYCPT

SEQ ID NO: 277878 - protein, 77 aa, Zea mays
  unsure (1)..(77): unsure at all Xaa locations
  Clone ID: MRT4577_18499C.1.pep
PMHKLSSVLQEKFYLKHSKHNTRSQTTYGCASCAGXFKSPGAGETRLTCSALAGDVSXCWGLPEHLPSSWASPSPLL

SEQ ID NO: 277879 - protein, 56 aa, Zea mays
  unsure (1)..(56): unsure at all Xaa locations
  Clone ID: MRT4577_1849C.1.pep
KNLGFSPPHVGKVFKSPPLPPRYLKKKRRVRVSPPPRKGLHLPPCSPPPPQKNXSG

SEQ ID NO: 277880 - protein, 115 aa, Zea mays
  unsure (1)..(115): unsure at all Xaa locations
  Clone ID: MRT4577_184C.1.pep
DITRRETFNHFARCLEDARPGAGANMTATLIGNKGDLSHRRAVSYDECEQLSKEHALLLMEAFAKTAQNIQEAFIKTAGTXIYKTIQDGLSEASNDYHGIKGLYTGPNLSGRGTG

SEQ ID NO: 277881 - protein, 72 aa, Zea mays
  unsure (1)..(72): unsure at all Xaa locations
  Clone ID: MRT4577_185000C.1.pep
VAPPGVGFDPPRGGIYGLVKKIPWLCPTRFRVWSCVPPSGWAVEEWGVTGPLFMGGQGLGFFLXGGVRGVFP

SEQ ID NO: 277882 - protein, 82 aa, Zea mays
  unsure (1)..(82): unsure at all Xaa locations
  Clone ID: MRT4577_185001C.1.pep
PRTLSMADYGRDSNGSQFFITNVXKTVCAXLDGRHVVFGNVELGIDVVRKIDAEGQLNGVHNAMVVIDNSGHLPVHDAGGTS

SEQ ID NO: 277883 - protein, 88 aa, Zea mays
  Clone ID: MRT4577_185002C.1.pep
SSIKLHANRRASAVAASHIMAMISTLHDDRAAMQLEALQDLRLIDQQVDHDHLAIDDLYRSLTHTDNWLPDLDAVPAHCLSLLRNDDP

SEQ ID NO: 277884 - protein, 465 aa, Zea mays
  Clone ID: MRT4577_185003C.1.pep
GTLGSRPGNDRNLHEPGVSAPGTTPSGVDCGPGALMMPSAPAMGTVAGLNRGMPGAKPGFPRISSPVMLNAVPSGNLFPNSGQGVLNTVNVHPGAISGPGNSILRPHDPMQTFRPGQGMEEHRQMSEFDMPVSQGSGQATIQFSSMNSSFSSPPVQQPQRPHQMSQSLHMFGNPHHSQIQGTSSSSQQQAYAVHLAKERQMQQHMAPQQHSDLSGASAVPNVQSNTQTLQQGQTSSANSAPCSKSQHQRQQAAQNLPDSSSSPNQPATFTQQKQKKQQEQQQSRQNEPQRNRGSQQAKLMKSLGRGNMMAQTPPIDCTPTNAASTPSKNHVSEKLVQHGQGHFPANTTPVPSMPQPRLVTSLPQSPTKVADIGNQGLKKGGSLGQAMLALQQPPHGSKSTLTTQLQQRQVNPPQNNNGRAVVQQNRQMNSDCRTDLHVRSGPSQSDGSNIHATECRFRVALYCHL

SEQ ID NO: 277885 - protein, 109 aa, Zea mays
  unsure (1)..(109): unsure at all Xaa locations
  Clone ID: MRT4577_185004C.1.pep
IICASVPYNNKRGQILIHRREKLVKRRGRGGKLYHRDPMEKKTNWHLHNQNSLQISHQSHSSSLTMSSSSLGGRTTMTTSAAATAMPCSTSXFPLFTTSRAFLSRTYTP

SEQ ID NO: 277886 - protein, 122 aa, Zea mays
  Clone ID: MRT4577_185005C.1.pep
SRPKRPLDGGHPFCFLSGASSVCHCIKKANAVQGSNTMPDPSQRRKDLMVRYSDVKIQHNALLYLIILQCSKPAGKADKRPDICVVSTINIIACIYIYIYIYIYIYINKYIYIYGWIYLYIF

SEQ ID NO: 277887 - protein, 137 aa, Zea mays
  unsure (1)..(137): unsure at all Xaa locations
  Clone ID: MRT4577_185006C.1.pep
PASLPSPFSPSVPAHPPCPWTVVDLRVLPPVAGEAPDMNQRSFKYACVLHTLTAARERFMTMAMAXLRKIRTTNYDCAATYASGHRYSIANXIVMPSXSECDAPMIDXPLSAIEAGISKDGHTTKHALLEFTLSWLL

SEQ ID NO: 277888 - protein, 83 aa, Zea mays
  Clone ID: MRT4577_185007C.1.pep
CRIFARFSWGPCPHAGSSMSHRQQPHSAGAVGVVARGRQRTFSRPSVPPPWRRRGEYQCRRRHLVIDPWVWCRAFLGCLLPAW

SEQ ID NO: 277889 - protein, 61 aa, Zea mays
  Clone ID: MRT4577_185008C.1.pep
SKCWRCCKPNPIPFAFVGKFSKFSCALCISKIIFPYWRIACVPSPPKYHLGICYVNKWVPP

SEQ ID NO: 277890 - protein, 524 aa, Zea mays
  unsure (1)..(524): unsure at all Xaa locations
  Clone ID: MRT4577_185009C.1.pep
SVPPRLLHGKSSRAYGSIWESTVRNVKFVSDKTVKPVYIITPTEAAHIQATVACGRKHGLRVRVRSGGHDYEGLSYRSAKPETFAVVDLSMMRQVRIDGKAGRETRTXQCNPLTCYATSRPLALALLFCALSACSHAAISYPPSALSTAWVDSGAQLGELYYAVAKMTPSLGFPAGVCATIGVGGHFSGGGFGMLLRKYGTAGDNVIDAKVVDANGTLLDRKSMGEDYFWAIRGGGGESFGIVVSWQVQLVPTRPPTRPPTRPRGVKDGAIDLINKWQQVAPSLPDDLMIRIMAMEQDAMFEALYLGTCKDLLPLMASRFPELGVKQEDCNEMPWIQSVAFIPMGKSATVMDLLNRTSNIKAFGKYKSDYVKDPIPRDVWEKIYTWLAKPGAGVMIMDPYGARISSIPQDATPFPHRQGVLFNIQYVSYWFGEGDGAAPTQWSRDMYAFMEPYVSKNPRQAYANYRDLDLGVNEVVGDVSTYDSGRVWGEKYYNGNFERLARTKAKVDPCDYFRNEQSIPPLLK

SEQ ID NO: 277891 - protein, 481 aa, Zea mays
  Clone ID: MRT4577_18500C.1.pep
MGRTIKKAKKAQSKKSKKKTESSSSSNPAIASGPAKVWQPGVDTLEDGEELQFDPQAYNYLRGFGIGWSCLSFDVVRDQLGLVRSEFPHTFYGVAGTQAEKASWNYIGVFKLSNISGKKREPIPASAVEADTDVDSDSSSDEEDEEINEDTKPILHLKKVAHAGCVNRIRSMTQKPHISATWGDTGHVQVWDLSSFLNSLAESGTAAPKEDDIIHKHLPLKVFSGHKDEGYAIDWSPLVTGRLVSGDCNKCIHLWEPTSNNWNVDANPFVGHSASVEDLQWSPTEADIFASCSVDGTISIWDIRTGKKPCISVKAHEADVNVISWNKLASCMIASGCDDGSFSVRDLRSIEEDSLVAHFEYHKKAITSIEWSPHEASSLAVTSEDHQLTIWDLSLERDAEEEAEFRAKMKEQANAPEDLPPQLLFAHQGQRDLKELHWHPQIPSMIISTAIDGFNVLMPSNIDTTIPGSTDAAMPSAEPQH

SEQ ID NO: 277892 - protein, 52 aa, Zea mays
  Clone ID: MRT4577_185010C.1.pep
QILNQRLIVYREARAGEQRFRSGEQRLGCCLPTPASAASSAVDRAAEQRRGG

SEQ ID NO: 277893 - protein, 50 aa, Zea mays
  Clone ID: MRT4577_185011C.1.pep
RFSASILSCNRINKHFYINPSHSSSSTDMAFTHSARYSHYYKCTPQYQCL

SEQ ID NO: 277894 - protein, 236 aa, Zea mays
  Clone ID: MRT4577_185012C.1.pep
MRALLHLRRWQSLPLIARTSSTITFSSSSSEPHEIPTIYSFLQPSIFAPRPRSQPPQPPPPPPPPPPGAHDPARRKTLPVADAAAVESDLLAAVSEGRSDDAWLAFKSLAAASCSPSPHAAAALVSHLAAPAGQHRLGLKRAFAAAVFLLEKSPHAAPVPEPALEALFSAFVAAGSAAPAVALARAMLRCGRRLPAFSVWGHPLIELTRTDPGAFAAFLTLFDEGCKLVVEEKSPA

SEQ ID NO: 277895 - protein, 62 aa, Zea mays
  Clone ID: MRT4577_185013C.1.pep
AAAAAAVDAARAGGPLDADTAERVVGGVRVRERRYGARRLARFVQAHSGRAGEAARAEARVR

SEQ ID NO: 277896 - protein, 159 aa, Zea mays
  Clone ID: MRT4577_185014C.1.pep
MEVSAECAGGGSVKKEADLFLVDDLLDLPCDDDDEETVVGDWEGNGSKQAAVLEWGCGAGGEEGAAGNASKNESSAVTTALDSCNNSISVSGLADGDFSGGLCEPVKLPPKPLVVFFHEFRRTVRFFTRFVGRIHGSADPSELHRHPLKSSLPMGKRRP

SEQ ID NO: 277897 - protein, 37 aa, Zea mays
  Clone ID: MRT4577_185015C.1.pep
FAVIQLISHLDQLEQQTTSSLIHSFRIPRSSRAGLAR

SEQ ID NO: 277898 - protein, 50 aa, Zea mays
  Clone ID: MRT4577_185016C.1.pep
LNFQPSLKFEICTVKEISVRCNYIYFILSTLFIYLGKNIKTSRQYGIFNV

SEQ ID NO: 277899 - protein, 46 aa, Zea mays
  Clone ID: MRT4577_185017C.1.pep
SLELLLNGSPLKCLFSCAEPPAVMCALLVSSAAQSSSGQGELSFFS

SEQ ID NO: 277900 - protein, 107 aa, Zea mays
  unsure (1)..(107): unsure at all Xaa locations
  Clone ID: MRT4577_185018C.1.pep
MGLFPCTVRLDLGCTPRAYSVAAAADAYTTYGVTYGGAHLPGMSYTAEDAVSKEDDLVNCARKGXIWAKTSNVACCAENMIHAGASRYHCNGVGVNLRAASGHADCM

SEQ ID NO: 277901 - protein, 66 aa, Zea mays
  Clone ID: MRT4577_185019C.1.pep
PKKIFFFLAPKNQPGGTRYPPNLFCPPFCSRFSKRPTKIFGGFKAPPFPPHLTKRPKKSPPKLFPR

SEQ ID NO: 277902 - protein, 80 aa, Zea mays
  unsure (1)..(80): unsure at all Xaa locations
  Clone ID: MRT4577_18501C.1.pep
ERPSGLPKIGIVGGGGEKKKNRVFRLATPPGRLGAGLWAQGGGSQCTIGXXDGVWGAHIFMGPRGYVLFLYIYPKKKSKL

SEQ ID NO: 277903 - protein, 39 aa, Zea mays
  Clone ID: MRT4577_185020C.1.pep
RAFRLFPITLAALVCAVLSVNAKSAIPSSPLPINSYLRG

SEQ ID NO: 277904 - protein, 265 aa, Zea mays
  unsure (1)..(265): unsure at all Xaa locations
  Clone ID: MRT4577_185021C.1.pep
FGRGLPRPVVFVGALPSAAASISESDDLAADLFTRFACSPVFLDPSLHNDFYNXLLQAYLWPIPQLQYLLPFTRSSDSGCLSFNEDLYRAYLTANTQYADRVFEHLNSDEDLVLIHDYHLFALPTILRRKSPRARIGFFLHSPFPTSELFRAIPVREELLRALLNADLVGFQNYDYGCHFISACSTLLGITSRAHGDYICIDYFGRAVVVNILSVGVDMVRLREVLSSPETAAKAKEVATKFAGRQVLIGVDDGDLFTGLTSSSW

SEQ ID NO: 277905 - protein, 242 aa, Zea mays
  unsure (1)..(242): unsure at all Xaa locations
  Clone ID: MRT4577_185022C.1.pep
HWDPRGRPGYCFAPHTDAQRIGLCRQERVLFASYLRMKAVRXMIMGHPLDFFNHHLNRLLPPHRADFYSIIHAMTALPEAIKLLYPPLHKDLPHGNILDVVGDFCADTFALHENALRANCPAFQHAGPMLGFRALTLGTSYPELYDMHRXTIFEAAITMTNQAAQVIPDIMSPLDGTPQQLAHQVTLIRQDDEKVFXTMGLQTIGNKVGTMIEIPTAALEPDDIAEQDEFFSFGTNDLTQMT

SEQ ID NO: 277906 - protein, 69 aa, Zea mays
  Clone ID: MRT4577_185023C.1.pep
KTRFLFVTNLVVLRTMVLLRPCFGANYFCYFSKKYYSFVKYFGFEGPCLNTMYFWSFRKKIMGCEILWF

SEQ ID NO: 277907 - protein, 42 aa, Zea mays
  Clone ID: MRT4577_185024C.1.pep
RRPGKNIIVLLLQFSTVKWLEICIRPRHIWRCAEYPIYTAIY

SEQ ID NO: 277908 - protein, 123 aa, Zea mays
  unsure (1)..(123): unsure at all Xaa locations
  Clone ID: MRT4577_185025C.1.pep
GGIGFNTQPPPCAKRGKGGSGANKLRMSLGLPVEATGNCADNXTGAKNLYIISVKGIKGRLNRLPYVCVGDMVMATVKTGKPDLRMTAMPAVIVRQRKPSXSKDCGYMYXEHNAXAIEDPKGQ

SEQ ID NO: 277909 - protein, 67 aa, Zea mays
  Clone ID: MRT4577_185026C.1.pep
AKRERENSNEHSHITNDEMKHRLGVTTDGVIKAVNHGVKINFCMLGQRAAQAESKKKYWHKKSYAID

SEQ ID NO: 277910 - protein, 613 aa, Zea mays
  Clone ID: MRT4577_185027C.1.pep
MLTATPLPHQLLATFLLVLASATQPAVPASTDRAALLAFRASLSPPSRAALSSWSGPLSPSWLGVSLHPATAPAPSVTTPSVAELSLRGLNLTGVIPAAPLALLRRLRTLDLSANALSGELPCSLPRSLLALDLSRNALSGAVPTCLPSSLPALRTLNLSANFLRLPLSPRLSFPARLAALDLSRNAISGAVPPRIVADPDNSALLLLDLSHNRFSGEIPASIAAVRSLQGLFLADNQLSGDIPPGIGNLTYLQVLDLSNNRLSGSVPAGLAGCFQLLYLQLGGNQLSGALRPELDALASLKVLDLSNNKISGEIPLPLAGCRSLEVVDLSGNEISGELSSAVAKWLSLKFLSLAGNQLSGHLPDWMFSFPLLQWLDLSSNKFVGFIPDGGFNVSEVLNGGGGQGTPSESVLPPQLFVSASVDTVSWQLDLGYDVQATTGIDLSGNELCGEIPEGLVDMKGLEYLNLSCNYLAGQIPAGLGGMGRLHTLDFSHNGLSGEVPPGIAAMTVLEVLNLSYNSLSGPLPTTKFPGALAGNPGICSGKGCSENARTPEGKMEGSNHRGWLGGWHGENGWVSLGAFCISTMTSFYVSLATLLCSSNARNFVFRPVRVEY

SEQ ID NO: 277911 - protein, 183 aa, Zea mays
  Clone ID: MRT4577_185028C.1.pep
MYMRPPTANDRPPSGGGGGAAAGAGAAAGDDDFAFYCSYLQDADAAAASATSTLALAVDDPNPNPSAAGMTNGRRRKQRGAEDAGAAGEGEEEAKKDGKKRSIAKLLTSLAALEAEEHADRAGAADASRRELALLESNADTRSQATMDYYAKMESSFDATAESEAAARSKRSRLAASAATAAV

SEQ ID NO: 277912 - protein, 129 aa, Zea mays
  Clone ID: MRT4577_185029C.1.pep
PATGIGPFLTYWGVKKPGGGGLQNFGAFKLPTSVVPFDGEPINFTASQGDLKLVPITTYGFAAENKQNSTPQVGALVTYYGTQVPPHMIGVKGLKLFLETKSPNQWGPRSQGGCFDKFAPAVKYPFAPQ

SEQ ID NO: 277913 - protein, 94 aa, Zea mays
  Clone ID: MRT4577_18502C.1.pep
PRVRSKPSNSSSFPSNTLPLSSLYALGATVSLSIISRPGCQQPPEIERKKDSGVFFGGGCGFRMPLHYPRYKKADYYSIPEWRVDLLLREYILP

SEQ ID NO: 277914 - protein, 172 aa, Zea mays
  Clone ID: MRT4577_185030C.1.pep
MYMRPPTANDRPPSGGGGGAAAGAAAGDDDFAFYYSYLQDADAAAASATSTLALTVDDPNPSAAGMTNGRRRKQRGADGAGAAGEGEEEATKDGKKRSIAKLLTSLAALEAEEHADRAGAADASRRELALLESNADTRSQATMDYYAKMESSFDATAESEAAARSKRSRLAA

SEQ ID NO: 277915 - protein, 103 aa, Zea mays
  Clone ID: MRT4577_185031C.1.pep
RNSLFPRWGFSQRGPPGSPFQNFAHLDWQWDPPFLGPFRRGGWGVSPQGALSFCRALSPVSFGFFPFFFGPFGGFPPEGFNWGLPFGVPFWGFRALCPKKFFW

SEQ ID NO: 277916 - protein, 48 aa, Zea mays
  unsure (1)..(48): unsure at all Xaa locations
  Clone ID: MRT4577_185032C.1.pep
TKKGQCHSLSXFIVEMSMDLTFQRSLNKKNSIKQEAKAQDKLLGFLEI

SEQ ID NO: 277917 - protein, 47 aa, Zea mays
  Clone ID: MRT4577_185033C.1.pep
DHAFSAVSVMHVNMVQNASMMILSATLSSFWKSGLKLTRARHACVTN

SEQ ID NO: 277918 - protein, 109 aa, Zea mays
  Clone ID: MRT4577_185034C.1.pep
LRLRTKPIRIGTPIDYLRYIVLPMPSQARFGVNKCACDFLRLIVNAIRLMAAFDGFPFFAGFLKEKKHDAVRTWCASALSKGRQRRKFQRFMCPRDPVPEAARGKAIDY

SEQ ID NO: 277919 - protein, 166 aa, Zea mays
  unsure (1)..(166): unsure at all Xaa locations
  Clone ID: MRT4577_185035C.1.pep
MVGSPALAGVHSFXASAYKNILVPSAPVPAAARRAPLPVVVKNKGATPQNERIXRHERLHKKVRRTTVRPRXLSVFRSNKHLYTQVIHLSKQCTLPSSSSMHKSHSKEIEYSSGSTIEITQKIREVIDKTCLXKLITKGVFELGDFHYHDRIEALGEYALEHGLEF

SEQ ID NO: 277920 - protein, 64 aa, Zea mays
  Clone ID: MRT4577_185036C.1.pep
QAKVFWWIVFPTLVNSKGRVKSTPPAFPSFLFGSFYNPRLKLCVKMRFLSLKFKKCSLYNFVFS

SEQ ID NO: 277921 - protein, 76 aa, Zea mays
  Clone ID: MRT4577_185037C.1.pep
MNSSGDGRMSYADNSGFQRAIASVTKNARQELAAALYRARCRPSSMVIADLGCATGPNALLMVLDAVDAVLAVADE

SEQ ID NO: 277922 - protein, 87 aa, Zea mays
  Clone ID: MRT4577_185038C.1.pep
MASEYVVGKSRGDTAVTTIVNLAEEAKLAHEGVKAPGHQILTICKSLVAGGVAGGVQWPLLPKRKKSARRPLEGFNIGMDIWALTLL

SEQ ID NO: 277923 - protein, 343 aa, Zea mays
  unsure (1)..(343): unsure at all Xaa locations
  Clone ID: MRT4577_185039C.1.pep
MASEDVVGKSRGDTAVTTIVNLAEEAKLAREGVKAPGHQILTICKSLVAGGVAGGVSRTAVAPLERLKILLQVQNPHSIKYNGTVQGLKYIWRTEGLRGLFKGNGTNCARIVPNSAVKFFSYEQASKGXAQLTPLLRLGAGACAGIIAMSATYPMDMVRGRITVQTDKSPYQYRGMFHALGTVYREEGFRALYKGWLPSVIGVVPYVGLNFAVYESLKDWLLQTNSFGLANDNELHVVTRLGCGAVAGTIGQTVAYPLDVIRRRMQMVGWSHADSIVTGQGKEALQYNGMIDAFRKTVRHEGVGALYKGLVPNSVKVVPSIAIAFVTYEVVKDVLGVEMRISD

SEQ ID NO: 277924 - protein, 78 aa, Zea mays
  Clone ID: MRT4577_18503C.1.pep
AKASGGTAAVGGQQPERGTFSCGFRMPLHYPRYRKADYEAMPEWRVDCLLREYGLPVAGDVEDERRFAMGAFLWPSQY

SEQ ID NO: 277925 - protein, 107 aa, Zea mays
  Clone ID: MRT4577_185040C.1.pep
LHCLRGMVDRYDEVTFEADLVMTPGWHMLPRGRHGLHAIMPQGASSSLQSPPYGLECSCHHEPEVSPVHAGFSQSLCRLHSLRQAILRSVRRCKHQAWSCLFKQCLL

SEQ ID NO: 277926 - protein, 116 aa, Zea mays
  Clone ID: MRT4577_185041C.1.pep
MASEDVVGKSRGDTAVTTIVNLAEEAKLAREGVKAPGHQMVGWSHADSIVTGQGKEALQYNGMIDAFRKTFRHEGVGALYKGLVPNSVKVVPSIAIAFVTYEVVKDVLGVEMRISD

SEQ ID NO: 277927 - protein, 259 aa, Zea mays
  Clone ID: MRT4577_185042C.1.pep
MPNSASAAILVTGMLITGCSNSLWSKFQDQQCVENCDNPDPTTHRNFEQPVWQTLNMFVGEACCLVAYHLIQRVSRRRGIRTQSDYTALPQEARDEEELQEEEEQQQESTRGNLQSAASLSDSLIQPAHLKPHIRPIPTPLAVHGPSPAPLATSLEPQLLVNRHEPSVPQLVGLQKFIFWWPALFDICGTTLMNAGLLFVPVSVFQMIRGALPIWVGLFSIVFLNRHLSVEKWISLAIITSGVALVGYAGSLQTCPSSY

SEQ ID NO: 277928 - protein, 71 aa, Zea mays
  Clone ID: MRT4577_185043C.1.pep
MTAIITEINEKIGAAGVVSQECKTVVSQYGQQILDLLLAETQPAKICSQVGAVHFDGTHGVSAGIRSVVDD

SEQ ID NO: 277929 - protein, 94 aa, Zea mays
  unsure (1)..(94): unsure at all Xaa locations
  Clone ID: MRT4577_185044C.1.pep
PPKDQTAPLPPGANPSGGGNLPVGGEPPDPPYPPDTTPPGPXPPEAAPPPPRLTPXGPPPKTPVPCDPPQPXPPTHRRPPPXRAPPGGYATKHF

SEQ ID NO: 277930 - protein, 355 aa, Zea mays
  Clone ID: MRT4577_185045C.1.pep
MASEDVVGKSRGDTAVTTIVNLAEEAKLAREGVKAPGHQILTICKSLVAGGVAGGVSRTAVAPLERLKILLQVQNPHSIKYNGTVQGLKYIWRTEGLRGLFKGNGTNCARIVPNSAVKFFSYEQASKGILWAYRQQTGEEDAQLTPLLRLGAGACAGIIAMSATYPMDMVRGRITVQTDKSPYQYRGMFHALGTVYREEGFRALYKGWLPSVIGVVPYVGLNFAVYESLKDWLLQTNSFGLANDNELHVVTRLGCGAVAGTIGQTVAYPLDVIRRRMQMVGWSHADSIVTGQGKEALQYNGMIDAFRKTVRHEGVGALYKGLVPNSVKVVPSIAIAFVTYEVVKDVLGVEMRISD

SEQ ID NO: 277931 - protein, 139 aa, Zea mays
  Clone ID: MRT4577_185046C.1.pep
DDDLHADSGQRWLAASKHRDVFSAADTVAVSQQSPASGHRLVVIHDETTIMAPPVQVVVVQVEDKCSVVRHGETSGSSSSSISSSASEEEDVSFLESNREMLEDDADRSTSSDGSWRVEKVKRLINMVTLVSLLILLYT

SEQ ID NO: 277932 - protein, 212 aa, Zea mays
  Clone ID: MRT4577_185047C.1.pep
MTAIITEINEKIGAAGVVSQECKTVVSQYGQQILDLLLAETQPAKICSQVGLCTFDGTHGVSAGIRSVVDDEAGKSNGGLKSDPMCNACEMAVVWMQNQLAQNKTQELILNYINQLCERLPSPMGESAVDCGSLASMPDIAFTIGGKKFKLKPEQYILKVGEGQAAQCISGFTAMDIPPPRGPLWILGDVFMGVYHTVFDYGKLRVGFAESA

SEQ ID NO: 277933 - protein, 63 aa, Zea mays
  Clone ID: MRT4577_185048C.1.pep
IYCVYVSTYKLCLLSMYCFRVPGYILIECGYMFAIAPDHIGQSLVESAVCPGSTDMKENSINL

SEQ ID NO: 277934 - protein, 61 aa, Zea mays
  Clone ID: MRT4577_185049C.1.pep
MVMCAAPELLDWFSRAFYVCSKSGGQDGGAALSKKILEAVGGKKFLYPQTIRCQQTTMGAS

SEQ ID NO: 277935 - protein, 106 aa, Zea mays
  unsure (1)..(106): unsure at all Xaa locations
  Clone ID: MRT4577_18504C.1.pep
LLISHRVRCVLHKGPMLHLLWSDPHDRCGXCIFPRLAGYTFLHHISQLLKHTHNLILVAPSHQLHIXSIRXAHQQNVLTIFYAPKYYSRSPYMAYILEVDKCDNHT

SEQ ID NO: 277936 - protein, 96 aa, Zea mays
  Clone ID: MRT4577_185050C.1.pep
ENHDHQSMMSIQVHPLPIYHDVHSGPGHLGSTMYTPSNNPLQKASVLLQVSNYKDNLVALHQTFWKKNVFYIKELLLRPMVYFQHCLIIPLINFDA

SEQ ID NO: 277937 - protein, 86 aa, Zea mays
  Clone ID: MRT4577_185051C.1.pep
KVGGGKNNFLSPQKWGNPLMGGPFSGGPYAKGGEAGLTFSRAESPKGFPENPGWDFVVGDPPAPFFGPRASLENFKGGGPPKTGQA

SEQ ID NO: 277938 - protein, 90 aa, Zea mays
  unsure (1)..(90): unsure at all Xaa locations
  Clone ID: MRT4577_185052C.1.pep
DDVLDVQLAFLRLLCSRAYXNITYHCKNSIAYMDQASGNVKKALKLMASNEGEFKAEGNSKFTYTVLEDGCTKHTREWSKTVFEYRTRKA

SEQ ID NO: 277939 - protein, 61 aa, Zea mays
  Clone ID: MRT4577_185053C.1.pep
RYQVSSFFLNHNTGGELVRNRMFCVRKQVQTITQSFENLISFSFKGKPGVSPKNNKFGILL

SEQ ID NO: 277940 - protein, 114 aa, Zea mays
  Clone ID: MRT4577_185054C.1.pep
RGSGGSRSRKARKQKAKGSRPFREPRGQAPQRSRKQRNKQTVAGHQGQHFLPAVSRVAVVNPVAYWHQQVRASNPLGLANVAACQQQRQLQQFIPAVSQLAKVSRLVYGTAAFI

SEQ ID NO: 277941 - protein, 82 aa, Zea mays
  unsure (1)..(82): unsure at all Xaa locations
  Clone ID: MRT4577_185055C.1.pep
MGPEDIVEGGGLQSYVEYRRFSGGLAWATSNESQEKAFASYGEILDSKGITXDRXTGRSRGXYGFGTLPSENYMLDANKNMN

SEQ ID NO: 277942 - protein, 280 aa, Zea mays
  Clone ID: MRT4577_185056C.1.pep
GSVSRRGPTELASTLHAAAVLLREFDGWSWFINLSASDYPLMPQDDILHIFSYMPRDLNFIEHTSNIGWKEYQRARPIIVDPALQVPNKTEVVTTKEKRSMPSAFKIFVGSSWVMLSRSFLEFCLLGWDNLPRTLLMYFTNFLSSSEGYFHTVICNSEYYQNTTVNSDLRFMAWDNPPRTHPANLTTEHFDAMADSGAPFAHSFANDNSVLDMIDAKLLGRAPDRFTPGGWCLGSSVGGKDPCTFLGRSFILRPTKGSAKLEKLLLKLLEPDNFRPKQCK

SEQ ID NO: 277943 - protein, 88 aa, Zea mays
  Clone ID: MRT4577_185057C.1.pep
GAYTSDDAEPSLGSTNCSSVSVPVRWIEREMEPGRLNYNQLVREGFLLEWPPRSTADCDECKERGGECRFVDVSFQCICRDGQAILKG

SEQ ID NO: 277944 - protein, 143 aa, Zea mays
  unsure (1)..(143): unsure at all Xaa locations
  Clone ID: MRT4577_185058C.1.pep
RACPTSRTQSEXVWPLTRHVGPPIGAEHLAGDDLHAHWDSHTEDDDPGRAEATPGLPDSAARGQGLGGRARGGGEEEPEEAGARIRLGLLVICCSLTLSLGDKDAVLGHGARPDGQRQSNLSMTQGGPKLFGLSFLPCLSRVT

SEQ ID NO: 277945 - protein, 104 aa, Zea mays
  Clone ID: MRT4577_185059C.1.pep
CGSRGERRGAPCAPQTPTATAACSSSGRTRWPASSLSRRPTSTSRSPSLGTNCSWMDMIYDRTVITWSMPVGVKSVICMDWIGCDVMLFFPFSILVDVYVVVTY

SEQ ID NO: 277946 - protein, 39 aa, Zea mays
  Clone ID: MRT4577_18505C.1.pep
KFSVKIFVRASLGHPIKLLSISALKMLQIFNETNFYLNF

SEQ ID NO: 277947 - protein, 74 aa, Zea mays
  unsure (1)..(74): unsure at all Xaa locations
  Clone ID: MRT4577_185060C.1.pep
HASAHASADAWEPLHRYQATYGVVLQSFLQQQPHGELAALMADHVAHHLTAMCGLHLHEPXPXPCNALTTGAYY

SEQ ID NO: 277948 - protein, 487 aa, Zea mays
  unsure (1)..(487): unsure at all Xaa locations
  Clone ID: MRT4577_185061C.1.pep
MAGLHFLLVPLVAQGHIIPMVDLARLLAGRGARVTVVTTPVNAARNRAVVESARRAGLXVEVAEIAFPGPGHGLPXEGLENMDLLTRREHFLPFFQAAWKMDAPLEEYVRSLPRRPDCLIADSCNPWXTAEVCARHGIPRLVLHCPXSTYFLLAMHSLSKHGVHDRVADELETFEVPDFPVPALANRATFRGFFQWPGAEGFQRDVAEAEATADGLLLNTFRDIEGVFVDRYAAALGRKTWAIGPMCASGGLDADARASRGNRPDVDAGLFVSWLDARPPSSVLYISFGSLAHLPAKQVIELGRGLEVSGRPFVWAIKEANSNTDVQAWLAEGFEERVRDRGLLVRGWAPQVTILSHPAVGGFLTHCGWNAALEAIAYGVPVLTWPSFSDQFSSERLLVDVLNIGVRSGVKVPAMFLPKEAEGVQVSSADVEKAVGELMDEGPKGTARRGRAKDLAAKAKVTMMEGGSSYADLTDMIHHVAVLGSRQ

SEQ ID NO: 277949 - protein, 57 aa, Zea mays
  Clone ID: MRT4577_185062C.1.pep
INQCYRNTFLCCPRGGQANFFWCTLSLQTSRNPGPGFLTAPFKPPRWSRIKNPPIKP

SEQ ID NO: 277950 - protein, 92 aa, Zea mays
  unsure (1)..(92): unsure at all Xaa locations
  Clone ID: MRT4577_185063C.1.pep
VRWPLVVVILITPPSVDEDGRLRYPYAHDFFGLSERTNAVVVGYSRSCVEVARXCGLKAIDIWFKMQRVPVXEKSFLWDGLYLTPRGIRLLF

SEQ ID NO: 277951 - protein, 84 aa, Zea mays
  Clone ID: MRT4577_185064C.1.pep
GRSFVWFNRQRPGRRKEPEPKLWAFGALRKGFRWRGYVQAWSWRQPWKQSLWFENLKNPGLGVKAPNFGFFASPCYDSCQGTKT

SEQ ID NO: 277952 - protein, 54 aa, Zea mays
  unsure (1)..(54): unsure at all Xaa locations
  Clone ID: MRT4577_185065C.1.pep
VNILGPKGLLPNPKAGTVFXNITQAIKEFKKGKVEYRVDKQGIVHIPFGKGDFP

SEQ ID NO: 277953 - protein, 136 aa, Zea mays
  Clone ID: MRT4577_185066C.1.pep
TTVFHALIFKAKSLATFHHLSLILLPLFMSTSHSPTSLPLLSRHRIPLYTGVFRVLHQICPNHLNRCCITFSLTNVTPSLSSNIIVPDSSLVWPQKTNQINLESLSYASRPTRSLQFWAVKLVPAFCQLSRRQERL

SEQ ID NO: 277954 - protein, 211 aa, Zea mays
  Clone ID: MRT4577_185067C.1.pep
MLDEVSDVENNSARGGSDAMGNSESYMSTYCVEPLPTNSRLTAYSRINELSFTWKHSQHASSLEKVLLDIQRDNFVNTIARIQKIVRDDPSDVLSADVIEATVQIEILKWGLCLQDKCAHKIVNTMLDYAKKVKGRHNFNTEMRKEEFSAKLQDLLKWQLKELEFKYTSLESDYKKAMADASNFFSTFEEHRKKLHAIKGRYQGPAAGLYD

SEQ ID NO: 277955 - protein, 363 aa, Zea mays
  Clone ID: MRT4577_185068C.1.pep
MRRWLCCSHFDTPYVENENGFMSSPDRTSGNGNGLNANSDPAKPPSIEIPALSFDELREKTDDFGSKALVGEGSYGRVYYAVLENEQHVAVKKLDTSADPEPDNEFLAQVSAVSRLKHEHFVDMLGYCIQGDQRLLAYEFATMGSLHDILHGRKGVAGAQPGPALDWMQRVKIAVDAAKGLEYLHEKVQPSIVHRDIRSSNILLFEDYKAKIADFNLSSQSPDMAARLHSTRVLGTFGYHAPEYAMTGQLTQKSDVYSFGVVLLELLTGRKPVDHTMPRGQQSLVTWATPRLGEDKVKQCVDPRLNGEYPPKGVAKLAAVAALCVQYESEFRPSMSIVVKALSPLLVNAPYQPAAAPDVSSDA

SEQ ID NO: 277956 - protein, 143 aa, Zea mays
  unsure (1)..(143): unsure at all Xaa locations
  Clone ID: MRT4577_185069C.1.pep
RLLLHRHRPLQADLLARSAFTLLRAGPRLSAFVAGTKSGRXXLFRSLQEMYLTTNRSTWGAHPTDPGPGVCRGKICPNTGPHKKKKKPPSERSSRPLSPPKEQYYLTPMRATNSATASHLTPQPSLDTRLKPLKKPRAQFLQN

SEQ ID NO: 277957 - protein, 90 aa, Zea mays
  Clone ID: MRT4577_18506C.1.pep
VCDATPIRATAVHGSGFSLPPALGQPNWPARLEPPNLASPRQDWALPQEEGQAQQHAADLYASSDDGGWDVKEGAKKRLACFGDGLKLLK

SEQ ID NO: 277958 - protein, 348 aa, Zea mays
  unsure (1)..(348): unsure at all Xaa locations
  Clone ID: MRT4577_185070C.1.pep
FAFPRTQLRQTPPSAALLCSSSSLPPEQAICQPGNHSNRREPARLHCSRASGNGLNANSDPAKPPSIEIPALSFDELREKTDDFGSKALVGEGSYGRVYYAVLENEQHVAVKKLDTSADPEPDNEFLAHVSVVSRLKHENFVDMLGYCIQGDQRLLAYEFATMGSLHDILHGRKGVAGAQPGPALDWMQRVKIAVDAAKGLEYLHEKVQPSIVHRDIRSSNVLLFEDYKAKIADFNLSSQSPDMAARLHSTRVLGTFGYHAPEYAMTGQLTQKSDVYSFGVVLLELLTGRKPVDHTMPRGQQSLVTWATPRLGEDKVKQCVDPRLNGEYPPKGVAKVHPVXALCVIYL

SEQ ID NO: 277959 - protein, 258 aa, Zea mays
  Clone ID: MRT4577_185071C.1.pep
MVGRMERQTVSTSSASCSPSGASSSSSSSCGGRKRPDILNMIRSAACLNSSSTDTGKGRSKQSSTKVTHGFHLVEGKSGHDMEDYHVAEYKCDKNHELGLFAIFDGHLGDRVPSYLRANLFSNILKEPLFWTDPQEAIKNAYGSTNKYILENAKQLGPGGSTAVTAIVVDGKDMWIANVGDSRAVLCERGAANQITVDHEPHISNERQRIEQQGGFVTTFPGDVPRVNGQLAVARAFGDHSLKTHLSSEPDIRHAPIN

SEQ ID NO: 277960 - protein, 137 aa, Zea mays
  Clone ID: MRT4577_185072C.1.pep
EDWFAHQCLDLSSSRAPSPVSIAQAATSAISGHQPRPSAYPVAELYAAVLRPPRRRARSLAPTSPRSSCLNRRRPAPSSRRPASLFPSHPCARRRPTPPCCGSAPAQRRHFLAIPHRRASLRACPFYGMGKNIEGWR

SEQ ID NO: 277961 - protein, 55 aa, Zea mays
  Clone ID: MRT4577_185073C.1.pep
FFTVLLTPIVSFHFFRHIRQVKPPRERVCQFESFTAVVGYHGEYPDSCWFENIRL

SEQ ID NO: 277962 - protein, 62 aa, Zea mays
  Clone ID: MRT4577_185074C.1.pep
FFFKGKIKFSNYDELEFFNLYFCKGGGPKVRKLADYGFFFRGPFGVVFYCSPPPPFKLIYKM

SEQ ID NO: 277963 - protein, 95 aa, Zea mays
  Clone ID: MRT4577_185075C.1.pep
YVFQECLIEPMSYGLINGGKVAIELSKRWRAHRLDQLCVLTRRLRFLVEYVAKVGQSTLAFGGFGNVPPTNYPVVVDMAYGSLLCFVISSGVGPL

SEQ ID NO: 277964 - protein, 88 aa, Zea mays
  Clone ID: MRT4577_185076C.1.pep
SFSKQKPRQTSQGLLGKASKGLGSMPNGSRTSRPRLTSAMFSKSWLTSIDHRRSAFISVLVRVPRCNFVLWNKWINKGPFRSKKKINN

SEQ ID NO: 277965 - protein, 180 aa, Zea mays
  Clone ID: MRT4577_185077C.1.pep
MDKSGGEAAAAAAAADDVERRGGDYEQDEHERRGTVWTATAHIVTAVIGSGAYRAPHPVTGHRNRTYMDAVRSYLSPREVFMCGVAQYVNLWGTMVGYTITATISMAAIRQADCLRRDGAGAGARCDAPGTVLMLAFSVVQVVLSQFPGLEHITWLSVVAAAMSFAYSFAGLGLSVGHWV

SEQ ID NO: 277966 - protein, 133 aa, Zea mays
  Clone ID: MRT4577_185078C.1.pep
MVAIARSFGAARVAARGFSNAARQPQQSTLVAARSAFRNNAARNIIQKRGIVAESTAAAMVAAAKIQGAGLATIGLAGAGVGIGTVFGGLIQGVARNPSLRGQLFQYAVLGFAFAEATGLFALMMSFLLLYVA

SEQ ID NO: 277967 - protein, 98 aa, Zea mays
  unsure (1)..(98): unsure at all Xaa locations
  Clone ID: MRT4577_18507C.1.pep
SLSCLLRLYPSGAARRRPTAAHPHGLPFESPLALSPAAYDFFHPSARARRARGVAPAPAPALAPRGQQQQQLREXVRGGTSSASVAKADREEGGVVFF

SEQ ID NO: 277968 - protein, 138 aa, Zea mays
  unsure (1)..(138): unsure at all Xaa locations
  Clone ID: MRT4577_185081C.1.pep
MLAAQDQAEPSPVLATLRCLGGVFLLLLLHPRPCPFGAQSSPEMANARSDVTVNDECMLNSGXELNSKRVNRLITFKRDNMFNEIVVDHVENRATSYYDCTHSTAXNDWPYAIYDLNYTTAEDVQRSMMLYILWLSFS

SEQ ID NO: 277969 - protein, 90 aa, Zea mays
  Clone ID: MRT4577_185082C.1.pep
GISFNLTDVKIKFATRSLPIQEMHLSPHTQASSRSSDSSSQLVVLTFLECLKFFRNLGSIAVGGGLAVALGVLDAVLVRLERLVMTPCGS

SEQ ID NO: 277970 - protein, 265 aa, Zea mays
  unsure (1)..(265): unsure at all Xaa locations
  Clone ID: MRT4577_185083C.1.pep
GWXKSRRRLHSPFSRSAAASLPLSSLSHDASSSLHTSFCSIPSFLCARYSSFPCYCALYLPSHGVHLPMLAPCPASPPWSSISLRGTPSSSFLSLSVLCWPVLYSSHPRRGFCSLCSESPTRSSPGSPSLMASACAPSTLLAWPRRLPPVGRAPSQSPLRAARALLAPLLAEYFPHKICSTTVSSNREASSPCALASAVANFAIKFTSTPCSVCFAVGYFSTFQFRAACPVCARSRLDLVVIPCVIKKSQESGRIRVSCWKRYVN

SEQ ID NO: 277971 - protein, 73 aa, Zea mays
  Clone ID: MRT4577_185085C.1.pep
HASAELDGLGLEPMEEGGGEQGSSGGGSGEGEGCEEAQGGAKASSSQDLAMEEEEEGRSSSSPALPTAGNCTS

SEQ ID NO: 277972 - protein, 115 aa, Zea mays
  Clone ID: MRT4577_185086C.1.pep
MSGDNTKREIVTVDKPTGSGKTLSRESGNKYKEESSSSIKSHRRGDKKKKKMNKVVYCETNSSTPSTSGIESSTTSKRHERKKYSKMPLRYPRISKHAPLLSVPLGKPPYFDGED

SEQ ID NO: 277973 - protein, 249 aa, Zea mays
  Clone ID: MRT4577_185087C.1.pep
NVEKLPTTKQTEQGALVNSMVESAVADARAHGKEASQFDETVAERILWRGLEKDSASRGASRTRATRRHARRGHRLGARPTRGSRRGHASRVEGAEALAWERESLASCAQETPSRGSSDTVDGKSRAPANREPRGRGRSWRECRVGRWSSKPSSRTRLPWAGAPWRRSRGRGEHREMDAMGGKVERAVTWEGRVARAQGAWDRAEGHAQGGRRVMAEGAQGEGSRGAAEKKETGGDGEIFTRAGQARTP

SEQ ID NO: 277974 - protein, 55 aa, Zea mays
  Clone ID: MRT4577_185088C.1.pep
AKSFLLSHTYWGATQFSGQLLTLHHQVPRYKKSTTLWTAAMPGTARTTLMSSSKG

SEQ ID NO: 277975 - protein, 81 aa, Zea mays
  Clone ID: MRT4577_185089C.1.pep
CARWAVVLALAAVTGIAEASVAGGDMNADMTEWADQVVGLAPCLQYVQGQARAPAADCYGVLLHVLGKSPKCLCVLVKDKD

SEQ ID NO: 277976 - protein, 110 aa, Zea mays
  unsure (1)..(110): unsure at all Xaa locations
  Clone ID: MRT4577_18508C.1.pep
LQLIPTISRVDAANXLAADLQHRQXLALHRLAAVNXAVYLQAQHLLPCNDHAGSHDGFLLRQHLLPLHLEAVENVDHSMRQRQWVPLYRQLVRYIYACLQQHHLLAFYPH

SEQ ID NO: 277977 - protein, 42 aa, Zea mays
  Clone ID: MRT4577_185090C.1.pep
CHCCNNHSYFIRAKKLMYTIPILLKKSIVVPLLSSESNLLEI

SEQ ID NO: 277978 - protein, 108 aa, Zea mays
  unsure (1)..(108): unsure at all Xaa locations
  Clone ID: MRT4577_185091C.1.pep
RSSDRSRESILPSFLYTSSARSFTDTGPCARLPVSYPTPATVGARSGAPISIHAPNEKIDMYSPVFYPACTDGXIVRLSITHMSVTPLDLLKCIMHIDPSKYTSISSL

SEQ ID NO: 277979 - protein, 125 aa, Zea mays
  Clone ID: MRT4577_185092C.1.pep
ANHNTIFLVLPGPFLSNNNGATTKLDFQKKNEETNNSTTKTKESHAAGGPSANRRLLLGEPRELDERVHPRHPVKARPALVVGASCAAADGRVCRPRQRLLVGTFGHRPDREVRGQGRLLQVLGF

SEQ ID NO: 277980 - protein, 107 aa, Zea mays
  unsure (1)..(107): unsure at all Xaa locations
  Clone ID: MRT4577_185093C.1.pep
WYIPRSTTSTRRLRRXRDRXXFVSXXDDNQLSLCRVQPVSSFDSGPMSTVTRVGTVVTWVVGLLSIERVEGFGFGDLDSSGPWAVRASVITQRGKSASRVATSDRRS

SEQ ID NO: 277981 - protein, 75 aa, Zea mays
  Clone ID: MRT4577_185094C.1.pep
MPTDPLPPTYDPAVDVGPGGRPLFAFTDTFASFSHRGANAYVDFTLDEWKAMLPEGLPAGMMKEFQDTRRCAVMV

SEQ ID NO: 277982 - protein, 83 aa, Zea mays
  unsure (1)..(83): unsure at all Xaa locations
  Clone ID: MRT4577_185095C.1.pep
WGNPKKANIKAXLKRFRDHWKKKRLXFSEKIKNKVSIIPKEAQKKRTMVEAKPGXEVLKAQEMVSKYRAPGPAPKKLIGCFGA

SEQ ID NO: 277983 - protein, 33 aa, Zea mays
  Clone ID: MRT4577_185096C.1.pep
FHDEIHKHGSLGADLSGRPAMSVLMTRSLTTLT

SEQ ID NO: 277984 - protein, 173 aa, Zea mays
  Clone ID: MRT4577_185097C.1.pep
MYPLEMEGNSNPKTTNKPKYSKFTQQELPACKPLLTPEIVIAAFALIGALFVPIGLASLHASRQVVELVHRYDASCVPVDDKVGFIQNSRTDKTCTITMTVPKYMKSPIHVHYLIDGFYQNHRRYVRSRSDKQLRYKSAAHLTSDCVPEGDTADHAPIVPCGLVAWSLFNDTY

SEQ ID NO: 277985 - protein, 121 aa, Zea mays
  Clone ID: MRT4577_185098C.1.pep
GTPPRSRPGLPANTTRTKFSHPTINPHMAWRSSPSYSILLASHSHLIGGAGAPVHHVGGIEPGVVLYGVRVQGVPRRRSAASAAAPPASATARLLALYLLACWALREGGGAVLQTIPWINH

SEQ ID NO: 277986 - protein, 46 aa, Zea mays
  Clone ID: MRT4577_185099C.1.pep
GSNGQLIQANCWKGPPNLNRDFKNRSGAKGRRISYMQPVWSSRCLF

SEQ ID NO: 277987 - protein, 90 aa, Zea mays
  unsure (1)..(90): unsure at all Xaa locations
  Clone ID: MRT4577_18509C.1.pep
SAGDEVGGRTTKKNGIQVHCEGNKPTAPPPPPPAPNRAKGKNSSAALAPALAPSPPHATPAKSATVSTAARSCVVRVLCXMWHWSFFVRT

SEQ ID NO: 277988 - protein, 148 aa, Zea mays
  unsure (1)..(148): unsure at all Xaa locations
  Clone ID: MRT4577_1850C.1.pep
TGTDATDPNNIYFVMEYLKFRQLYNKMCKGGKLTEAVAHKYLQQLIDAADYCHTPGVYHLNLKPENLLFDDNENLKVSNFILTALSXSTRXHGLLHTTFGTPAYVAPKAIKKKGYNRSKSNIIACPLILFLLLGGYLPFLTQNIMEMY

SEQ ID NO: 277989 - protein, 43 aa, Zea mays
  Clone ID: MRT4577_185100C.1.pep
PMGPEICPVSVSVGVAVTARQKRAPAVGRGIKAGVRVSTRVSV

SEQ ID NO: 277990 - protein, 203 aa, Zea mays
  unsure (1)..(203): unsure at all Xaa locations
  Clone ID: MRT4577_185101C.1.pep
MRTTRSQSNNIVKTLNEGQVPPSDVGEVSAFPPYVFLPADDSPVHRDCSVXAAHNCCRHNECAFSAEYSDEILVNLDVHWXILGHYDRIALLAESHDFRADXDADDLTRALNVIALMTTTPLEQKXAGSTMHVDSAQTXQMIYKYWTDSNGIDTYEXLXAIGTGKVATPTHVHGVHASLMDCIETNARPDVAESTTIIYARSV

SEQ ID NO: 277991 - protein, 62 aa, Zea mays
  Clone ID: MRT4577_185102C.1.pep
NLDQPKKRERRLRITTRSPLCEFSHTIHTRTQGSPGHLVKLFSACMYGVRELQPEVHFANSL

SEQ ID NO: 277992 - protein, 513 aa, Zea mays
  Clone ID: MRT4577_185103C.1.pep
MAMATALRKLSANALRRQPLSRITPLYYMASLPATEERSGITWTKQLNAPLEEVDPEIADIIEHEKARQWKGLELIPSENFTSVSVMQAVGSVMTNKYSEGYPGARYYGGNEFIDMAESLCQKRALEAFRLDPAKWGVNVQPLSGSPANFHVYTALLKPHERIMALDLPHGGHLSHGYQTDTKKISATSIFFETMPYRLDESTGLIDYDQLEKSAVLFRPKLIIAGASAYARLYDYDRMRKICNKQKAILLADMAHISGLVAAGVVPSPFDYADVVTTTTHKSLRGPRGAMIFYRKGVKEINKQGKEVMYDFEDKINAAVFPGLQGGPHNHTITGLAVALKQATTPEYRAYQEQVISNCAKFAQSLISKGYELVSGGTDNHLVLVNLKNKGIDGSRVEKVLESVHIAANKNTVPGDVSAMVPGGIRMGTPALTSRGFVEEDFAKVADFFDAAVNLALKIKAATTGGTKLKDFVATLQSDSIQVEIAKLRHDVEEFAKQFPTIGFEKETMKYKN

SEQ ID NO: 277993 - protein, 68 aa, Zea mays
  Clone ID: MRT4577_185104C.1.pep
HWVPRGRPGYRCKILKLDLHALEATFPSLCTELLARMIRRPKMHHLLMKFARKILKVSDVLHSSASHY

SEQ ID NO: 277994 - protein, 63 aa, Zea mays
  Clone ID: MRT4577_185105C.1.pep
ATQMAYPLLAADPVSMETLRPLLGIIKDSLTRHMYTQRITAIPNRKVTSWSLPHHGHALIRLT

SEQ ID NO: 277995 - protein, 112 aa, Zea mays
  unsure (1)..(112): unsure at all Xaa locations
  Clone ID: MRT4577_185106C.1.pep
MVKFLKPGKAVILLQGRFAGRKGVIVGVVEEGNRGRPXGTGLSAGLASNPKKGARRESXAKKTGKKPGVRGFIXKFANLTHLLPTRXTLEVDFKEGATGGPDAFSTRDKKVA

SEQ ID NO: 277996 - protein, 84 aa, Zea mays
  Clone ID: MRT4577_185107C.1.pep
VVPPRAPARRPDELHPRVAPPAHARGVHRLRAPPAGALRRQRLHCSSPAVKLRHTHTHACMAIHACGFYRNGDGLSATKKWYLL

SEQ ID NO: 277997 - protein, 58 aa, Zea mays
  Clone ID: MRT4577_185108C.1.pep
YIRKKDDWKKKKKKKKKKKKKKKKKKIKKKKKKKKKKKKKEKKKKKKKKGLFLGPEPP

SEQ ID NO: 277998 - protein, 71 aa, Zea mays
  Clone ID: MRT4577_185109C.1.pep
RSSRCRFVQWTPPSAAFRLGLGYSLWSRIIKISAASPASSRLGALGCKLPNIIDVVMGFRTRGRYVWVRCR

SEQ ID NO: 277999 - protein, 52 aa, Zea mays
  Clone ID: MRT4577_18510C.1.pep
KKNTLFYFFYFLFTMYILNCVYTFLTPPHPHPFNGTYDHYDNVNIFYTIYVP

SEQ ID NO: 278000 - protein, 183 aa, Zea mays
  Clone ID: MRT4577_185110C.1.pep
MKVLIVALALLALAASAASSTSGGCGCQTPPFHLPPPFYMPPPFYLPPQQQPQPWQYPTQPPQLSPCQQFGSCGVGSVGSPFLGQCVEFLRHQCSPAATPYGSPQCQALQQQCCHQIRQVEPLHRYQATYGVVLQSFLQQQPQGELAALMAAQVAQQLTAMCGLQLQQPGPCPCNAAAGGVYY

SEQ ID NO: 278001 - protein, 52 aa, Zea mays
  Clone ID: MRT4577_185111C.1.pep
AQMQHPASCGLAAAAPVLKYNISSLKHFYVSQHHLHQQLMQSHVINLLFHPW

SEQ ID NO: 278002 - protein, 68 aa, Zea mays
  unsure (1)..(68): unsure at all Xaa locations
  Clone ID: MRT4577_185112C.1.pep
WSRWNRYPVRPSGVGPWKSLRASQQPQGRXSPALIAAQVAQQLTAMCGLELQQPSPWPCNATAGGVYY

SEQ ID NO: 278003 - protein, 183 aa, Zea mays; identical to SEQ ID NO: 278000
  Clone ID: MRT4577_185113C.1.pep

SEQ ID NO: 278004 - protein, 61 aa, Zea mays
  Clone ID: MRT4577_185114C.1.pep
GDARTFLRGWVGSLNKKGPLASGAATSCAVHTPLTDEPGTTDRRQWSFAKCGIIKCYACKC

SEQ ID NO: 278005 - protein, 55 aa, Zea mays
  Clone ID: MRT4577_185115C.1.pep
VVIEDKLVNDLTVKEWEGNVKTMFDVDKGLQKLFFVGGEDAVLIVLGQNDGINRC

SEQ ID NO: 278006 - protein, 84 aa, Zea mays
  Clone ID: MRT4577_185116C.1.pep
KSRHTCSIQLWPLLVDSRALLPRRHTAHLRNCPCVPLCLASHAIVITTAALHARVRLQPCHTPAMAPCHDRLGSTGERKEMKEK

SEQ ID NO: 278007 - protein, 58 aa, Zea mays
  Clone ID: MRT4577_185117C.1.pep
GVMERVVVRGQDELPTEDEIIQIRRRHVDNEHPRTRTPENLRNTNQNQEAEETAKPTY

SEQ ID NO: 278008 - protein, 118 aa, Zea mays
  Clone ID: MRT4577_185118C.1.pep
QPRPVHVLHRGEARRRESGGGGQQRAEVGDGGGRGVRGRRVHAARVHGARCRCLVGLDRSARARACAQRLAGRSVETHVVLLTRRWRRYMPGSLGSPSTSPIDPSIDPFNFSCHQTST

SEQ ID NO: 278009 - protein, 98 aa, Zea mays
  unsure (1)..(98): unsure at all Xaa locations
  Clone ID: MRT4577_185119C.1.pep
PLRVVSAQXPIFFFFFFFFFSFFFFFFFFFFFFFFFFTNWLINRFIFHTVAMLRNSIQQNKIHSTYPLQTPISRNKFRTSKYLGYNQSTQANTADNSV

SEQ ID NO: 278010 - protein, 217 aa, Zea mays
  unsure (1)..(217): unsure at all Xaa locations
  Clone ID: MRT4577_18511C.1.pep
MLNLKNKVALVIGLGQTNTEGWGIGAASAVTLARQGAIIFGGNRTIASTTKTKETIQQQGGQCDVVATDATDSASVKAVVDACMEKHGRIDILLTSVGQSQPGDPASMTEDVWDSQMDINLKSVYLACHHVLPIMESQGSGSIICISSIAGLRYIGKPQIAYNTSKAAILQFVXATAVIYAPKGIRLNTVVPGLMDTPYTKSGAEICYARVMMSFVA

SEQ ID NO: 278011 - protein, 82 aa, Zea mays
  unsure (1)..(82): unsure at all Xaa locations
  Clone ID: MRT4577_185120C.1.pep
SFRKAILYNLLLKXFMWGGGFCFYWSQFELLVXILLTMCPFTKFITSSGVERXCGSYYGPVCFNSSFSFLGGEPSMXDKGHG

SEQ ID NO: 278012 - protein, 67 aa, Zea mays
  Clone ID: MRT4577_185121C.1.pep
TVPRQVKTLGFPPKLVFVTVPVPTCNCIFKALFQNLLTKNNLWPPLSVATGPEFIIWGDKEGFFFRN

SEQ ID NO: 278013 - protein, 362 aa, Zea mays
  Clone ID: MRT4577_185122C.1.pep
MPLAGIALTPLLVSPLAPSPRRSRVATSAARRPRALQRARCSATAASGEAGELSHATLLWRAAKLPIYSVALIPLTVGSASAYYHAGLFFTKRYFVLLTAAVLVITWLNLSNDVYDSDTGADRDKKESVVSITGSRAMTQNAANFSLFLGFAGLLWAFAEAKDIRFILLVISAIFCGYVYQCPPFRLSYQGLGEPLCFAAFGPLATTAFYFSNSSLNTSSGGAALLPLTKTVIASSVLVGLTTTLILFCSHFHQIDGDLAVGKMSPLVRIGTKAGSRIVSIGIVMLYILLATFGTCGSLPPSCIVLCALTLPMGKTVVDYVLKHHEDNAKIFMAKYYCVRLHALFGMALASGLVLARNGILA

SEQ ID NO: 278014 - protein, 99 aa, Zea mays
  Clone ID: MRT4577_185123C.1.pep
SPGLLSSPSVLSSRFCCSPFAGVGRSFRLSCLRPPHRIVGPLGAFVYAGCRVSYSSGSGGSRSGAVWFVVYSRAGSPVKTRFLGFRSRGVDAFALWVRF

SEQ ID NO: 278015 - protein, 73 aa, Zea mays
  Clone ID: MRT4577_185124C.1.pep
KLTSAPENSGAQDPLSHLMTGYCKIEALVQEDRLAHIKSLSQKQSSLSQSQYLMLLQNCLMKYWMQHHHHELS

SEQ ID NO: 278016 - protein, 78 aa, Zea mays
  Clone ID: MRT4577_185125C.1.pep
MLYILLATFGTCGSLPPSCIVLCALTLPMGKTVVDYVLKHHEDNAKIFMAKYYCVRLHALFGMALASGLVLARNGILA

SEQ ID NO: 278017 - protein, 97 aa, Zea mays
  Clone ID: MRT4577_185126C.1.pep
LCAFPQCPPFRLSYQGLGEPLCFAAFGPLATTAFYFSNSSLNTSSGGAALLPLTKTVIASSVLVGLTTTLILFCSHFHQIDGDLAVGKMSPLVRSAL

SEQ ID NO: 278018 - protein, 151 aa, Zea mays
  unsure (1)..(151): unsure at all Xaa locations
  Clone ID: MRT4577_185127C.1.pep
IGTLEAGRELPYPQARRIELTCLCLAYAGCLTTPASTARTGKEGNPRETXPAYSDHLXRSGQRKIPDCIYIVXTATPKEIPPYRPWLFYITTASXEDEHYLRQGIGAXTTKRLYGGRQKNVSRPPHFXNMSRAISRYIXLQQLQEMGIIAV

SEQ ID NO: 278019 - protein, 83 aa, Zea mays
  unsure (1)..(83): unsure at all Xaa locations
  Clone ID: MRT4577_185128C.1.pep
SFRYTHAPTLPKTTALGXLRPSFHHRQHLILPSPHLSASKHLPPPAPLAVIAIDSFLSLNSMFFSSLSTVVTLAVFHSPVVFY

SEQ ID NO: 278020 - protein, 558 aa, Zea mays
  Clone ID: MRT4577_185129C.1.pep
MLNDNGFGQGFVPDEGPHRKYFDGANHHFHQFHPEPLPGAPLHPSLPRYPDPHGSHAWHVEAGAVPRPAEPPFPSNHDYRAAPPRLTANSSLFPVLSGSPTTENFPSTAGTLPPAHPMPNKNRHDGHINDEGPGFIYRPQSEHNLIDGRLTSAHYSLENSNVTVINACDLFKQPLRGSRPDHIVVILRGLPGSGKSYLAKALRDLEVENGANAPRIHSMDDYFMIEVEKKVEDTEGPKSSSASKGRRQLTKKVIEYCYEPEMEETLQSSMLKAFSKTLDEGNFTFVIVDDRNLRVADFAQFWATAKKSGYEVYLLEAPYKDPTGCAARNVHGFTLDEIKKMAADWEEAPPLYLQLDIHSLFHDDNLRGHSIQEVDMDTEDVDDANDATSIIAESSQKAVQDPPNEGFSKPGEEWNSEVEDGLDSLKELGQSKWSKDFEDETTKSENTEENTHALSGLARTYSTGRKSVSWGDRLEKGGFSIYATKRKLTSSLIIGPGSGYNLVSNPLAEDSSTGTKGKTNNETKKRFSEQLRDEGESFRAVFDKTKQHIGVFENGDEE

SEQ ID NO: 278021 - protein, 138 aa, Zea mays
  Clone ID: MRT4577_18512C.1.pep
LGRRSLADLVAVGAHILMGNPTGDCRDLRGDVCAAGGRGGTKKKQLLPQPLRVQRAPPTCRVPLARSPSRLERSRSRTRDPPSLMHGPCLPESPSRHAPPTEAGRHTTRRCLPPASCVLPSARSALLPLATLSSCCCA

SEQ ID NO: 278022 - protein, 88 aa, Zea mays
  unsure (1)..(88): unsure at all Xaa locations
  Clone ID: MRT4577_185130C.1.pep
DYPSHRLLLGLGQTFRMAKDRKQTRXRTNSSSPVXSLFNQGCNXLTCASKSIAFGSTAKCGKATFWVWLISTVPFYFATWEHFFTNTL

SEQ ID NO: 278023 - protein, 66 aa, Zea mays
  Clone ID: MRT4577_185131C.1.pep
GGGKQYHQKSLQSAPLRRRDQQRVILSPVRGFTKICILKRRCRRLALGEIWLTCVCAHERTRSRGP

SEQ ID NO: 278024 - protein, 86 aa, Zea mays
  Clone ID: MRT4577_185132C.1.pep
CQLRCQPNRHIVCGCQLDPVFWRWRWHRSLMTGRFLDSALLSLSAAQYRARGIASGTNRPRKSSSFLFFFPLGILRPRAGKEGKKK

SEQ ID NO: 278025 - protein, 54 aa, Zea mays
  Clone ID: MRT4577_185133C.1.pep
KKKKKKKKKNYKKKKKKKKGGEKKNEREQTKKKKKKKKNQKGNHFKGPKQRFDW

SEQ ID NO: 278026 - protein, 91 aa, Zea mays
  unsure (1)..(91): unsure at all Xaa locations
  Clone ID: MRT4577_185134C.1.pep
PVDPGVDGPDGSRDRFAYAERXRCRSLRDSDEQYPDGTDDRLNARMGRHYSDEAMAVMPGAQRLNVSSDHERNGKNSHESRQLDEPIVATH

SEQ ID NO: 278027 - protein, 55 aa, Zea mays
  Clone ID: MRT4577_185135C.1.pep
QLAVFLSSESDEPINPVARSLARIISSQSLVSPASSSHRPVRLARGCQGATRLNS

SEQ ID NO: 278028 - protein, 103 aa, Zea mays
  Clone ID: MRT4577_185136C.1.pep
TGHRLATFNSPSGKTGNYSTLLTKGIPAGTQNFFQFPAPNTLFSPLTGKPSTVSEQGSDPPSILNWGLNKNPSFKKGPGPQIKTILRVFLSPAPTTNFSGGNK

SEQ ID NO: 278029 - protein, 43 aa, Zea mays
  Clone ID: MRT4577_185137C.1.pep
YVVALLIMCLHSILAAITGWNRSLDCREIPGATTNVICCSPGP

SEQ ID NO: 278030 - protein, 97 aa, Zea mays
  Clone ID: MRT4577_185138C.1.pep
RCGLGFFLITPFSLLLGAVFLPGGGPGGGNGPFVFFSPQIKGNPFPREYRGPLGNLTFFPNCFPPMGGGPGLSFLFGDFPLTACTGPFWSWGFSPSP

SEQ ID NO: 278031 - protein, 67 aa, Zea mays
  Clone ID: MRT4577_185139C.1.pep
RANKGIYHIGKGGGAPKQGGGGGPTTPKGMLFFKKQPGTGGLKTNRKKKKKLPQTKGKPGTRKIITN

SEQ ID NO: 278032 - protein, 57 aa, Zea mays
  Clone ID: MRT4577_18513C.1.pep
PDMITAGGLTRTHKGQPPASTEVTEERATLAREGRDTHKCLGNPQTRSRLRPVRPAA

SEQ ID NO: 278033 - protein, 130 aa, Zea mays
  unsure (1)..(130): unsure at all Xaa locations
  Clone ID: MRT4577_185140C.1.pep
MRRHQHWWQDELLLKIMNKDXNAIARRQPSYSRKKIKCLGXTNHMLANALSTCTYLNVSDNXRKLXRTQSLTQIYMEQLQSLMIIATTFPYYSSRNSLYKIFDVLGRVIHIKICDLQDPNTVRTXKSDTL

SEQ ID NO: 278034 - protein, 87 aa, Zea mays
  Clone ID: MRT4577_185141C.1.pep
IHTEPMVFSTAGCQPRVTVHNQPPSYKPSTRISSRLQPINCHTGNIYICSTCLLLNQGICSCCLLVLEVGEALLEVVLGMPGLRMFF

SEQ ID NO: 278035 - protein, 61 aa, Zea mays
  unsure (1)..(61): unsure at all Xaa locations
  Clone ID: MRT4577_185142C.1.pep
SSLEAVCRLSCTLQKCVMIKTNYLCIVTFKPSNFSNVLNQHCLLDFDVSHHDSPRVRXTVR

SEQ ID NO: 278036 - protein, 107 aa, Zea mays
  Clone ID: MRT4577_185143C.1.pep
FFFFFFFFFFFFFFFCFFFFFFLKKGGDCEITYFFPYTTMGRFKNYEALPLGRVFTKSWETYNFLPNQGKKKGKRGNRESNSSNYVTGNLGAGKRPRGGPTRPPPRG

SEQ ID NO: 278037 - protein, 516 aa, Zea mays
  Clone ID: MRT4577_185144C.1.pep
MAACSSRLLYLTLSSSFLRSCRLASSSLLPTASRCHPGSLHSLRFCSAVPEFVDVAADPAEAAVSSGHPWPEWGNFLDKLRAKGYFEQGLPSSVSSGEGAAGDGDPATASENAATAASGNTVVDAEDSAVTSEDIYHFLKDENRVKNACLKFGRDRFDLLSLLPKQDIQAIVMSGCPNNNRKPVYSAKRLREYVQVKEEDACSICKFKASCDRAYVTPKGEVEVRTVDVVRILLSYAMDKNHSGDNSVIEESVQESAKKLLSKLTEFSDTTIDPSLPKPAFQVARKAQGSVGKGRETTAVEMKKGDWLCTNCNFLNFARNRHCLECKADGPKKIEAAVDAMKMGDWICTQCQFMNFSRNKICFKCEEPHPKRQLNPGEWECPSCDFVNFRRNAICKKCNQDRPEDDTRDSQRGLRKTRGAGKFRRFDYIDQKSDDDDDNAWFQKRGASMRSKPDQRTTTAKSRGSDGLDDILVTTKRRSTKQDEDDEVLPYEGARKHVVSRRATPSQRRFTAARNQ

SEQ ID NO: 278038 - protein, 161 aa, Zea mays
  Clone ID: MRT4577_185145C.1.pep
MEFLPGAYKKATAVLDEAARARLRGPFISDTVAPSPAPSGGAADADDDLMDSVDEFYNGYGEHGTDGGAVAKDAVASRATEWKEALRLTLADAAADAAAVRIRAEAERIVRDAGPAAVGGGGGIRKHLVERLRARGYDVSADRRGEEPAASPRRARTSTWT

SEQ ID NO: 278039 - protein, 345 aa, Zea mays
  Clone ID: MRT4577_185146C.1.pep
MAACSSRLLNLTLSSSFLRSCRLASSSLLPTASRCHPGSLHSLRFCSAVPEFVDVAADPAEAAVSSGHPWPEWGNFLDKLRAKGYFEQGLPSSVSSGEGAAGDGDPAAASENAATAASGNTVVDAEDSAVTSEDIYHFLKDENRVKNACLKFGRDRFDLLRIFKLLLCLGCPNNNRKPVYSAKRLREYVQVKEEDACSICKFKASCDRAYVTPKGEVEVRTVDVVRILLSYAMDKNHSGDNSVIEESVQESAKKLLSKLTEFSDTTIDPSLPKPAFQVARKAQGSVGKGRETTAVEMKKGDWLCTNCNFLNFARNRHCLECKADGPKKIEAAVDVMKMGDWICTQ

SEQ ID NO: 278040 - protein, 88 aa, Zea mays
  Clone ID: MRT4577_185147C.1.pep
EHSGMTVLAVVGQLRDVEYLDAYAYRLQRPQEVGPGHGHQAVVSGCSLVTADGSVADGLRFVQALDRSPCERPRVRKSDRGRVGGRVG

SEQ ID NO: 278041 - protein, 260 aa, Zea mays
  Clone ID: MRT4577_185148C.1.pep
MASNNLLVDLKRCFSAPSLRSYLAEFISTFLFVFTAVGSAISARMLATPDVTSSAWPLVATAVAQAFGLFAAVLIAADVSGGHVNPAVTFAYAIGGRIGVPSAMFYWASQLLGATFACLSLNLFSGAEEVPTTRIAVAMTGFGGAVLEGVLTFLLVYTVHVVGEREPRSRGGDGKREFAATALGALAVGLTQGAFVLAAGALTGASMNPARSFGPAVVSGHFKNQAVYWAGPMVGAAVAALVYQIMACPSVTGNVEAVVV

SEQ ID NO: 278042 - protein, 70 aa, Zea mays
  Clone ID: MRT4577_185149C.1.pep
LLLCVKSASWAKRFFKAEQFKWSSSYCIFSLTGMRIQSYDDQLLHLAADLAQRLLPAFDTPTGSSPFLLL

SEQ ID NO: 278043 - protein, 76 aa, Zea mays
  Clone ID: MRT4577_18514C.1.pep
KVLVLRHSFEKPPRRGDQCNLTAQDKSSARCMTCMQRLNQWPSNTKSSWVIISTLITTRSWKKISATFQANKVKTR

SEQ ID NO: 278044 - protein, 268 aa, Zea mays
  Clone ID: MRT4577_185150C.1.pep
RDLASPNAKWELGQIQSMSGDDAEILLANGKVLMVSPEQLLPANPDILDGVDDLIQMSYLNEPSVLYNLQLRYSRDLIYTKAGPVLIAVNPLKEVALYGKSSIMQYKQKANDDPHVYAVADLAFNEMLQDGINQSIIISGESGSGKTETAKIAMQYLSDLGGASGTESEVLQTNVILEALGNAKTSRNHNSSRFGKLIEIHFSESGKMCGAKIQTFLLEKSRVVQRAQGERSYHIFYQLCSGAPPLLKKKLFLKSANDYNYLKQSNCL

SEQ ID NO: 278045 - protein, 115 aa, Zea mays
  Clone ID: MRT4577_185151C.1.pep
MLPTPYSLKEWPNPVSKNCYGETAPATGLNSTGQASGQDQVIQAVLRGMKSPVRFLDITALSAIRKDAHPSAYNGDFLPGQRANPGAGSVDCSHWCLPGLPDTWNQLFYTLLFYK

SEQ ID NO: 278046 - protein, 74 aa, Zea mays
  unsure (1)..(74): unsure at all Xaa locations
  Clone ID: MRT4577_185152C.1.pep
QGEFNQPSRLPRGHAKVPLVISKVSWRRRFIPSNYKXCISQEGRTQASWGDVKGTTYAHNLPFGRDKTLVYTML

SEQ ID NO: 278047 - protein, 32 aa, Zea mays
  Clone ID: MRT4577_185153C.1.pep
YLHPSLCRRNMLKNVVHFKYYYLMNRNVIFIL

SEQ ID NO: 278048 - protein, 400 aa, Zea mays
  unsure (1)..(400): unsure at all Xaa locations
  Clone ID: MRT4577_185154C.1.pep
PTPPPPLAPPPPPRPPPAXHPXPAPSPPHPXPPPPXPTHPPPPPPPPPPPRPPPPPPPPPPPPPPPPPPXANTPPPPPPPSPPPPPPPPPPPPXSPSPTPXPXPPLPARRPPXPFPPPXPPPPXPTPPPPPPPPPPRAPRPPSPPPVHSPAPPXPPPPPPXPPXSPSPPXXPRPSPPPSRPPCPHAPHPPPTRTRPTLSPHAPPTPPTPHASPHPPNPSPPRHSPPPPPXPSYPSQTPSPPXHPPPSPTPPPTPSLPSSIPPHPVPHVLLTPSHPSMSPPHMCNAPPPLPXPSLQTAAPAPHPPVPXPASDLTEQPHANTSKFPHPDVFVHPTSSSAASTXWEYSRPPNVAVVPASXPPSNPPPPPPPPPPPPPPPPPPPPPPPPPPPPPPPPPPPPPPP

SEQ ID NO: 278049 - protein, 113 aa, Zea mays
  Clone ID: MRT4577_185155C.1.pep
MAAATAGAAAPAYTSDSLVLYFKAEGTMEERAIPKITESLQGMEGVKDLEVLIEEGIASVVLTKETTVQATGVFFNLVEAIQGAGFKLQTLSLSFDDFDDITAGAGGNVQPSE

SEQ ID NO: 278050 - protein, 258 aa, Zea mays
  Clone ID: MRT4577_185156C.1.pep
MAGAFAFRLVPRLAAEPAARGKGGGGGANRDAGSRALVSKKPNKQQHLWIRKETAGSGKKALRLIDAVRYTLAIDTVSKLPNEREAIYGALDKWSAFEPEFPIIAAAKALGMLKRRRQWLRIIQVTKWLMSKGQVLTWTTYDTLLLALLMDKRVDEAESVWNTVIQTHTRSVPKRLFSRMILIYDIHQRPDKVLEIFADMEELGVRPDEDTARRIGKAFVASGQEEKEKHVLEKYLKKWKYIHFNGERVRVRRDGPLA

SEQ ID NO: 278051 - protein, 122 aa, Zea mays
  Clone ID: MRT4577_185157C.1.pep
QFSGLPPRCCSSPPQRSSSVLVLLRSGRAPERSGGRQPPRPRGRPPLRCGSSPVRSPPRWSSSSPAELRRTVTVEGPRTAAPPRATSYSPSQPRAFVSSQPSSIHRPQVIAISIHGVLVDSR

SEQ ID NO: 278052 - protein, 43 aa, Zea mays
  Clone ID: MRT4577_185158C.1.pep
LSQGDVFIYLSSSTSEYCACHLCVVQAVGSQMTRRLCSLYPTQ

SEQ ID NO: 278053 - protein, 76 aa, Zea mays
  unsure (1)..(76): unsure at all Xaa locations
  Clone ID: MRT4577_185159C.1.pep
MPAEGDKKIITLTSSYRKEFKVEKAATIDSHTIRHMMLDYCTDXSIPLSNVYYRILSKVIEYCYKHIHADRNIALD

SEQ ID NO: 278054 - protein, 98 aa, Zea mays
  Clone ID: MRT4577_18515C.1.pep
REHLVLILVSPYKITPIFTGHEKRSSSFHGRNGHRSLPPRILCLCSLRACVPFLTRLHTYLSLRALFPRAHLCGYLPFASPLASGGYGTWAATSLSFS

SEQ ID NO: 278055 - protein, 75 aa, Zea mays
  Clone ID: MRT4577_185160C.1.pep
LTQTPFGGGYTLMHKVDHVIYETQEATNAYTLMAPAGDHSCESKIEDVHSTWFTIMVERETTYNIGMGVKPIILL

SEQ ID NO: 278056 - protein, 198 aa, Zea mays
  Clone ID: MRT4577_185161C.1.pep
MAECKDDDSGRRSPSSSMDSSTHPPALSTASSASRRPPERRDQLSPDLQLGLSLSPASSALLVAETNNSIVPSTPRNQALPDWPPIKPFLRSALTASARRRRTLFVKVYMEGVPIGRKLDMLLLDGYSSLLAKLCHMFKASITYADAVEYHQRVPHEKAAHVLTYEDHDGDWMMVGDVPWELFLGSVKKLRIARTDRC

SEQ ID NO: 278057 - protein, 73 aa, Zea mays
  Clone ID: MRT4577_185162C.1.pep
IYRTTYNIYLTIGMDYQHDRSQPNLTKMYRLFSLHLHSHCHHHCLLSCDCPWELLHWKRVYPVIDGLHYNLTA

SEQ ID NO: 278058 - protein, 45 aa, Zea mays
  Clone ID: MRT4577_185163C.1.pep
LILNFSLIINRNIFILILRTVSCFINFNVYDFLIVKIFNLYQFQL

SEQ ID NO: 278059 - protein, 75 aa, Zea mays
  Clone ID: MRT4577_185164C.1.pep
KKKKKKKKKKKKKKKKKKKNKKKKQKKKNKNKKKYKKKIGGAPFRGSNFPSPFLQPFGFSFGSPNFISLPRLFHP

SEQ ID NO: 278060 - protein, 49 aa, Zea mays
  Clone ID: MRT4577_185165C.1.pep
VLVNAALALAEEFYSLSIWLQGSLSLAKSGSQFRHLPSAPRYDRVVDLA

SEQ ID NO: 278061 - protein, 53 aa, Zea mays
  Clone ID: MRT4577_185166C.1.pep
YLQQRQPLLNPLAVLNPLVRCHPLAATIAALQPVLFEEPCLFVAATHLGGAAF

SEQ ID NO: 278062 - protein, 99 aa, Zea mays
  Clone ID: MRT4577_185167C.1.pep
VEALLLFRSVDRGRKVTPVLYAYPHSSVASEANRRREGPVATAALEGLMWQVAVASKSAIMGSSVVPPMVFKRRPVKEEMGGRKRVSFSIGLEPNSELT

SEQ ID NO: 278063 - protein, 39 aa, Zea mays
  Clone ID: MRT4577_185168C.1.pep
GGPTPSFGFGSWPAVLVCSRLPSACLQGHSFFMGEPNLN

SEQ ID NO: 278064 - protein, 53 aa, Zea mays
  Clone ID: MRT4577_185169C.1.pep
NNPNRASTEKNHARDYDPIRSSASCCGDEITYTFADIVSANFDQSFHVRIQIF

SEQ ID NO: 278065 - protein, 163 aa, Zea mays
  unsure (1)..(163): unsure at all Xaa locations
  Clone ID: MRT4577_18516C.1.pep
MSFRLLDCSIDSEMTGTSEHDESAAAYLLDVLAGNARPSADDLTVILEXGGCPPDDDTTQLLLPQLNEKDXSXLPAAXRENFASNPCGVDVDNVDDASPAASRLAPTCRRTERDKVDYMDNRFDRLYCSLCDHADDYYQYWYLLAPICFIRPCIRHSPCGILG

SEQ ID NO: 278066 - protein, 98 aa, Zea mays
  unsure (1)..(98): unsure at all Xaa locations
  Clone ID: MRT4577_185170C.1.pep
PQLYXTPYGDRGGAPGGRAGNPGLTHGSQLLGCWDNPGRSPVGVGPPCRVLAATWGRPRIIKGPFQKKEWARKQGXSPGAARKPKPFSKRPXXFFYXI

SEQ ID NO: 278067 - protein, 57 aa, Zea mays
  unsure (1)..(57): unsure at all Xaa locations
  Clone ID: MRT4577_185171C.1.pep
SITAAKLSHFLSFSTSXNTALWATFIGGIIMFNNLPKHIFFNLHNKMFSSYFTLIST

SEQ ID NO: 278068 - protein, 131 aa, Zea mays
  unsure (1)..(131): unsure at all Xaa locations
  Clone ID: MRT4577_185172C.1.pep
PRVRRRAVALTDKEQAEEELCQGTLGMSRDSMHKRRATGGKQKAXRKKLKYELGRQTANTKLTSNKTVMRVRVRRGNAKWMAIGLDTGNYSCGTEAATLMTLILDAVYNASDNELAMTQTVVKSAIAHVDA

SEQ ID NO: 278069 - protein, 89 aa, Zea mays
  Clone ID: MRT4577_185173C.1.pep
RGRPGKLIAYHPRLYISSLSDHTPAGHGYMPRGTQPPDAVSCTTTSSSRPPWRKQIPNRRPMLPASKKDSSSSRTKSGFLWHSSMTKHW

SEQ ID NO: 278070 - protein, 29 aa, Zea mays
  Clone ID: MRT4577_185174C.1.pep
RKRYKHSLPRLLQSYSLSGVRAETELGSW

SEQ ID NO: 278071 - protein, 93 aa, Zea mays
  unsure (1)..(93): unsure at all Xaa locations
  Clone ID: MRT4577_185175C.1.pep
ASKPSPRTPXPSHLYCRRRRRHRRRAFICIYIRASPSVLSFPTAAAFPASSTADTGAPACFALGYLLTFTHLPRHAAGPCSGGTFYDYSEDHS

SEQ ID NO: 278072 - protein, 75 aa, Zea mays
  Clone ID: MRT4577_185176C.1.pep
CRTLMNNMYMLLLSTGSYTSGNSVQSNHLLELHITLRTSYLARVGFQGQIIEDLGCLDSRLLTHNYHHPIHRYNS

SEQ ID NO: 278073 - protein, 55 aa, Zea mays
  Clone ID: MRT4577_185177C.1.pep
GLEESDAPRREGGEHAAGPGGGGQHRRLPPCQRLGAHLLDDCAHGHAGPTWCRRC

SEQ ID NO: 278074 - protein, 111 aa, Zea mays
  Clone ID: MRT4577_185178C.1.pep
MHAGCSEWNVVTSSPCPIVHKPELKAYNKHHRSDGKVTKEEFEAMSREVVKAGSFRVGKASLELGALLFGAPACALLAKRILPGLGWLSDDVVVPLATSGSVAYLIKSKRL

SEQ ID NO: 278075 - protein, 122 aa, Zea mays
  Clone ID: MRT4577_185179C.1.pep
VYAKELHVRLACLTAIKCVPVHSVQRDLQVSTSLWIAAHDPEKVVAELAEELWDRFGFDAITDYSGIFNALSHKNYNVRAASAEALAAALDENQDKMQDALSTLFSLYIRDLGTSVEFGDAH

SEQ ID NO: 278076 - protein, 126 aa, Zea mays
  Clone ID: MRT4577_18517C.1.pep
IRLERHGALLIRAGRALLKPGWHRGSRAPSLITSYGQHVPEHLRNDPQLMLERPKGRPSLAPCAQPDNADCVHPLERPLRLERRHVAGAQRDGCPPGQLDRAGRHVEFFGGPGHELAQGGWQGLGY

SEQ ID NO: 278077 - protein, 118 aa, Zea mays
  unsure (1)..(118): unsure at all Xaa locations
  Clone ID: MRT4577_185180C.1.pep
RGRVGTAIHTSSFTSHGRCAQTQGASAPRAGYQEVDYCSEEGRSVAPAGFCRHGGGVQQHVVNEKFEEVDTXYAAGANHHHHHGYHGGHSFMVRETSVEEDINTLPGEVHERKESFLG

SEQ ID NO: 278078 - protein, 67 aa, Zea mays
  Clone ID: MRT4577_185181C.1.pep
GIILMVTERNLSHQCPWQGVIGSTAWWPHRIMGHGCMTLIAAAICTSPLSRFPMHLLSIIWNERMRR

SEQ ID NO: 278079 - protein, 109 aa, Zea mays
  unsure (1)..(109): unsure at all Xaa locations
  Clone ID: MRT4577_185182C.1.pep
TGAINPAPRQKVEEILQLFXKNPRQLGKILDIFKQRLGEEAFLAGGKFTLADLFPLAKADRLAAEPRFARLIELGKNVNKWWGPVFPPEFLVKVKEFQGPPFPEAPFLF

SEQ ID NO: 278080 - protein, 659 aa, Zea mays
  unsure (1)..(659): unsure at all Xaa locations
  Clone ID: MRT4577_185183C.1.pep
EHYPWKEELECLVRDGLPMALRGELXWQAFIGIGARRVEGYYEGLLAADSESQENKYSGSPTSECGPGKPKPSQTFSSEKWKGQIEKDLPRTFPGHPALDEDGRNALRRLLTAYARHNPPVGYCQAMNFFAGLLLLLMPGENAFWALTGIMDDYFDGYFSEEMIESQVDQLVLEELVRGRFPKLVNHLDYLGVQVAWVTGPWFLSIFMNMLPWESVLRVWDVLLFEGNRVMLFRTALALMELYGPALVTTKDAGDAVTLLQSLAGSTFDSSQLVLTACMGYQAVGEARLQELRNKHRPSVISSMEQRAKGLRVWRDTNRLASRLYNFKRDTEPLVSLSEEQSNDLTDGDKNQEANCSNVDDMYHGLTVNSEIDSLPDPKDQVVWLKGELCQLLEERRSAVLRADELETALMEMVKQDNRRELSAKVEQLEQELSELRQALSDKQEQEQAMLQVLMRVEQEQKVTEDARIFAEQDAAAQKYAAHILQEKYEGAMASLAQMENRAVMAETMLEATIQYXSSQQKAQLPSPSPSPRTPTRDASPGQGNQDSSQEFQPRRISLLAPFSSLGWRDKNKGKQNGSDESTNGKLNNSTDQGVETPKKDDEKKADSPKESEQIVRTPERDNELRLGTPKMDSEVPSVEMAANSTNGLEDQLEEIKLD

SEQ ID NO: 278081 - protein, 134 aa, Zea mays
  Clone ID: MRT4577_185184C.1.pep
MPCLHELAARQSAVMTAHNTNLPRLHYLSKRDLGGHAFGSCALAFRRDGLGRSFSYRLAVGCHRRLAEGEISRSDLSWLYLATVSLEPLFEIQGVVFYGGNFGSGLNLLAHTTAVRERIVFSLEMLLLESLHGI

SEQ ID NO: 278082 - protein, 155 aa, Zea mays
  unsure (1)..(155): unsure at all Xaa locations
  Clone ID: MRT4577_185185C.1.pep
PPPFFSSVVCAGGGFAAGRLRWVPPGFSXXXRCPPGARXLFXSPPPGXLGPLKKKSSRPQCDAYLPPPPLSSGNNAGALFFFFFFFFFYFFFCFFFFFFFFFFFKTRKTDMFXXXFXAGAGAXIPPLXXQQTKXLAPRXLRCXXCLRARTSTLAA

SEQ ID NO: 278083 - protein, 57 aa, Zea mays
  Clone ID: MRT4577_185186C.1.pep
LGVGLCLLLVPAPALNTGEAYVLREREKDVSCSSSSTQPVWYSGVGTERCVKDLLTV

SEQ ID NO: 278084 - protein, 704 aa, Zea mays
  Clone ID: MRT4577_185187C.1.pep
MAPCCLIQIGWCLERPRGFRLAAALCAAVVALALAPALDATSASLLGINYGRVGNNLPPPQSVMPLLEGLGIGRVRMYDADPTVLRAFARTGVELIVGVPDECLAAVADPGGAAQWLKENVAPFLPNTKISVLAVGNEVLTGANSSTLSRTLLPAMQSLHGAVAALGLDKQITVTSAHNLGVLGTSYPPSAGAFRKDLLPYLCPILDYHARTGSPFLVNAYPYFAYSSDPRGVQLDYALLDPGFAGVQDPNSRLHYPNLLVAQVDAVYHAIAAANTAASRVVEVRVSETGWPSAGAANETAATPQNAARYNSNAMRLVAEDKGTPLKPGAPLRAYVFALFNENLKPGLASERYYGLFKPDGTPAYELSFKLPRDNSTFGHGDTGKGGGGIGGNGNGNGSSWNNSGGGNSGYYDISASARDTTMDPKNRNPNWDRWGPKDAPQGSQSWGKNRSLSWRLKTGSGKPDGKDDIPISTPGDGGQPGILKTPHPTILKVENELVHRVFCQKYGMNGHHARECFKSLWCEICRKETQNTARCVLPKQNKPSMPIVGMAPDGLGFYSSHFAKPLSNKPNRSFIGLVKIVEGLISAEDLEKDFGFHFPWGRTWKATKCHSGFLMQFPSQERLDEMINFPEMKMKLSGAKIYVSSWSSQAKPKSKMHSVWIVAENVPEELQNYQAICVDVLGPTAHPGLPLKVFLGVGRCQRL

SEQ ID NO: 278085 - protein, 68 aa, Zea mays
  Clone ID: MRT4577_185188C.1.pep
RARPTYFIFMLFTHTPIPILSAFLTTKWDPSSHHLFTFFRPPLPNPDILTSVPSNQPHAVTITLYYSS

SEQ ID NO: 278086 - protein, 100 aa, Zea mays
  Clone ID: MRT4577_185189C.1.pep
MNFTRRIRGSAKNPLITRKLERNGRMTCMTFPRDWLPRDLSVMWFGLSCWIGPSIVSVINDDRLTGLIVTNIGHELAHLTTPSTVISQFWLWAMTLHLGL

SEQ ID NO: 278087 - protein, 54 aa, Zea mays
  Clone ID: MRT4577_18518C.1.pep
ARPPPPPPPPPPPPPPPPPPPPPPPPPFFFFLPKFKFLGGTNLVTFVRNLDLLC

SEQ ID NO: 278088 - protein, 96 aa, Zea mays
  Clone ID: MRT4577_185190C.1.pep
WCIKDFSKEPTLAGKLSTCPEKEDRCPSYVRGPWPLTGTTGHRSSWIQRIMSTAKIETESMHSASQVNGNTGVLCVFSKKKKHSRLRAALCACQAN

SEQ ID NO: 278089 - protein, 58 aa, Zea mays
  Clone ID: MRT4577_185191C.1.pep
YVPPPSKIIKFSRGPSVFLNLLAPVWNLRGCFAPPPFQSFEKKKQYSQNREYKNPKGV

SEQ ID NO: 278090 - protein, 52 aa, Zea mays
  Clone ID: MRT4577_185192C.1.pep
MDGECSPMAATTRSGTGRSHSEAERKRRQRINAHLATLRTLLPAASRMDKAA

SEQ ID NO: 278091 - protein, 267 aa, Zea mays
  unsure (1)..(267): unsure at all Xaa locations
  Clone ID: MRT4577_185193C.1.pep
PGVDPAHIYSLXLVASALSSDDFPRLHTSHQLFSLATSRLNRLRRPDLAASLLDLLLASAPPSPGLLARALSLYPGPDDALRAFSSSAPATRSPPPHLLRATRIQWFSKKGETAKGEELLDVMESKEVAPNYLTYNAIMQGYCKEGNVGAAMRVFKKMKVMKRREGRSDLGVSAHSQIYVVLFRSLVEKQKFGDALWIFKSCFAMKAAPPFEAVKGLVEGLVKAGRSAEAKDVVAKMAFLVKGDAKLAWEKVVGEFFFXEGTTNLNP

SEQ ID NO: 278092 - protein, 106 aa, Zea mays
  Clone ID: MRT4577_185194C.1.pep
DHAVRPNSNFTSRPFAGNGFGPDLRRRNLAARFGFKRWGILPEFFKAALVSRPRRAIRRRRTAPCLRSRGYALRWRYLHFLFALHFIAVRPRRVGRLQPSCHQGAL

SEQ ID NO: 278093 - protein, 88 aa, Zea mays
  Clone ID: MRT4577_185195C.1.pep
QVIKNEDLEELRELGSGTFGTVYHGKWRGTDVAIKRIKKSCFTGRSSEQERLTVEFWREADILSKRHHPDVVAIYGVEQHGPWRTMAT

SEQ ID NO: 278094 - protein, 114 aa, Zea mays
  Clone ID: MRT4577_185196C.1.pep
KKKKKKKKKKKKKKKKKKKKKKKKKKKKKKKKKKKKKKKKNTPRGGEAPLGGGVSPGEKTPPGFGWPQGVYFSQPKNPQKRGNLGFWGAPPPGGAAPPKKRGLRFPPPWEGPFF

SEQ ID NO: 278095 - protein, 90 aa, Zea mays
  Clone ID: MRT4577_185197C.1.pep
DITLLHQKYPTWASNLHRRLALVSLKTIREIEECRIRRHQTCYLRIPQTHNPSWSHHQKIGGTAYCYRETWMYPEHPLCTKAIYVARTQT

SEQ ID NO: 278096 - protein, 94 aa, Zea mays
  Clone ID: MRT4577_185198C.1.pep
QVKSLPESVQRLAYLDTLDVRQTRVQRLPQGVGKARKLRHILADACCPDGSQQSEFRSFTALEPPKALTSFGELQTLETVQANKDMAMKLARMM

SEQ ID NO: 278097 - protein, 66 aa, Zea mays
  unsure (1)..(66): unsure at all Xaa locations
  Clone ID: MRT4577_18519C.1.pep
MEPTGYMKPGAINPVEEVPADQKTTCGRKPTAENQFPRGXSTGKAGGXGTRGQQNGKKSVDTYKIY

SEQ ID NO: 278098 - protein, 52 aa, Zea mays
  Clone ID: MRT4577_1851C.1.pep
PGGVSAPPAHSQHPLVRRLVVAGSAGGALTLQASFQNLGRSVLRRLSRPASS

SEQ ID NO: 278099 - protein, 67 aa, Zea mays
  Clone ID: MRT4577_185200C.1.pep
MGRSPCCDQDAGVKKGPWTPEEDKLLVDYINGNGHGSWRRLPKHAGLNRCGKSCRLRWTNYLRPDIK

SEQ ID NO: 278100 - protein, 124 aa, Zea mays
  Clone ID: MRT4577_185201C.1.pep
GRVGRSPSFVPSPVASASTRRDHGSPPKFKSSPLDAPTAIQPLGSGSLPGRQATWHWPRPVGAEEEAADLAELPCEVVPGRAGLTVAHGRRAEVTPSGSHAEPSMPTLASSLPTRKLELSLECP

SEQ ID NO: 278101 - protein, 54 aa, Zea mays
  Clone ID: MRT4577_185202C.1.pep
MLFVIKVGYIVVGSFRQFALYTPYCNALLNIQLYVSPRLGIKSFAVFNRCVVPY

SEQ ID NO: 278102 - protein, 64 aa, Zea mays
  Clone ID: MRT4577_185203C.1.pep
SCRIDPSADLAALHRDLAPLGRSTTTANQRDEERRSLFLSPERVTGESKEIQSVPKRSGSLTSW

SEQ ID NO: 278103 - protein, 50 aa, Zea mays
  Clone ID: MRT4577_185204C.1.pep
CPSYLDTIPNESTSQNKSSIYYEAKIIGAGGDSHFSLREVTILTNQLIMS

SEQ ID NO: 278104 - protein, 57 aa, Zea mays
  unsure (1)..(57): unsure at all Xaa locations
  Clone ID: MRT4577_185205C.1.pep
PFPKGQVGWRSAGVERSSGWTIFLAFXKKEFLHHLRRRIRSGFSPLVELCKGLAVDP

SEQ ID NO: 278105 - protein, 42 aa, Zea mays
  Clone ID: MRT4577_185206C.1.pep
GGTFTKATSEHREGVHAPRRDKLMCLHRDSTVKNAGRRFTRY

SEQ ID NO: 278106 - protein, 86 aa, Zea mays
  Clone ID: MRT4577_185207C.1.pep
VFYPTDSNYPRGGVLCKEHQDLLSRSSVFFGKEEAAWKMEEILLSPPCSKLTFLCRLFVAYLAYTIVHIPRICPGFYGHLALLHWI

SEQ ID NO: 278107 - protein, 35 aa, Zea mays
  Clone ID: MRT4577_185208C.1.pep
NLGFGSVLPPDNCGCSWACRRWSVLCLAEGTGRVG

SEQ ID NO: 278108 - protein, 47 aa, Zea mays
  Clone ID: MRT4577_185209C.1.pep
HQGAGPFVSPIRRAVNVPFSVGKLRSPTLSVVVKKKYEHKKKNLTRI

SEQ ID NO: 278109 - protein, 97 aa, Zea mays
  Clone ID: MRT4577_18520C.1.pep
HPKPEDKPPMPPYGSPTPINHPPAKKKVAFAKKPFLDPFPKAHASPPFFSPFPKKPVPPKPKPEPKPELKPHPEPESPPPTPPYGSPTPISPPPAKH

SEQ ID NO: 278110 - protein, 92 aa, Zea mays
  Clone ID: MRT4577_185210C.1.pep
NSLSRFSLQHTVEWYYTFILLAVAATLSSGGWSTAHWLVAASLRTGWSTAQCALAGGWRLAGAVRTVFWIRTAAEYEQRLPTWVEYEQRLPT

SEQ ID NO: 278111 - protein, 284 aa, Zea mays
  Clone ID: MRT4577_185211C.1.pep
GVSKGSSNNKSAQSGCQVIDNDDYDLLCRSGVLVEQEYTVSSWDGHTVLLGDSHVVTFSAGQALWLATNSQQVVCLHGELFFIEKPELLTIANSTSNMAKGISSDSSLKLPPIKDFLTVAVSPIGDLKVAAKTLMGSKNLSKESKAYYEALKKERAAEDARSTLDLEFQKFAFALGNFFQRIKPSKGGESWPDWTLRNARAGNFKKLENKLDSIFKVEQARIEGITHLQKISGEAFDRAHKAETEVIELRHDLAVARKRLKAYDDSYASRDHYNYGNLPPGDQW

SEQ ID NO: 278112 - protein, 46 aa, Zea mays
  Clone ID: MRT4577_185212C.1.pep
ERVAPIGGHSEYSSTGVELLSTSGRTLLETCSKYCARRIYGPRPVA

SEQ ID NO: 278113 - protein, 71 aa, Zea mays
  unsure (1)..(71): unsure at all Xaa locations
  Clone ID: MRT4577_185213C.1.pep
RLMNGGSSVLVARRLXDLRGAXRLALVQYGRIVXRGSHXDLVAGPEGAHSPVLDLHHQCVSFGQAYPPSDD

SEQ ID NO: 278114 - protein, 159 aa, Zea mays
  unsure (1)..(159): unsure at all Xaa locations
  Clone ID: MRT4577_185214C.1.pep
MVVFSDLHTDDGLKSLEDHLIGKTYESGDSITXDDIRGFTAVTSIPDAEIPNAAGWYKTASADGSSRFPGNADGVNQPAKTAPAMAAPANDDDDDDDLDFFGDETEEDQNASDEPAVAAKASSRKMESEKSSVLMDVKPWXDDTDMYMLYEADHIDQME

SEQ ID NO: 278115 - protein, 138 aa, Zea mays
  Clone ID: MRT4577_185215C.1.pep
MPGSMLGGSNNPSIYEGGVKGPYRANSTHPKFNHPAPIEFYTPLCSAATTGTGGGSSGPPVGRPGNHRAVRRARGSHRRFFFFDRRSLAGGRNRGRLTISDMERTPDDIILAGDPDTGEPLVHSPPRGASTTTTGSNR

SEQ ID NO: 278116 - protein, 61 aa, Zea mays
  Clone ID: MRT4577_185216C.1.pep
SSGVPASLFFFSHLASAKRCVTLFISRQKIESVAVVSPHVWPMMQFQTTPPNILGPYNVLI

SEQ ID NO: 278117 - protein, 144 aa, Zea mays
  unsure (1)..(144): unsure at all Xaa locations
  Clone ID: MRT4577_185217C.1.pep
VVVCPSFVSGXWXXGCXFPXGPLVWSLPCGLXVCGWSRXFXFXXALRSXXSXAVLVXXXAGSVXXXXSSXXGLGFWXGSSLGFAXFXFXXWLKKNLGLLLPPAVGPSWVVWFWGSSXLVCVAGCXXLXPFXWFGFXARPCFPXV

SEQ ID NO: 278118 - protein, 86 aa, Zea mays
  Clone ID: MRT4577_185218C.1.pep
YILANIAAAASSSADSPSSSSVDTTDNAHGDAPLQAQAQGISDSDHSPNDKDADADMATFIVHRLNRPAVRTQTRTHMQTRTQMQT

SEQ ID NO: 278119 - protein, 45 aa, Zea mays
  Clone ID: MRT4577_185219C.1.pep
SIHISSKSKYIYICLLGMCNCNHWTTSTHGSEQSSEFKTQGAQKI

SEQ ID NO: 278120 - protein, 193 aa, Zea mays
  Clone ID: MRT4577_18521C.1.pep
LQIGRGVPLGVRLLVGAEAQPAPSLQVRLGTLRPSLLAGSPARDSVLAGVAAKTRPASARRSATGPATGRRTAEMGRAALSLPEIVARRRRGRRRRRGAPAVPTSDHPRHLCSPTWSRTRAVPLPPGCLEIRAGVLARALLGNAQPQNCSISMIFSVLAMHTSQVNRLGRGELGHFVLNVSTETNRTSASRSY

SEQ ID NO: 278121 - protein, 94 aa, Zea mays
  Clone ID: MRT4577_185220C.1.pep
HASHASGHSSGHAFGHAFGHAGGLIGPAAAAKQHIALLISAIAEVEQPQDAVKLFNRWTFDDVQVNDILLNDYLAVTAAKHATFLADFAGRYFK

SEQ ID NO: 278122 - protein, 237 aa, Zea mays
  unsure (1)..(237): unsure at all Xaa locations
  Clone ID: MRT4577_185221C.1.pep
FSPVVIPVIVXMVLSLVLSRGWLVHQLDVKNDFLYGMLSETIYCNQITWFVXDLVCCLNKCVYKLKKASRAXDTXFASYSLSLGFTEAKSYAFLFIFCXGTKMVYLLYVDNIVLTASSTELLQNTISAQWEFAMKDLRFLHHFLNISMEXENLXFFLHQXLYMLDILXSLGXTDYKPCITHVDXKSSLLXNSXPPVAXXXFCRXXXTLEYLTVTKCDIAYMWGNRAICTCMILGSLT

SEQ ID NO: 278123 - protein, 350 aa, Zea mays
  unsure (1)..(350): unsure at all Xaa locations
  Clone ID: MRT4577_185222C.1.pep
MQQQPEPADPPGRALPPPAVPAPAPVAARAAHHRRARSEVAFRLPDDLGIGGGGGPDGDTFDDIGSEDDLFSTFMDIEKISSSGPSDRDRAAETSXPRAPSTATAAPSTARVSSSRPALAAARAXAAASLAEVMEAKKAMTPEQLAELAAIDPKRAKRILANRQSAARSKERKARYMTDLERKVQTLQTEATTLSAQLTLFQRDTTGLSTENAELKIRLQAMEQQAQLRDALNDALKQELERLKHATGEMTNSSEAYNMRFQHVPYNSSFFPLSQQNASPHLGSTQLPLPFHPPHPNVPNHQMVSHRNTLPDIMQQESLGRLQGLDIGKGPLVVKLESSSISASESSSTF

SEQ ID NO: 278124 - protein, 451 aa, Zea mays
  Clone ID: MRT4577_185223C.1.pep
MPVAVALAAAAALVVLLVLSAVAAAVFFARTRGARPPSLSRVEHAPSSASGSSRAASSARKEKVGADQVAEPGAASSGVASSSAAASSLESPVKRKAEAVRVGGGGGGAAAGVEMEVGWGRWYDLTELEIATGGFCPANVVGEGGYGTVYRGILAGGEVVAVKDLFDHKGQAEKEFKVEVEAIGKVRHKHLVGLIGYCAEGPKRMLLYEFVENGNLEQWLHGDVGPVSPLTWEIRMKIAVGTAKGIAYLHEGLEPKVVHRDIKSSNILLDKRWNPRVSDFGMAKVLGSGSSYVTTRVMGTFGYVAPEYASTGMLNESSDIYSFGVLLMELISGRSPVDYNRPAGEVNLVEWFRGMVGSRRVEDLVDPRIAAPPPPRVLNRVLLVCLRCIDADAHKRPRMGQIVHMLEGDEFPFRTEHRSPRASHRTSTASRPSLLSENVGATDDSDKSMAR

SEQ ID NO: 278125 - protein, 44 aa, Zea mays
  Clone ID: MRT4577_185224C.1.pep
CECSELPTGAVLGHVACGAKPEDFSLVINPTEGGRRLSARRPGN

SEQ ID NO: 278126 - protein, 293 aa, Zea mays
  unsure (1)..(293): unsure at all Xaa locations
  Clone ID: MRT4577_185225C.1.pep
MLIEIMTCFRGQAEKEFKVEVEAIGKVRHKHLVGLIGYCAEGPKRMLLYEFVENGNLEQWLHGDVGPVSPLTWEIRMKIAVGTAKGIAYLHEGLEPKVVHRDIKSSNILLDKRWNPKVSDFGMAKVLXPGSSYVTTRVMGTFGYVAPEYASTGMLNESSDVYSFGVLLMELISGRSPVDYNRPAGEVNLVEWFRAMVGARRVEDLVDPRIPAPPPPPRVLNRVLLVCLRCIDADAHKRPRMGQIVHMLEGDEFPFRTEHRSPRASHRTSTGSRPSLLSENVGATDDSDKSMAR

SEQ ID NO: 278127 - protein, 75 aa, Zea mays
  Clone ID: MRT4577_185226C.1.pep
ARRSSGDETFYRRGYMLATSSPIRTICLLLHPHRQVRLLTLLPLRYLRHRLQPMAICCNVDLRSSSTEAAASYDV

SEQ ID NO: 278128 - protein, 75 aa, Zea mays
  Clone ID: MRT4577_185227C.1.pep
AYLKKKKKKKKKKKKKKKKKKKKKKKKKKKKKKKKKKNRTPWVGPVGLTGEYSGRVPCGLSRFLLFNGGHFRNLA

SEQ ID NO: 278129 - protein, 195 aa, Zea mays
  Clone ID: MRT4577_185228C.1.pep
RVYGSLCPRRPPAPRPPGLSVYSPPSARFRRLPASVARGPHAARAAPHKGLGRDLLLRRRRPRGSFRIQTRSRGMESTTFCPYAISRLPMRICRLILVPCLHMPPPSSYIGSPDSRIAVDVELSVAFTALSSVVEKYAMELAFRAMRTRAPPNSCWLQIDFPIWMPRRGICYCTKQFFVLGTKERTSPQVSTVDV

SEQ ID NO: 278130 - protein, 99 aa, Zea mays
  Clone ID: MRT4577_185229C.1.pep
AHLSGGRPVLFVFFFFYLILLKNIFKNGRSRPGKKKRQNPKAQATRENKKANRTGTQMAPEKGGKQNKPNRGRPKPIAHTSKETATKMGVPGQAKGTAG

SEQ ID NO: 278131 - protein, 103 aa, Zea mays
  Clone ID: MRT4577_18522C.1.pep
MMFYCFSVFLPLFVVRVFRCVLRAVVFVDVEHPAGLALVEPPQWEKDRASAANARASASATARVRLLTRSLHINPTRKPQGRGHKASGTRAVRIHLQNSSCYR

SEQ ID NO: 278132 - protein, 37 aa, Zea mays
  Clone ID: MRT4577_185230C.1.pep
HYSCNFLVMATQHLTQVAKEFFSREHGWRSSLRIDSH

SEQ ID NO: 278133 - protein, 67 aa, Zea mays
  unsure (1)..(67): unsure at all Xaa locations
  Clone ID: MRT4577_185231C.1.pep
EQSCPRQSAIRKVLRDNIQGITKPAIRKXATRSGVKRISGLIYDETRRVLNIILEYVIREAVTXYTE

SEQ ID NO: 278134 - protein, 50 aa, Zea mays
  Clone ID: MRT4577_185232C.1.pep
KENNLNLTTFTLHKSKNPTKAWFTPPEEYYHKTHTHTNRPRPKHSVNHDL

SEQ ID NO: 278135 - protein, 204 aa, Zea mays
  unsure (1)..(204): unsure at all Xaa locations
  Clone ID: MRT4577_185233C.1.pep
MASSSLFLQSIFMTSFTNLSCNQQFHRISLLGSCKAFQNLGIXSNGTHFSYASIFTANKNLTASQALSQNGNIENPRPSKAQELSEYEINELDRHSPKILKNAFSLMFGLGDLVPFTNQLYTGDLKKRVGITAGLCVVIEHVPDKKGERSEATYSFYFGHYGHLSVQGPYLTYEDSLLAITGGAGIFXRAYGQVKLQHPVFPTH

SEQ ID NO: 278136 - protein, 93 aa, Zea mays
  unsure (1)..(93): unsure at all Xaa locations
  Clone ID: MRT4577_185234C.1.pep
TEVLRLHTPLWLLLARACWSSCYVHGFDCAAGTIVFVNAWAIATDLTHWAMPDDVVPARFESNSVDFKVTNVEXLTIVASRRLCSAMAFALLR

SEQ ID NO: 278137 - protein, 219 aa, Zea mays
  Clone ID: MRT4577_185235C.1.pep
AVRRRSTPRLPAALGDRRRRPPYSELFRTLCWRAPTTPDVIPIETARSRFLDLVVESFICEHVTELVECSSSDCSQVDGKSSKRKQQEVRYEGDPRVALPLMYIANLYETLISDVNVRLAALIGFREKTIGLALEASGGLYRKLIQRFPKRGHCSFKRRELATSHATRTKFPELVVQEEKRVRFVVINGLAIVERPENMRMEDAEWFKRLTGRSEGAIC

SEQ ID NO: 278138 - protein, 59 aa, Zea mays
  unsure (1)..(59): unsure at all Xaa locations
  Clone ID: MRT4577_185236C.1.pep
DHFFSFRSLNGLHLEVFFLFXWCLAGMMPARGILVRGIYNASIIDHLLPVQCTVVVILS

SEQ ID NO: 278139 - protein, 55 aa, Zea mays
  Clone ID: MRT4577_185237C.1.pep
TPLQNLLLSTGHGEVSDLLSLITTQRLAFLALDNLTLGKGEGNSNVNKKPHTPSC

SEQ ID NO: 278140 - protein, 390 aa, Zea mays
  Clone ID: MRT4577_185238C.1.pep
DYMNGSYTSSLSLHDVSVDDGQSALDNSSRTSSPFDILTPQDVIPIETARSRFLDLVVESFICEHVTELVECSSSDCSQVDGKSSKRKQQEVRYEGDPRVALPLMYIANLYETLISDVNVRLAALIGFREKTIGLALEASGGLYRKLIQRFPKRGHCSFKRRELATSHATRTKFPELVVQEEKRVRFVVINGLAIVERPENMRMEDAEWFKRLTGRSEVAICSRDYKFYSPRHKIRRSPQAAFDIPDTSALAEDENSSLVCSSGFRSPNEIQNQHQSTSKRPIEHLENQPFLHLFHQAEDDSMQQVQHCAQFPPIHQCTSTPHLSDNPQHQQQAYLSQHISCLQVGQGHLGGRMHIIPTSPAKFCDECGSPYLRATSKFCSECGTKRLGM

SEQ ID NO: 278141 - protein, 91 aa, Zea mays
  Clone ID: MRT4577_185239C.1.pep
FLHKEPPKGGFQTNVEHKKCPDNRTQEIGACGVYSTVFEVGGICVVYKDKRGGALVYCEVFYHRASLFITCAKSVGLCWLEGYKGFVIKGA

SEQ ID NO: 278142 - protein, 29 aa, Zea mays
  Clone ID: MRT4577_18523C.1.pep
RASPMIKRGNFNLKLLIVFTPGYINYVFE

SEQ ID NO: 278143 - protein, 80 aa, Zea mays
  Clone ID: MRT4577_185240C.1.pep
RSKTLTMVLVHPVANTAKLEEQSKDFRTQLSLIVDLLNSFAALGAVTIRVSGFTTLQLMVSLVSQTIKGWLKLRWPPEGA

SEQ ID NO: 278144 - protein, 125 aa, Zea mays
  unsure (1)..(125): unsure at all Xaa locations
  Clone ID: MRT4577_185241C.1.pep
MDGSPRGSRLPRTXRTPPTLXXXRXPPPPPPPPPPPPPPPPPPXPPPPPPPPPXPPPPPPPPPPXPPPPXXPPPPPPPPPGPPPPXPPPPPRPAPPPPPPGPPPPPPPPAPPPPPPPPPPGPPPP

SEQ ID NO: 278145 - protein, 49 aa, Zea mays
  Clone ID: MRT4577_185242C.1.pep
PCGAPPTHSYVRRTGAMAVYQPIHASWKRLWAIHWLPRSSFIYRYVRLA

SEQ ID NO: 278146 - protein, 64 aa, Zea mays
  Clone ID: MRT4577_185243C.1.pep
NIPFPLSHTINHFHSLIINHFIHPHQQVSTTIFSHFTNINYLYQSNHLYLQISSTKNTTLTYFI

SEQ ID NO: 278147 - protein, 97 aa, Zea mays
  Clone ID: MRT4577_185244C.1.pep
CNVLLLCICNVFQTTLRKIARDILAIPVSTVASESAFSTSGRILSEHRSRLTPEILEALMCSQDWIRNSYKDGAEVNQQSFWDCLQEIQEGVEGLIL

SEQ ID NO: 278148 - protein, 42 aa, Zea mays
  unsure (1)..(42): unsure at all Xaa locations
  Clone ID: MRT4577_185245C.1.pep
RAGKCRRYGLQXQLNRLXALGTFYGIRFLXRIIIPRNSQCRG

SEQ ID NO: 278149 - protein, 73 aa, Zea mays
  Clone ID: MRT4577_185246C.1.pep
LFHSALSHLPKKIASSQILILPHHFHPRLWPKLPFKTFYHRARPKTRPFEHYFTFENQFENFLGQNLMKNWLD

SEQ ID NO: 278150 - protein, 49 aa, Zea mays
  Clone ID: MRT4577_185247C.1.pep
ITRAIVLKFNTHSKEHQVRVCYSTWFNSTNFHTRVWPFSVNLQVPIHPL

SEQ ID NO: 278151 - protein, 101 aa, Zea mays
  Clone ID: MRT4577_185248C.1.pep
SRHRQHITIMASMAPQQRSSRSTKQLLLVPVEMRRHSSTKLLLVPPLPVRRRSSCIVMAAAVAPRRWGRFRESAWPGRTPTTTTTTNAHFNPTMIDRGILN

SEQ ID NO: 278152 - protein, 49 aa, Zea mays
  Clone ID: MRT4577_185249C.1.pep
SERPVVARILSETDTMTPGYLSRTRGRRPKDGYPRTEKSIPHNIRACER

SEQ ID NO: 278153 - protein, 69 aa, Zea mays
  unsure (1)..(69): unsure at all Xaa locations
  Clone ID: MRT4577_18524C.1.pep
GFPPPGFYYVCFFCRGGSPRGFFFGPNSGPFXKLQFKCSHXKKSGFPFFSSELQCQGPNVLSKQLFFSI

SEQ ID NO: 278154 - protein, 57 aa, Zea mays
  Clone ID: MRT4577_185250C.1.pep
TDQGDKYSKLHIKSIYNIACIGLDGSIRLKVRPKESVYRIYRMSDADITLDHYLTIP

SEQ ID NO: 278155 - protein, 57 aa, Zea mays
  Clone ID: MRT4577_185251C.1.pep
YYIRIIIIICCNFYAVYIDNILYILYYIVRFFLTLKTKNYNDLLKGIKNTFFFSKMN

SEQ ID NO: 278156 - protein, 35 aa, Zea mays
  Clone ID: MRT4577_185252C.1.pep
MFPDKFKLMHIGHLPRPTRPLPVFPLTPSSRFLEA

SEQ ID NO: 278157 - protein, 33 aa, Zea mays
  Clone ID: MRT4577_185253C.1.pep
NLARVNSTVLYEHDPIACPSELNKELDKIKNDT

SEQ ID NO: 278158 - protein, 164 aa, Zea mays
  unsure (1)..(164): unsure at all Xaa locations
  Clone ID: MRT4577_185254C.1.pep
MRCNVGCSSWPNGSKLSSHVSGPPAASWSQCCFESSNSRAKMADSERSSPSSHSSRRILCDRIGFCKTGLTLDNSTTVAEIFPKMDRTYKLXGEDVHGWFSLDFTAEQLVQNVTLIQNIFSRPSTFDASFGMYTLDDVVELHPPQIWLNVEYNSFFLEHKLSSE

SEQ ID NO: 278159 - protein, 106 aa, Zea mays
  Clone ID: MRT4577_185255C.1.pep
SAREYAMLIFQPLPLLHLGELIISARALVAVRPTAMAKLALQLKSKLFDLVGRLTSCGRAGTTHKDADGATEAKLSVVSQPAETRPRGGASPDDGGAKGQINSDTI

SEQ ID NO: 278160 - protein, 181 aa, Zea mays
  Clone ID: MRT4577_185256C.1.pep
MFFAPPGQMGGRDPHMHLVLLLLHGASAALNPPTAGPKWQTLSGRPPQVVTRGGFYGLFPDSSHMAYQLALSTSLPDVVLLCDLQFSSDRIGYCKTGLTLDNSTTVAEIFPKMDRTYKLHGEDDHGWFSLDITAEQLVHNVTLIQNIFSRPSTFDAFFGMYTLDDVVELHPPQIWLNVKNN

SEQ ID NO: 278161 - protein, 35 aa, Zea mays
  Clone ID: MRT4577_185257C.1.pep
THTSGRCSCQLPPPVHLPASVHLTPTVHLPTPVHV

SEQ ID NO: 278162 - protein, 110 aa, Zea mays
  Clone ID: MRT4577_185258C.1.pep
FPVQAYLLDHSQFQLHQKVEGWTDRWWYKLDIQFRRSLTNQFLYLADRLFGSCHLGAFFEVEHPTMTWMAPGHDANPVLAECPKYLMILKQQVCALKIHRYFAGKTYLIH

SEQ ID NO: 278163 - protein, 123 aa, Zea mays
  unsure (1)..(123): unsure at all Xaa locations
  Clone ID: MRT4577_185259C.1.pep
MVISVCAATXTIFAQCSQCXPVAFDSVLRDLSPXSASVCENAFLQPXYGIQHAIALGMLPLSRLFLQQSSGLLQLLRLMHXLGQNITAHRLQQLVLAYLAGYCYQHQFIPCNQLAALNSASYL

SEQ ID NO: 278164 - protein, 67 aa, Zea mays
  Clone ID: MRT4577_18525C.1.pep
RGGEGAHIGGISAAASAAREAGVAIAISQTPTSRMKGGKHLGRSFSRIAKCSQDAGCAEAAEQEAAP

SEQ ID NO: 278165 - protein, 37 aa, Zea mays
  Clone ID: MRT4577_185260C.1.pep
GWVRFLNKDEHCFGKEIGCGLIFIKAIGERWMFFKEI

SEQ ID NO: 278166 - protein, 107 aa, Zea mays
  Clone ID: MRT4577_185261C.1.pep
WLSQGSAVLSYLYSLVMSVPPSRGPVTGTLSPSGSGVRSSKPCMCLSPFRTFFFHPSWCMATATGPVWPRASGAAPRAMGRALQSGRGAPWASDHSSPKESWPATSR

SEQ ID NO: 278167 - protein, 98 aa, Zea mays
  Clone ID: MRT4577_185262C.1.pep
MADNNNQQPGLIGSHAQYVKGAAEATIGAITGSQPWKASGEQDKAAGLADMKKAGELRAQNDPNNQNGYGKAEEIAGKLTGCQGMEREGHASAAQKKE

SEQ ID NO: 278168 - protein, 32 aa, Zea mays
  Clone ID: MRT4577_185263C.1.pep
PNYLRCLVVVEVPSRFYVKISSMAARVNARVG

SEQ ID NO: 278169 - protein, 295 aa, Zea mays
  Clone ID: MRT4577_185264C.1.pep
IEYPGDCYLACTNLVIPTGTLNGQSGEESIREYRSKWLIVATGENAEPVVPDMPGIHNFKGQVMHSCDYRSGESFQGKKVLVVGCGNSGMEVSLDLANHNVHTSMAVRRSGHVLPREVMGISTFSLSVWLLKFLRVQIVDRILLLLAWFILGDTAQIGIPRPSMGPMELKQVSGKTPVLDVGTIAQIKSGNIKVFPAIRSFQEYGVEFTNGRIESFDVVILATGYKSNVPYWLKENEFFSQQSGFPNKPNEWKGKDGLYAAGFSRRGLLGVSMDATKIAEDIAQSYNNIYKLQRS

SEQ ID NO: 278170 - protein, 62 aa, Zea mays
  Clone ID: MRT4577_185265C.1.pep
TTTVPGEARRGFIFAPPHRGGGVLKAAGHGGVKNPIVLRPPRGRETRGGGASLGRRNPEGGG

SEQ ID NO: 278171 - protein, 167 aa, Zea mays
  Clone ID: MRT4577_185266C.1.pep
MFMTLIPQHPVLHENNEPDYEAEVLHEDNEPDYEAEVLHEDNEPDYEAEVEEEVLHDDNEPDYEAEGDATFCKRDYSHALDLYTMAMEIDPDNSTLYAKRSLCFLYTGNEGKALEDATTYRDMQPALALVKEYCMTCEALLPGLNSDFLSKPTDEAFGEGQSVKKGY

SEQ ID NO: 278172 - protein, 72 aa, Zea mays
  Clone ID: MRT4577_185267C.1.pep
FATHSTNQDIKVDFYNNQTSNSTMKLSTMAKSLASFANTNTKDKGSLPRPNTTRIIRYPNVPKSNLINPFLK

SEQ ID NO: 278173 - protein, 71 aa, Zea mays
  Clone ID: MRT4577_185268C.1.pep
NQGDIYYKVLQQGPCNPASNGTQSLTAFLVVVASLPFCTRKITNAWFNNLTCQIFSQNTPPWFFNAILALP

SEQ ID NO: 278174 - protein, 166 aa, Zea mays
  unsure (1)..(166): unsure at all Xaa locations
  Clone ID: MRT4577_185269C.1.pep
GTRAARQAAADAPTAAVARVAHLVEQVQRHHLSPDANLLSSSVHSDLLTPREEGEAERALDLQALEAYTEAVDMAEEYHAAAGAGKKLNCYPQAYKPLEHRAAGADAQQRLKVPLLSHEGQVHEHEIEKLSTDSRRXVDSTLTSATPRSSSTLDEYTTIIAEALGP

SEQ ID NO: 278175 - protein, 82 aa, Zea mays
  Clone ID: MRT4577_18526C.1.pep
MSEEDKTDASAEQTERAPMLNERILFFLPRRSVLAHPGHDLEIGPDAPAVFNDGGANTNGRKGKYELDMKTVLMKVDRALYL

SEQ ID NO: 278176 - protein, 89 aa, Zea mays
  Clone ID: MRT4577_185270C.1.pep
EAAVGAAAGGSSKEGLSVGCRLVGVSSVGGLCLAGLPLSGIQSLKLAPGLAFGACVVLLVGGMSSAVPFDRACLLGWGGTSLFPFPMAP

SEQ ID NO: 278177 - protein, 105 aa, Zea mays
  unsure (1)..(105): unsure at all Xaa locations
  Clone ID: MRT4577_185271C.1.pep
IXTIGLWAPNIKVNPKLITPPPTRGGPFGPHKQKPNVFTWGLFLGAPTSKRAIHYHQGSDEKKPAGMGLISMGKLPTPPKKDVYSWTSANAFCPRGLAKDPWKST

SEQ ID NO: 278178 - protein, 104 aa, Zea mays
  unsure (1)..(104): unsure at all Xaa locations
  Clone ID: MRT4577_185272C.1.pep
MSSLSSAAVTAPSFAAPAPARVVVRRRSFTVRASLRKGTDSAAAAKAASALLAGVAMAQKALLCAGDCGIVFETQHKITVKGSDTITFKNNDDFTHNALXFDED

SEQ ID NO: 278179 - protein, 89 aa, Zea mays
  Clone ID: MRT4577_185273C.1.pep
GPAPAVSFVVSPPAREGGVILGGPPIKGHRSCVAAPVDISLGSGPPQANPTLNLSAFWWGGFTLLKKKKKKKKKKKTKKKKKKHQKKEG

SEQ ID NO: 278180 - protein, 104 aa, Zea mays
  Clone ID: MRT4577_185274C.1.pep
FGGLGGLFPPPLFSFKRVNPFVGVLPAHPPFFSLFLLPRRLQVDPFSPLFLPPGGRGSPHFFLFFLFLVGEGPLWALFPSLLLSPLVPLFVLWQGTWGNNGQFF

SEQ ID NO: 278181 - protein, 51 aa, Zea mays
  Clone ID: MRT4577_185275C.1.pep
KSRCFVSKTYSVSNSCRDLGAGTDLVVSKSLIVKFKMVDKLQGWLRCKSLL

SEQ ID NO: 278182 - protein, 45 aa, Zea mays
  Clone ID: MRT4577_185276C.1.pep
STFIRTYIISQYLFEHSEIVYKEFPRLLRFTRIFVTTSGHRITNL

SEQ ID NO: 278183 - protein, 66 aa, Zea mays
  Clone ID: MRT4577_185277C.1.pep
MGHARCTLTEARNGDGQAVLGLDWPEPLLTFALSSGKRSSPVSFDRLGSVRAMYLLAAAFLLLVER

SEQ ID NO: 278184 - protein, 87 aa, Zea mays
  unsure (1)..(87): unsure at all Xaa locations
  Clone ID: MRT4577_185278C.1.pep
PGQDRXVREEILRKRRAGKLPGDTTSILKQWWQQHSKWPYPTEDDKARLVEETGLQLKQINNWFINQRKRNWHNNSQTSTLKSKRKR

SEQ ID NO: 278185 - protein, 149 aa, Zea mays
  unsure (1)..(149): unsure at all Xaa locations
  Clone ID: MRT4577_185279C.1.pep
RGSRIRAQSRWTTVIGACLALGSASCYGLYMACPLPVLEGLDVARAWLTTNKGDGGLHPDPVHLRHAECTPLAAGPYYLLRGQTSDMCHALRDQCXQLPMTKKDDQPAAQQVQIMKHVERAAGRCSQLDDPRLMHQAQLLVAVQRLRPK

SEQ ID NO: 278186 - protein, 99 aa, Zea mays
  unsure (1)..(99): unsure at all Xaa locations
  Clone ID: MRT4577_18527C.1.pep
MAAKVAPFLALSSLFAPTAHGXXPNCSGPVVLTPPXGPTPXPYRHGCCPINAFKXXGCDIHPAAQEHAVTDDEDRAGEHKATAEEDGAATAHITDRYIP

SEQ ID NO: 278187 - protein, 125 aa, Zea mays
  unsure (1)..(125): unsure at all Xaa locations
  Clone ID: MRT4577_185280C.1.pep
SSWXRLVRPALGGRRALAXSXFXLXSRVLPXXLPRLXWAFSCRPLSLXGPFSRLXXALPRPWWAXVPPPRGALRAALRRSSCPPXGSRXPAPRGPGRVXGAVPPVVGPRXGPGLLFLRPARXGGA

SEQ ID NO: 278188 - protein, 62 aa, Zea mays
  Clone ID: MRT4577_185281C.1.pep
TRVIFRISNKYHNKSLIVSQYPLECLIAHHILSHMLCIQELFTIRYCSFSFLIGRVGDRDPD

SEQ ID NO: 278189 - protein, 93 aa, Zea mays
  Clone ID: MRT4577_185282C.1.pep
MSIMKGGKNEAAAAGVAILLVLHVMVAPPTVMVARSPRGAEQDGSLATTPKEKMLSATLCYTVETCKYTPCFTPACSCSFRDRLCYIIFTPDA

SEQ ID NO: 278190 - protein, 102 aa, Zea mays
  Clone ID: MRT4577_185283C.1.pep
GGLVFRAVPTAPEVVGGAGGRPSSGAAVCSIPARPRCRESLGASRSRSWSSPTRRLEGGRRPAGVHRRRAPRSTPWPAVQNAPGAPVLIAKAACRPLLGNIL

SEQ ID NO: 278191 - protein, 52 aa, Zea mays
  unsure (1)..(52): unsure at all Xaa locations
  Clone ID: MRT4577_185284C.1.pep
DRVLKPGGLYVSYXWGRTPLYRAEDPDHVECIHGIXRGDALPGLHRQDVIAT

SEQ ID NO: 278192 - protein, 70 aa, Zea mays
  unsure (1)..(70): unsure at all Xaa locations
  Clone ID: MRT4577_185285C.1.pep
LFGXWSCSSVCWIILYMTYDFDLKKKKSSRLRLRPNQSPVPTPPPLFSTARARAAPAAASAATGPRSPHL

SEQ ID NO: 278193 - protein, 98 aa, Zea mays
  Clone ID: MRT4577_185286C.1.pep
RTRGRTRGGELCVPEWGGSCSRGNSFISKKLLLRVRRLAHNCDNILPYQEQVDVHRSFLLGCTLRLSGFELSNPCWHTINWTARILRYGLLIFISLRF

SEQ ID NO: 278194 - protein, 179 aa, Zea mays
  Clone ID: MRT4577_185287C.1.pep
MSLAPSIPSIKVKVGAVSVAPPHRACRSFAVIRSSKAEGPIRRPAAPPLSPPPPMPPKTPALSTPPTLSQPPTPVKPAAPPTSSQPMPPSPEPKPVDATAQMRKPVAGAMTLEYQRKVAKDLQEYFKKKKLEEADQGPFFGFLPKNEISNGRYVCPPSHEPNTSKFQASANRDTSMSRL

SEQ ID NO: 278195 - protein, 61 aa, Zea mays
  unsure (1)..(61): unsure at all Xaa locations
  Clone ID: MRT4577_185288C.1.pep
MDLXXPPDRXFPSXDWAISDQPVTADDLRXAVAKVGDFSEDNRSGINHSLHRISAIRNRKL

SEQ ID NO: 278196 - protein, 243 aa, Zea mays
  unsure (1)..(243): unsure at all Xaa locations
  Clone ID: MRT4577_185289C.1.pep
MDANWTYMDSFLTTWNEWEIRMLVLTSLALQVFLLFSAGIRKRNVSAVLSLLLWLAYLLADSIAIYALGYLSQTRVPKGVDPQSFERTHRVQAFWAPFLLLHXGGQDTITAFSTEDNELWKRHLLSLLTQVALAVYVFAKSHPGNNVLAPALFMFLSGIVKYAERTWALKCASMDNLRSSMVTTPDPGPNYAKFMEEYRFTRXREAGLEAEIVIEQERRAKTAAGVTVAXREAVPYXTVITEA

SEQ ID NO: 278197 - protein, 135 aa, Zea mays
  unsure (1)..(135): unsure at all Xaa locations
  Clone ID: MRT4577_18528C.1.pep
KHTSATEGEAGGGRGAKEKGRAEEPSMASATPMLGRSTARLFFPSLSFSLALLLLCCSAVCNAAGNDDESTXVACHQGVVGRPLGQARGLEPGVGVVALYLGWRALQRAGQRFAGLNLAGMNLSGTIPHAILGLT

SEQ ID NO: 278198 - protein, 185 aa, Zea mays
  Clone ID: MRT4577_185290C.1.pep
MSLAPSIPSIKVKVGPVSVAPPHRACRSFAVVRSSKAEGPIRRPAAPPLSPPPKTPALSTPPTLSQPPKPAAPPTSSESTPPSPQPKAAVATAPAAALQRPLAGAVTLEYQRKVAKDLQDYFKKKKLDEADQGPFFGFVPKNEISNGRWAMFGFAVGMLTEYATGSDFVQQLKILLSNFGIVDLD

SEQ ID NO: 278199 - protein, 109 aa, Zea mays
  Clone ID: MRT4577_185291C.1.pep
QRGSLKVQEQAGVQPGVYFHLCFRVAQRGGQHRHPWLSWRWSPPVSAPLVDVGGSSCVVGVYHEFLSSSAGFFFLFRPFFFLFFFIIWFFFFFFFFFFFFFFFFLFFME

SEQ ID NO: 278200 - protein, 81 aa, Zea mays
  Clone ID: MRT4577_185292C.1.pep
RIDPSTSIVSEKVLGELLVLGSSCNPSFQVNRRCTHSPSPCCRESLAHGPHNYTSTRSSMYDFALAATLCSSSLTHATLMT

SEQ ID NO: 278201 - protein, 618 aa, Zea mays
  Clone ID: MRT4577_185293C.1.pep
MGGSHSREDVDLTSSDEEEEFEDDYDARSPIAEAAASAGQRDDDLLRTATPSSLEAIDAKLRSLDLKYQRPTAAKLYLHVGGASPSARWVPAERRATYAFVDQSSDDASSPRWFLEVGPGPRVSAPVDSALQLKTIPAQRRADFAASGSVWALRLPTDAELRRFRVEYERCLFENTYGVEATDEGRKEVFGADFAAWARPAEADDTVWADAEESLTPPAAAPGKDLLKEFEEEAGDGDSIQSLALGALDNSFLVGGAGIQVVKNFRHGLHGKGASVKISGGRGGSGSAYSTPKKALLMRGETNMLLMSPGEALHSNGVHHVDVETGKVVAEWRFEKDGADITMRDIANDSKGAQLEPSGSTFLGLDDNRLCRWDMRDARGRVQTIGSSSDSPVLNWSQGHQFSRGTNFQCFASTGDGSIVVGSVDGKIRLYSKSSMRMAKTAFPGLGSPITHVDVTYDGKWILGTTDTYLILICTIFKDKDGKEKTGFSGRMGNRIAAPRLLKLTPLDSVLAGTDNKFHGGQFSWVTENGKQEKHLVATVGKFSVIWNFQQVKDSNHECYRDQQGLKSCYCYKVVLKDESIVDSRFMHEKFATSDSPEAPLVVATPMKVSSFSIANRR

SEQ ID NO: 278202 - protein, 83 aa, Zea mays
  unsure (1)..(83): unsure at all Xaa locations
  Clone ID: MRT4577_185294C.1.pep
SWRGRKRGRARGRTRXEKKKKKKKKKKKKKKKKKKKKKKKKKKKKKKKKKKKKKKKGGLFKGSRFTSPFLQINIFFLGPLKLN

SEQ ID NO: 278203 - protein, 81 aa, Zea mays
  Clone ID: MRT4577_185295C.1.pep
MSSSSSTAANISERPISPDTTRVAWVGTGVMGQSMAGHLLAAGYALTVFNRTASKTQGLVSRGASLADSPRRPHPRRRNSR

SEQ ID NO: 278204 - protein, 65 aa, Zea mays
  Clone ID: MRT4577_185296C.1.pep
YLRPKYVAFELMASVVHYEIKVTTHFLRTISNPFLQKEKPPNIINSPSELSFSSILHHIAVEKWV

SEQ ID NO: 278205 - protein, 198 aa, Zea mays
  Clone ID: MRT4577_185298C.1.pep
AIDLPTRCPPPQCAHGARPHSLAFSATSAAGSAFSGSSAAGSAAAGSSSAAAASGSAAAGSASVSAAGAAASSFTSPAAAGSGSASFGVSSSASTGAASGSAAAAGSVSAGAAGSSTLASAAGAASSGTTAGGAGVSTAGASSVATTVGVWTCAHVHARREYKLILASSVVINAGGSAVAMGDDQKADDYTTEWLATS

SEQ ID NO: 278206 - protein, 95 aa, Zea mays
  Clone ID: MRT4577_185299C.1.pep
LASPVHVLPRDILQGGLTTRIPHLEHLKRTRHHSMLNGPGSAASTPWTTMTWMGKYYLQSNGNTYIVTRKVENMISQHHALTLRQGTAAIDQNTT

SEQ ID NO: 278207 - protein, 149 aa, Zea mays
  Clone ID: MRT4577_18529C.1.pep
MASFAGFSALSFAGAVRAIPPNFLAFSPLGRGNPFFRRQPMLLGPVSCAAKRGSPPQVCGFVKKPLVFSGQIEVFGESKFFGLGADSLAPVEIFLGFGGPFFFRVGGSGAPTIAPVEDPPGLFAKLVVGKGGFWPPSFGVLPPWVFPLV

SEQ ID NO: 278208 - protein, 107 aa, Zea mays
  unsure (1)..(107): unsure at all Xaa locations
  Clone ID: MRT4577_1852C.1.pep
FLGRQMSSSKGSSXATLYVVDSEVRGLVEKASSTARQILSPRIDILHRLAPFLIENEPVDGEDFMSLFLDGQVNLFVASHVASLTLRALFGVLCHPDQSRVDQQPSS

SEQ ID NO: 278209 - protein, 79 aa, Zea mays
  Clone ID: MRT4577_185300C.1.pep
KFLLFLGIKYGGFLWVLTPGGGRSFPFFRGVFQGFFPLFISPSGEGLLFFFGGKGPPFFFGGFCVLDLLPPPFFVFGYF

SEQ ID NO: 278210 - protein, 147 aa, Zea mays
  Clone ID: MRT4577_185301C.1.pep
FAAVLICSIVAAVIAAPPVAAALAAAAAVPLGSMGKWFDSLLKGCQDAVNRQEGVVSEMQFGTLIAIKDLENIKVLIKRVEEEISSMIDCVEFAERDEEAVKFGVEEIKKKLESFMKSVEDLGEQADRCTRHIHRARTLVLGRIIRH

SEQ ID NO: 278211 - protein, 77 aa, Zea mays
  Clone ID: MRT4577_185302C.1.pep
PLVLSCAAQHLHAKAGRLHPGTGPVTTTYHLHCMSTTIASSLDFQSYYHQSKGLPAGVFALTLVLHAIRYLALGHSS

SEQ ID NO: 278212 - protein, 68 aa, Zea mays
  Clone ID: MRT4577_185303C.1.pep
LCLRIQLATPRAYFNKLRWGLLTFYRYSHHVYCSISAETGPYRRQTHRLVALRRPPRSSRSQRVEPSP

SEQ ID NO: 278213 - protein, 208 aa, Zea mays
  Clone ID: MRT4577_185304C.1.pep
ENFDPVQIAQAYEKNGAACLSVLTDEKYFQGSFYNLEAIRNAGVQCPLLCKEFIIDAWQLYYARSKGADAVLLIAAVLPDRDIKYMLKICKILGMAALVEVHDEREMDRVLGIDGVQLIGINNRNLETFEVDITNTKKLLEGERGQVIAQKDVIVVGESALFTPDDISFVQNAGVKAVLVGESLIKQEDPGKAIAGLFGKDISHAGAT

SEQ ID NO: 278214 - protein, 89 aa, Zea mays
  unsure (1)..(89): unsure at all Xaa locations
  Clone ID: MRT4577_185305C.1.pep
VCGFPPLFGSPSCLAASCCVCWLCRCFCLGVCSPLLVVSFLLLCFLWPVPFXLLCSVPLSSFKSPXXVXFRAAAVKKLVDPEINSGRSS

SEQ ID NO: 278215 - protein, 272 aa, Zea mays
  Clone ID: MRT4577_185306C.1.pep
FKWRMVHCRAFRSGFAAYLYVANSLMDMYAKCGDVEGGTNVFGAIVNKDLVSWNTMLFGFAINGWANEALVVYDSMKSHEVCPDEVTFAGLLTACNHSGLLEHGESFFESMVSVHGIQPKPEHLSCILDMYARSGNITKAMEMLDLYSETIRAHNSDIREALLSACSLEHLNFRVARKAMEDMVATKSAGDVGYVMLSNLFCAAGQWNQAEQVRIAMAEHGIKKTPGCSWIEVQGAVKVFASGAQDLDHSGSVLDVISLLDEEMTNSMYFDL

SEQ ID NO: 278216 - protein, 52 aa, Zea mays
  Clone ID: MRT4577_185307C.1.pep
GIEQKGTQEDCSLLRRWCVCSVSRCIAKSSRPQGWLWLSKVTRDFTIVVVCD

SEQ ID NO: 278217 - protein, 56 aa, Zea mays
  Clone ID: MRT4577_185308C.1.pep
GYLEAGRDHVQSEGRQEGSLRTSEQGSNLNPCKIPCARTSQWHHEEPRHSETNGTL

SEQ ID NO: 278218 - protein, 57 aa, Zea mays
  unsure (1)..(57): unsure at all Xaa locations
  Clone ID: MRT4577_185309C.1.pep
XWNXIPSCSLIRNNLTNFSPFTHQTQQPRXRQAKPISLXELGHSSVPAPLRERRGGG

SEQ ID NO: 278219 - protein, 212 aa, Zea mays
  Clone ID: MRT4577_18530C.1.pep
SRPAGFPSSSLSLSLSLSLSLSLSLSLSLSLSLLPNLTARIRYSDQISEVEGKIIKAQIWDTAGQERYRAITSAYYRGALGAVLVYDVSKPTTFENISRWLKELRDHADSNTRIMLVGNKTDLRHLRAVATDDARSFAEAEGLSYIETSALEATNVEEAFQLILGDIYRAVSKKPVASDEVGAGQGGVKEGKTIDVATGADAAAHKKQCCSA

SEQ ID NO: 278220 - protein, 54 aa, Zea mays
  Clone ID: MRT4577_185310C.1.pep
KFLMVRFFLETPNFDISRTRGGRAGNEKVLLEPANYAIFGLMNLNRAKKWVLGC

SEQ ID NO: 278221 - protein, 100 aa, Zea mays
  unsure (1)..(100): unsure at all Xaa locations
  Clone ID: MRT4577_185311C.1.pep
TLPDTRSAXXPSSXQXXSEERRGGETETSRAERRERGXGXHIPREPGEQGSRVPERNIDDLPWNDANYTALTPIWLLEGAVLAHTGRALRGARTRALHVG

SEQ ID NO: 278222 - protein, 64 aa, Zea mays
  unsure (1)..(64): unsure at all Xaa locations
  Clone ID: MRT4577_185312C.1.pep
NACMVLDLLYFPALQESEGPPGSVEGPLSSLRFFMDADALPLVHMVSFXCPKNRKETDQGRRRC

SEQ ID NO: 278223 - protein, 99 aa, Zea mays
  Clone ID: MRT4577_185313C.1.pep
FLTQNRCVRASLVDSVIVHGYRLLGWRRRLLTAGMHKLHIIKRTSKRPYRAPQLPKNRRQEIWHRLPAMLRRLPPSPSVGGRRRRRRRRCRTGRCRAQA

SEQ ID NO: 278224 - protein, 70 aa, Zea mays
  Clone ID: MRT4577_185314C.1.pep
PPRQGPGDGPSTPQLEVRAEASSRPSRGFRLGHRPAGCGHKCLPSWGLGPEGAPAGGRIWEKGERFEPRR

SEQ ID NO: 278225 - protein, 83 aa, Zea mays
  Clone ID: MRT4577_185315C.1.pep
FGSRNLGEMMTLGRNDAAVTASFIEGLTLEGPLGHAARKLVYCLRMPTDEHRVKVGISWFTKAAIDSLASVQNAVSNTLTGSS

SEQ ID NO: 278226 - protein, 48 aa, Zea mays
  Clone ID: MRT4577_185316C.1.pep
PQRYMPTTSISVIRVLPTRMIMSALVVPGVVMLCQVISYGLSLSALMV

SEQ ID NO: 278227 - protein, 136 aa, Zea mays
  unsure (1)..(136): unsure at all Xaa locations
  Clone ID: MRT4577_185317C.1.pep
ALLCGLSGILVVAVVVSVVGNVTRSGRNAGDNFTVPMEASLXHVRQVSQVPVRAQPILGVVRXETVPGHQSDRQPQXGVPDPGQGGTALSPDGGRAVDVYQLGQGXDSMTDSAREDCNKLLXDAADDLMGMLEMAG

SEQ ID NO: 278228 - protein, 78 aa, Zea mays
  Clone ID: MRT4577_185318C.1.pep
LTRSPTHPYPGRLGEARTGCPPASGIGALQIPLSPNHGARYPNSQLLAPQDLPTEETTHQQRPSQEQVRMLSEATIGG

SEQ ID NO: 278229 - protein, 98 aa, Zea mays
  Clone ID: MRT4577_185319C.1.pep
FPKTHHTQGRQDLAADPTYGQQGRHAGAMSTLEWGEREGARRTSWAEAGALIWRGGTNSSVENRHGRRTSSHRLQCESAYMPRDNRASDGRNQCDTCI

SEQ ID NO: 278230 - protein, 112 aa, Zea mays
  Clone ID: MRT4577_18531C.1.pep
LRGPRGPLGSFKGAPLPPRRDRGAPGQTKTQGHRKKGNGLVGKRARQKPILRVTYRNPGTKETIPKNKKGKGLLGTRGGEKPIPQKKTQKSGKDPRKKKRPKDTRQPKKAVK

SEQ ID NO: 278231 - protein, 308 aa, Zea mays
  Clone ID: MRT4577_185320C.1.pep
MRWKLNSSVYKRVPSRETAMEPDVETPMRMTDGGGSGAGPSWRMSLPHVCVATLTSFLFGYHSGVVNEPLEVISADLGFAGNTLAEGLVVSICLGGAFVGCLFSGSIADGIGRRRAFQLSALPMIIGAAISALTNSLEGMLLGRFLVGTGMGLGPPVASLYITEVSPSTVRGTYGSFVQIATCLGIIVSLLIGTPVKDIDRWWRVCFWVAVIPATLQALGMEFCAESPQWLYKCGKISEAEMQFEKLLGPLHVKSAMAELSRYERVDDGESVKYSELFYGRHFNVVFIGTTLFALQQLSGINSVFYFS

SEQ ID NO: 278232 - protein, 103 aa, Zea mays
  Clone ID: MRT4577_185321C.1.pep
AAGSKLLANMVYQYKGMGLSMGTMICGWDKRGPGLYYVDSEGNRISGATFSVGSGSVYAYGVMDRGYSYDLEVEQAYDLARRAIYQATYRDAYSGGAVNLYHV

SEQ ID NO: 278233 - protein, 136 aa, Zea mays
  unsure (1)..(136): unsure at all Xaa locations
  Clone ID: MRT4577_185322C.1.pep
IVPVEHLTHILKFISPRENVPKLSIQGAPGFSAVEHALRRKPPQVLEIREEMRCRIALLYPCTPSQVAKTVTHCVPLLPLLSCASPRSDSTGRHSAAQADEWMEVSCGVSWTLSFSLCRSRRRGPAKETREAXXLG

SEQ ID NO: 278234 - protein, 361 aa, Zea mays
  unsure (1)..(361): unsure at all Xaa locations
  Clone ID: MRT4577_185323C.1.pep
LKQYHTIAVLSNSLEVALGNFXVGTGMGLGPPVASLYITEVSPSTVRGTYGSFVQIATCLGIIVSLLIGTPVKDIDRWWRVCFWVAVIPATLQALGMEFCAESPQWLYKCGKISEAEMQFEKLLGPLHVKSAMAELSRYERVDDGESVKYSELFYGRHFNVVFIGTTLFALQQLSGINSVFYFSSTVFRSVGVPSNLANICMGISNLSGSIVAMLLMDKLGRKVLLSGSFLGMAFAMGLQAVGANRQYLGSACVYLSVGGILLFVLSFSLGAGPVPGLLLPEIFPNKIRAKAMALCMSVHWIVNFFVSLMFLRLLEQLGPQLLYTIFSSVCVVASIFVRRHVLETKGKTLQEIEVSLLQPQ

SEQ ID NO: 278235 - protein, 165 aa, Zea mays
  Clone ID: MRT4577_185324C.1.pep
MSAAAGPVYEADAEAVVRRITPPLDRARHKGQAGKIAIIGGCREYTGAPYFAAISALKVGADLSHVFCTKDAATVIKSYSPELIVHPILEESYSVRDDERESVSSSILTEVIKWVERFDCIVVGPGLGRDSFLMDCVSNIMRHARQANIPIVVDGDGLFLITNNI

SEQ ID NO: 278236 - protein, 126 aa, Zea mays
  Clone ID: MRT4577_185325C.1.pep
ASRCSSPPTRSTPSTSSSSRAASSPWRPSSVRSSSPRRSSSLCSSPSGRTSAAPTGPGSSPSVGPAALPSQHSAPSSGPTVLQRGLSRSCAPSSLVPPTLPPFSASRRSWVLQLLALCLRRSRACC

SEQ ID NO: 278237 - protein, 300 aa, Zea mays
  Clone ID: MRT4577_185326C.1.pep
MKATVCWVLTVTTFIARYHTSAASNQGGTGLVGSCSPHDNSSEAVKTDSTYNMKSNSDAAAIKQGSNGSSNNNDMGSTTKDVVTKPSTNNERVMLPSAIKANGYTSTFHPVQQWMVPDNATAGKAKADEVANNAGRNSHPGDVQSNLTQQHRPTLHYVHFENSGSGALQCGSSNVFDPPLEGQATNNYGVKAGSNSGSNKGQNNGSTAGASTAAANAGRTDTEIRAIDKSGPGGGSGSGNDTYVRRLAASMTPRQEQLKKYREKKKDRNFGKKVACFQLHINIYSLFVFNCICLRRESIG

SEQ ID NO: 278238 - protein, 160 aa, Zea mays
  Clone ID: MRT4577_185327C.1.pep
MPANDHHPNGLLQESAPGLQHDDMENQQQQVCWERFLLKDTLNVLLVESDDSTRQVVSALLRCCMYQVISAENGQQAWAYLEDKRNNIDLVLTEVFMPGVSGISLLSRIMSHNICKNIPVIMMSSSDAMSTVFKCLSKGAVDFLVKPIRKNELKNQWQHN

SEQ ID NO: 278239 - protein, 687 aa, Zea mays
  unsure (1)..(687): unsure at all Xaa locations
  Clone ID: MRT4577_185328C.1.pep
MPANDHHPNGLLQESAPGLQHDDMENQQQQVCWERFLLKDTLNVLLVESDASTRQVVSALLRCCMYQVISAKNGQQAWSYLEDKGNNIDLVLTEVFMPGVSGISLLNRIMRHSVFKNIPVIMMSSSDDMSTVFKCLSKGAVDFLVKPIRKNELKNLWQHVWRQRCHSSSGSGSESGIQTQKCAKSKGVNESGNNSGSNDDEAGMGLNARDDSDNGSGTQAQNLWTKLAVEIDSPQATSLDQLADPPNSTCAQVIHSKSEICSNRWLPDKSNRNCKKPKNTNDDFKGKDLEIGGPENLYMGHQSSPNGRSIKAADHENNSKESMMENLEEPTVRAADLIGSMAKNMDTQQAARAAEDTPNFSSKVPEGKGKNNQNDKYVLPSLELSLKRSRSCGDGANNKNTVKDDEQRNCVLRRSNLSAFTRYHTSAASNQGGTGLVGSCSPHDNSSEAVKTDSTYNMKSNSDAAPIKQGSNGSSNDNDMGSTTKDVVTKPMLPSAIKANGYTSAFHPVQQWMVPANATAGKTKADENTARNHYVHFENGGSGALQCGSSNVFDPPLEGQATNNYGGVKAGSNSGSNKGQNNGSTAAANAGXGRNGDTGHGXKSGVGGGNGNGSGSGSGNDTYVRRLAANMTPRQAQLKKYREKKKDRNFGKKVRYQSRKRLADQRPRVRGQFVKQAVQNQDGARER

SEQ ID NO: 278240 - protein, 134 aa, Zea mays
  unsure (1)..(134): unsure at all Xaa locations
  Clone ID: MRT4577_185329C.1.pep
TRRDTRRRRLLLRFWRFSHAAGAARSRATQKEKAPPTSYKPGKHGGRKQNRKNRSTGKHKEKAHNAGLRDQPTYDKLLSEVPKDKQITPSILSERARDNGSXPRKAIKELKAKGLQRKASVQGSQQTYTTATNT

SEQ ID NO: 278241 - protein, 97 aa, Zea mays
  Clone ID: MRT4577_18532C.1.pep
AGRAGDLGLLLTDVLINQRDWQRAKEVCQQITGRYQRDSRPYLHLAVINMMIAVEAMLSPDTATTDDIEKMTKTAVDAWKEFKNKSELAKGSADSTA

SEQ ID NO: 278242 - protein, 104 aa, Zea mays
  Clone ID: MRT4577_185330C.1.pep
NSGCRGVSQDKQGTGCAAEDARELSKCSRSLKLHSGHAYSSFVRVEEGAEKYFLFCYCGILKECGVMTGCPELCLHTVPWCCFLEQWVACRTFIITVIILESWR

SEQ ID NO: 278243 - protein, 156 aa, Zea mays
  Clone ID: MRT4577_185331C.1.pep
MAADPSRRRPEYHPAVNDVLLTLTNARGTLADVQRRLDLEFRAAYPDHANPAKLVARVKRLEEEAAALKEMCRDLLTQKQELIDQIRVSLMAQRGMTQRLLSASGLPPLSDADETVHNSLNEVIQDWTAQVSPITREIEDLDKKKNANQMLFSAII

SEQ ID NO: 278244 - protein, 185 aa, Zea mays
  unsure (1)..(185): unsure at all Xaa locations
  Clone ID: MRT4577_185332C.1.pep
YVHCTAGXGRAPAVALTYMFWVQGYKLMEAHKLLMSKRSCFPKLDAIRNATIDILTGLKRKTVTLTLKDKGFSRVEISGLDIGWGQRIPLTLDKGTGFWILKRELPEGQFEYKYIIDGEWTHNEAEPFIGPNKDGHTNNYAKVVDDPTSVDGTTRERLSSEDPELLEEERSKLIQFLETCSEAEV

SEQ ID NO: 278245 - protein, 62 aa, Zea mays
  Clone ID: MRT4577_185333C.1.pep
LVVQSFMRWVWGWSSVGVGRRACRQLVVMGACGRPFRRARVGGGAAQVSLSRAGEMAAVFRP

SEQ ID NO: 278246 - protein, 53 aa, Zea mays
  Clone ID: MRT4577_185334C.1.pep
IFQALKLCISITGRAALLTPSPRYWSYRPGDSASAGRLGRYIDSRERQKAEHT

SEQ ID NO: 278247 - protein, 463 aa, Zea mays
  unsure (1)..(463): unsure at all Xaa locations
  Clone ID: MRT4577_185335C.1.pep
FHPSVSKLSTIFPFIEASRPRSKPGIQALCSLHVALDKAKGLLQHCADCSRLYLAITSETVLLKFEKSRSQLQESLRRTESIVTEDIGCKIVEIVGELEEIVFTLDRSEKEAGDELIKLLQRNNKTNGSSDSGELEVFHMSALKLGITSSRAALTERRALKKLIEKARSDEDKRKELVVSYLYNLMRKYSKFFRSETGDDTDSQGSSPCSPTVLGMDDMYGPYNNGRAFSRQLSSIQSFNSRFGSFNSRLGSFNCRRAAAGGPRSENISVPPEELRCPISLQLMYDPVIISSGQTYERICIEKWFNDGHSTCPKTQQQLAHLSLTPNYCVKALIASWCEQNDFPLPDGPPGTFDVNWRLASSDTEATGCVSVESFDCTSAKSVKIVPMEDARKEESANSVSGTLDDGSCNDFDLNEGYGSLLLLLHERSNMDKQCRLVEQIRYLLKDDEEARIQLGXNGFAEA

SEQ ID NO: 278248 - protein, 36 aa, Zea mays
  Clone ID: MRT4577_185336C.1.pep
EHQVRIEHQRLPNVTHNDSPQLGLKRCMIAQKGFCL

SEQ ID NO: 278249 - protein, 90 aa, Zea mays
  unsure (1)..(90): unsure at all Xaa locations
  Clone ID: MRT4577_185337C.1.pep
MQEASSTTAAGAEPGRRAAHHQFASVDLRRPKGYPAPAPAPTTGEGDPCPQSASRDTKFCYYNNYNTSQPRHFCKGXRRYWTKGGTLSNV

SEQ ID NO: 278250 - protein, 70 aa, Zea mays
  Clone ID: MRT4577_185338C.1.pep
EVDDLLDHRLPEAATAASGSQVRRPPARPTAHPTAHRTLADQPTVLPGILPSAHLNSPNQLSPTPAARYQ

SEQ ID NO: 278251 - protein, 52 aa, Zea mays
  Clone ID: MRT4577_185339C.1.pep
TRTVCCAFLVRRCPLRIIWLALWPACTADASRCASARKTPAPTRTKPAPCSW

SEQ ID NO: 278252 - protein, 86 aa, Zea mays
  Clone ID: MRT4577_18533C.1.pep
YRQISQVDQVRVSQGAHGVVLQSMIQHQPQVELPPLMLAKVGKDGPRMRGLNHQKPGRRLFNEGVAGVYNFRCSMSCSNKAMEMRW

SEQ ID NO: 278253 - protein, 120 aa, Zea mays
  Clone ID: MRT4577_185340C.1.pep
TLVFGYPVPSGFSPPRRANIRRPKNWSFLHPFPFSGHLPFLSSFFAFNRGGVGREGIGGGLEPEGNVPGGIKFPEGLGFPRIFFFFFFFFFFFFFFFFFFFFFFFFFCIETCVFFISAKH

SEQ ID NO: 278254 - protein, 106 aa, Zea mays
  Clone ID: MRT4577_185341C.1.pep
MVAPVVIASAGLGMLAGVAMANRSLGNGLPAASRWDARPRCATCGGSGRVECICNRWSDGDSGCRTCAGSGRMPCRSCGGSGTGRPLPARLTVQHQKPPPPPPGYN

SEQ ID NO: 278255 - protein, 198 aa, Zea mays
  Clone ID: MRT4577_185342C.1.pep
MTSKNKYTYVGLSDSKSVQDVNALLTAYVPNSDPGIRVAHTPLGDKAPDELVRTNYHWSNKVGSSGAVELSYHFLESAPSVMPRFGIAGFSSFNDEQKEAARLSLQSWSDVANVKFNEVSSLSKANITFGFFDYSITDDYAFATLPKGQNTTYSWYSAESHTFIDNDIGVNGYGRQTFTHEIGHTLGLDHPAEYDASD

SEQ ID NO: 278256 - protein, 108 aa, Zea mays
  Clone ID: MRT4577_185343C.1.pep
MVAPVVIASAGLGMLAGVAMANRSLGGDGLPAASKWDARPRCATCGGSGRVECMCNRWSDGDSGCRTCAGSGRMPCRSCGGSGTGRPLPARLIVQHQKPPPPPPAGHN

SEQ ID NO: 278257 - protein, 103 aa, Zea mays
  Clone ID: MRT4577_185344C.1.pep
PHKTPKAPERFMFFPPGISLLSTICLSFSSSSLSMHQKEHIPQAPHLIVQHYRSRQPLNGHNLPTQHILHTTAFLFRDITASIDQTQPIVIASKRINTYKALP

SEQ ID NO: 278258 - protein, 106 aa, Zea mays; identical to SEQ ID NO: 278254
  Clone ID: MRT4577_185345C.1.pep

SEQ ID NO: 278259 - protein, 251 aa, Zea mays
  unsure (1)..(251): unsure at all Xaa locations
  Clone ID: MRT4577_185346C.1.pep
MARAPVLPALLCLAVLALAGGADARRKMVGVYELKRGDFSVKMTNWGATIMSVLVPDSKGNLADVVLGMDTLAEYVNDTSYFGPLNGRVAQRMARGRFVLDGKVYHTYINDGKNAIHGGKRGFSKVIWTXKEYVAGGDSPYITMYYRSFDGEQGFPGDLDVYATYQLTGPYELSIRTNATALNKATPVNFLQHVYLNLXXXEGSGDILGHTLQLSASRYTPLGREMLPSSGRVDPVAGTSYDFARRCHRRA

SEQ ID NO: 278260 - protein, 85 aa, Zea mays
  Clone ID: MRT4577_185347C.1.pep
ESTRHSKVSHHRRRYHGDKPDGERGERARGKEAPPPPSLPPGGPPPASSDGGEGREMRSERVGGGVAGTARAVPHDDAGGCRMNY

SEQ ID NO: 278261 - protein, 78 aa, Zea mays
  unsure (1)..(78): unsure at all Xaa locations
  Clone ID: MRT4577_185348C.1.pep
QSQETLAVKPMIAQAVRAFIAHGRILCTVHQNESQSEGVKSTLXKLGINWQEVLXQLKLEGLVSLNDTFYSLVLCQQW

SEQ ID NO: 278262 - protein, 47 aa, Zea mays
  Clone ID: MRT4577_18534C.1.pep
LLNCDQKLQRDRGLGLLHDLGKEPPKLSESLSILIFVLHIPQAEFRA

SEQ ID NO: 278263 - protein, 111 aa, Zea mays
  Clone ID: MRT4577_185350C.1.pep
GGGVFPRNQFVLAFICTTNTANSNQAKFESSHPKFLFQMEKKTKDCITLYSDLLTFAQLYQEYYGCYHEPKPTWERRFWVSGNLPQDHGFKGRILVRLILGRMAFFLSVAF

SEQ ID NO: 278264 - protein, 76 aa, Zea mays
  Clone ID: MRT4577_185351C.1.pep
STHKKFIRILVTSKGSINSGPRITIPHANTSRAPSWYHDQNPPRGYKNEQNIRCYMCSPSHIFILMVFFLLRFGLV

SEQ ID NO: 278265 - protein, 139 aa, Zea mays
  Clone ID: MRT4577_185352C.1.pep
MGNYLSCTLAKAPGPRPGGKRARVILPDGGVRQVALPATAAELMMDAPGHFLVHVHARGAGLGLGARLAALPADEELQLGAVYATFPMKRLGTPLAAPDLARLAAAAAREAHRSAKVAVVAAPPPEDAPRLRLEEMVDD

SEQ ID NO: 278266 - protein, 40 aa, Zea mays
  Clone ID: MRT4577_185353C.1.pep
MKILYFIYCKIYHLSFISDTLFVTKNFNGSNIPNVLKLPF

SEQ ID NO: 278267 - protein, 79 aa, Zea mays
  Clone ID: MRT4577_185354C.1.pep
KKGMPVTLFLGSQYPWGKMDKRPPLFVLLNRDLMIKKNPKRTFQGRKTHFFAPTQNTFFCPTGGTVFKELILLGVSTSH

SEQ ID NO: 278268 - protein, 466 aa, Zea mays
  unsure (1)..(466): unsure at all Xaa locations
  Clone ID: MRT4577_185355C.1.pep
MVIYLSTPKTDKVSEDGENDKLKFGLSSMQGWRATMEDAHSALLDLDNDTASFGVFDGHGGKVVAKFCAKYLHIEVLHTEAYAAGDLGAAVHRAYLRMDEMMRGQRGWQELQALGDKINQFTGITEGLIWSPKASDSNDRHDDWAFEEVLVELAILRPHSDFTGPNCGSTACVALVRNXQLVVXNAGDSRCVISRXPGQLLLLKENRRDYPLVAYKXWDCLILYFFHIKQAYNLSRDHKPELEAERERIQSAGGYIKMGHVNGSLNLSRAIXHFFTCFFLFIPLTLTDVLHMQNTFLGDMELKQNKFLSPDKQILTANPDINIVRKFCSCLSLLLCRLLSXTSFLLIVIVTXSFVQVELCDDDEFIVLACDGIWDCMSSQQLVDFIREHINTXEESLSAVCEGVLDRCLAPSTMGGEGCDNMTMILVQFKKPFAQVKDASDAEQLTGDAGCSETHGAEENDSDKQI

SEQ ID NO: 278269 - protein, 120 aa, Zea mays
  Clone ID: MRT4577_185356C.1.pep
STPPRSSSSILRLPVAEARVALSLTGFVSSPARSRLDLVVVPYVVKKSQASGEDEASSMIFTKCSTKKLEQVVDRHPHLRQDPRRLDAEENKSVRGRRILDADKDEARFDVALTLFPVKC

SEQ ID NO: 278270 - protein, 86 aa, Zea mays
  unsure (1)..(86): unsure at all Xaa locations
  Clone ID: MRT4577_185357C.1.pep
MRECIXIHIGQAGIQAGNACWELYCLEHGIQPDGQTNGDKTIGGGDDAFNHFFSETGAGKYPHRAVFIKLTXTVTDEVRTSAYSQL

SEQ ID NO: 278271 - protein, 308 aa, Zea mays
  unsure (1)..(308): unsure at all Xaa locations
  Clone ID: MRT4577_185358C.1.pep
MHIYLSTPKTDKVSEDGENDKLKFGLSSMQGWRATMEDAHSALLDLDNDTASFGVFDGHGGKVVAKFCAKYLHIEVLHTEAYAAGDLGAAVHRAYLRMDEMMRGQRGLRELQALGDKITMILVXSPSEAICSGKGCQWCGTTXELEAERERIQSAGGYIKXGRVNGSLNLSRAIGDMELKQNKFLSPDKQILTANPDINIVELCDDDEFIVLACDGIWDCMSSQQLVDFIREHIDTEESLSAVCERVLDRCLAPSTMGGEGCDNMTMILVQFKKPIAQVEDASGAEPAEDAGCXETHGAHENGSGKQV

SEQ ID NO: 278272 - protein, 111 aa, Zea mays
  unsure (1)..(111): unsure at all Xaa locations
  Clone ID: MRT4577_185359C.1.pep
MQNTFLGDMELKQNKFLSPDKQILTANPDINIVELCDDDEFIVLACDGIWDCMSSQQLVDFIREHINTERLSAVCERVLDRCLAPSXAGEGCDNMTMILVQFKKPFAQVKD

SEQ ID NO: 278273 - protein, 59 aa, Zea mays
  Clone ID: MRT4577_18535C.1.pep
FLQWDTPPTKPEAQGVQTSRPHIAVSCYAICATNQPLDLATLQILCKNDWRTKPTIPKF

SEQ ID NO: 278274 - protein, 365 aa, Zea mays
  unsure (1)..(365): unsure at all Xaa locations
  Clone ID: MRT4577_185360C.1.pep
MGVYLSTPKTEKVSEDGENDKLKFGVSSMQGWRTTMEDAHSALLDLDNDTAFFGVFDGHGGKVVAKFCAKYLHREVLHTEAYAAGDLGAAVHRAYLRMDEMMRGQRGWRELQALGDKINQFTGIIEGLIWSPKASDSNDRHDDWAFEEGPHSDFTGPNCGSTACVALVRNKQLVVANAGDSRCVISRNGQAYNLSRDHKPELEAERERIRSAGGYIQMGRVNGSLNLSRAIGDMKFKQNKFLXPDKQILTANPDINIVELCDDDEFIVLACDGIWDCMSSQQLVDFIREHIDTEESLSAVCERVLDRCLAPSTMGGEGCDNMTMILVQFKKPIAQVEDASGAEPAGDAGCCETHGAHENGSGKQV

SEQ ID NO: 278275 - protein, 94 aa, Zea mays
  Clone ID: MRT4577_185361C.1.pep
VLGILAMIDEGETDCKVIAINVDDPDAANYNDINDVKRLKPGYLEATVDWFRRYKVPDGKPENEFAFNAEFKDKDFAIDIIKSTHDHWKALVTK

SEQ ID NO: 278276 - protein, 179 aa, Zea mays
  unsure (1)..(179): unsure at all Xaa locations
  Clone ID: MRT4577_185362C.1.pep
RTRGHGRKMDHSHMDHGGHMGHDMPGMGGDGPKCNMNMLFTWDTTDLCIVFPSWHISGTGSLIFSLLAVVLLTAGYEAIREISRRYEXTQRVSWRDPETTQMNLAHXGPGRNGGVGRSAEQQMKMIKAVLYAVQVFYSFFIMLLFMTYNGWIMLAVAVGAFVGYLMFSQSSSTKSVACH

SEQ ID NO: 278277 - protein, 367 aa, Zea mays
  unsure (1)..(367): unsure at all Xaa locations
  Clone ID: MRT4577_185363C.1.pep
MVIYLSTPKTDKVSEDGENDKLKFGLSSMQGWRATMEDAHSALLDLDNDTASFGVFDGHGGKVVAKFCAKYLHREVLHTEAYAAGDLGAAVHRAYLRMDEMMRGQRGWRELQALGDKINQFTGITEGLIWSPKASDSNDRHDDWAFEEGPHSDFTGPNCGSTACVALVRNRQLVVANAGDSRCVISRNGQAYNLSRDHKPELEAERERIQSAGGXYIKMGHVNGSLNLSRAIGDMELKQNKFLSPDKQILTANPDINIVELCDDDEFIVLACDGIWDCMSSQQLVDFIREHINTEESLSAVCERVLDRCLAPSTMGGEGCDNMTMILVQFKKPFAQVKDASDAEQLTGDAGCSETHGAEENGFDKQI

SEQ ID NO: 278278 - protein, 128 aa, Zea mays
  unsure (1)..(128): unsure at all Xaa locations
  Clone ID: MRT4577_185364C.1.pep
XXXXLFFFXCXFXXXXXXXXVXXXXXXXXXLXXXXXXXGXXXXXLXXXVCXXVSXXXXXXPPPSXXXXXXXXCXLXSXAYXSXXXAXSXXXSLXGXXXXFSMXXLLLLQPXXALGFVXXXXADAGSXR

SEQ ID NO: 278279 - protein, 156 aa, Zea mays
  unsure (1)..(156): unsure at all Xaa locations
  Clone ID: MRT4577_185365C.1.pep
LSSLVSSGSSSVSSVEPISSVFSSSSEAHPSSSSRSSSSLVSSSVGSPCSILAAVPSLSSLRASSSSSPVSLFASSXPAAPDQQPLLSIQQGXSSSVFSSSSETHSSSSSRSSSSLVSSSVSSPCSILAAVPSLFSLRSSSSSLLVSLSASSACST

SEQ ID NO: 278280 - protein, 113 aa, Zea mays
  Clone ID: MRT4577_185366C.1.pep
TILCNSSFARTTILSPAAAKCVTAPRLPSTSSTPTSVGAFPSGVYAKTAPSAAVDSVTNSAGPTRAAPGSVPVEGGEQQEEGPSVYCLRRKFAAGRLLAGGRDHAGADHGPRR

SEQ ID NO: 278281 - protein, 89 aa, Zea mays
  Clone ID: MRT4577_185367C.1.pep
RATKTTVGAAPAVSASHSWCKLPDKHVTGTCLERGPPPPRFSSCQPHHPRATTKTDSMRPTQLITTMVNARQTVTATPATVHDEICAPP

SEQ ID NO: 278282 - protein, 124 aa, Zea mays
  Clone ID: MRT4577_185368C.1.pep
PTRPHSSTMFVFNIEQGLPVLPEWLSFNRLTARLRQGYEIGPARLLLSASGGHMEGNFPPHEAFAIGGTNSVRGYEEGAVGSGRSYAVGSGEVSCRMVNFFLLSTLLAFCCCQMDSTWKYDRHN

SEQ ID NO: 278283 - protein, 230 aa, Zea mays
  unsure (1)..(230): unsure at all Xaa locations
  Clone ID: MRT4577_185369C.1.pep
MASASASSSVVTLNVGGELFQTTAATLSRAGGSSPLASLGPSPPDAPHFLDGDPRLFAASLSFLRSGRLASHPPSPALLAEARHFSLDGLLLASLSPASAFSPLSLRPTALLLLTGRVAPSAVAIPLSPHAASLVAAHGGVVTSFNAALASRTSVLTPLPTIDSLVAVSPALALAGARDFPGVQLCRFPGDAPATASDALYWPDSPSSVLSMAAXNRRHTGLFASFESAR

SEQ ID NO: 278284 - protein, 49 aa, Zea mays
  Clone ID: MRT4577_18536C.1.pep
FRQLRRILYLHEWRRSVHEYGNCELESAVSKIMLLCVDNPWVLTCYWHF

SEQ ID NO: 278285 - protein, 130 aa, Zea mays
  Clone ID: MRT4577_185370C.1.pep
LEGTHYVVHPNGSSMFITRMSEPSTEPFPWQTDGEFDVERSFAGEGIANGYGFRYPSSKPGSLFVLQNGLLAFVWRETGAVLTLQRLDLDELLKKGERVPALQPVPNFAYLTKSYSNVFTSFPVGAASPR

SEQ ID NO: 278286 - protein, 59 aa, Zea mays
  Clone ID: MRT4577_185371C.1.pep
IKAETIINSTLRNISHFCACELYLLHHAGLHIPFPEAGYGRRCGNVYAACSYAITVILE

SEQ ID NO: 278287 - protein, 175 aa, Zea mays
  Clone ID: MRT4577_185372C.1.pep
FKGAPRANFFFWAVGVPTPKMGKGGKPSPPFKGEVFAFGGFFIENLTRGRAGGIILGQFGGGGLTQWGPIFNKERGGPHFFFPKISGLEKFPRVIGKILGGFLWGTPPVKKRPSIKTVFDYLFSQKGGGGFPPPPRAWNRSIFPPLGPIFFFFPGGFQTLLKGVFFFFTFKVKRI

SEQ ID NO: 278288 - protein, 164 aa, Zea mays
  Clone ID: MRT4577_185373C.1.pep
RDLLTNEEIKIQGDEVTILRPKSPVPEPVCMEVDRERNRVRAADAIEAARDAAERGDLSDAVSILEDCRRILSESFSSRSGDRLCNALDAELREMQERMANRQRYEASGRAYLLSGLSSHSWQRATARGDSTDSDTLCYSYQTPSMGHMLQRSQNQGPSQVQQP

SEQ ID NO: 278289 - protein, 97 aa, Zea mays
  Clone ID: MRT4577_185374C.1.pep
FDRFIIIDRLMKPRWHADAAQCQCQWSGSLLHVLLLPVGIGCSGTTARHLWICLRTSVSVSLAPSSASHHQVAAPPLQKQGIERADTDLNSSPPPAG

SEQ ID NO: 278290 - protein, 63 aa, Zea mays
  Clone ID: MRT4577_185375C.1.pep
KNPNLHTPSFKIITIFLFHLNSIYFPPFYNLVACKNLAFSNLIPFHHIPFFPASLITNRPPPF

SEQ ID NO: 278291 - protein, 181 aa, Zea mays
  unsure (1)..(181): unsure at all Xaa locations
  Clone ID: MRT4577_185376C.1.pep
MDQDKEVTAARLTDDLAVGILSRLTDKSFCRCKCAYKAWSAFSADPDYCKKLPKKVTTGLLYQGHNKSAIPLVSLSQDDGEIDGILSDVPQYEHLEFPDCCNGLVLRKYRSSYTSPGICRFVVCNPATREWRILPDTHTGTDSHRDATXLAFDPSXSPHFYVFNFNQHYHNPMSKLEIFSS

SEQ ID NO: 278292 - protein, 94 aa, Zea mays
  Clone ID: MRT4577_185377C.1.pep
MYQTTLWRGDRKVDTHGSTSSWWPSMVDWGPVDISTDLYALVTHHLLVQLTAHSRAAGFGTMHTIGLYILCHPGLYFGLITIFLITIGVHIHAG

SEQ ID NO: 278293 - protein, 51 aa, Zea mays
  Clone ID: MRT4577_185378C.1.pep
HKDMDLHKEVTAARLTDDLVVDILSRLTYKSFCRCKCAYKAWSAFSADPDY

SEQ ID NO: 278294 - protein, 44 aa, Zea mays
  Clone ID: MRT4577_185379C.1.pep
GFDRSLQNTSVTLGPAHVEEKRETLYFRDDLLICPLEGQPNPNL

SEQ ID NO: 278295 - protein, 68 aa, Zea mays
  Clone ID: MRT4577_18537C.1.pep
IITSPDEFGPGHLLVSRDSMFKTMQLAALVYMRGCRRSTDVDANALLHGVVVQLVRATRPCELYKREL

SEQ ID NO: 278296 - protein, 82 aa, Zea mays
  Clone ID: MRT4577_185380C.1.pep
LRALVGGQLVFFFPKCRWRLLSVGPPWAWLSIQFLNPGGGISIYWPPFRFLGYPLLPRLSPPGFLCTRFLFFSPDRHMIDPS

SEQ ID NO: 278297 - protein, 68 aa, Zea mays
  unsure (1)..(68): unsure at all Xaa locations
  Clone ID: MRT4577_185381C.1.pep
XPLXLXKCXXRXLNSKLRXXIXXESSQNTLGXCLAXAFWSKXLXAMSXXNXHWNSXYXKGPPQWXPAK

SEQ ID NO: 278298 - protein, 85 aa, Zea mays
  Clone ID: MRT4577_185382C.1.pep
DILKDNIGVLADAVTKGYEKVKNGITLDGCDQLLLLTNTMVGRLVTHSRCNSMLYRLAAIVPHGVHAQYVVPSRQHSTCHAPVTR

SEQ ID NO: 278299 - protein, 55 aa, Zea mays
  Clone ID: MRT4577_185383C.1.pep
KKPNRHFFNKKLKQPQTPGQVKQKKLKGGAAFMDQKVLPFGCIQTTALTATLIKL

SEQ ID NO: 278300 - protein, 211 aa, Zea mays
  unsure (1)..(211): unsure at all Xaa locations
  Clone ID: MRT4577_185384C.1.pep
MKLPAWLTAVPPDPRAYGHLIQXLRGHRTPRXGRQLHARLVASSVTPSNFLASKLISLYSRGAHLDDARRVFDAIPRPSVFAWNAILIALSLHSADPSDAARLFAASGISPDEITLSALLKSLADSGPRLSALVAEVHAVAVQRGFGDDLFVSNGLITAYANAGDSRSARAVFDEMPRRDVVSWNSLISSYARAGWYRQCLELFQELASVH

SEQ ID NO: 278301 - protein, 71 aa, Zea mays
  Clone ID: MRT4577_185385C.1.pep
ESVVGYQQSICTSSSMRAAWLTSRDVAVHPGALGQYRCPHGAAAEYAASDPAVPSGDSHRYPAGEQSPRLR

SEQ ID NO: 278302 - protein, 116 aa, Zea mays
  Clone ID: MRT4577_185386C.1.pep
MPHAERDTMGEPMVNGEKPHSQFISHLTSYPVISDSITTFKNNKYGATSIKYADQGYERLAKPLLPYLSAPYTYVAPYVAKADSLGDQGLHKVDERFPIVKEDTEKIKNTIVDTAF

SEQ ID NO: 278303 - protein, 75 aa, Zea mays
  Clone ID: MRT4577_185387C.1.pep
IITIIKLIIKILTFCNPIITNMNMIFFILITHCLIPFMLHWSFTLRYGLQYLLTYMRLCFSQIGLLVVAWIIFLH

SEQ ID NO: 278304 - protein, 44 aa, Zea mays
  Clone ID: MRT4577_185388C.1.pep
VCKVGTGTLAYDGFIMPREFSVWPQRPSLVVHMRANSRASNISL

SEQ ID NO: 278305 - protein, 137 aa, Zea mays
  unsure (1)..(137): unsure at all Xaa locations
  Clone ID: MRT4577_185389C.1.pep
LLSSSSSPTPRAESPAASPPRPPAPAPRWGPASPGSAARVLLQNPPPXGFPSARRPPPPPPRPLLAXPRRHAPPWSQRRPRWGAPGPEPPGPGPAASPHAXPSSSATXPPRSPALVWSSPRSPPPCFLAAWEPCLLA

SEQ ID NO: 278306 - protein, 86 aa, Zea mays
  Clone ID: MRT4577_18538C.1.pep
LISSTNTNRESVAYRSFRPSEFEARDEEEVMEGTGILWSVLGDAVGAEEQLELRRSARVRELNEEEFESEEEEFDEDEDEYEMDET

SEQ ID NO: 278307 - protein, 41 aa, Zea mays
  Clone ID: MRT4577_185390C.1.pep
DLVAKDYTKDEPDLSACLLDSISIVQGLFRPLASDILAFNT

SEQ ID NO: 278308 - protein, 117 aa, Zea mays
  Clone ID: MRT4577_185391C.1.pep
GYIGETSVTVQRMVTALSSYDLCLIERAYASTLRAMRICRDPQKASALSQHPAALAELSCWYRESRDLATLTAHLSSNEEEAAPYTSLAPKRSDPGESISFPNEPRGALGSCRLEVP

SEQ ID NO: 278309 - protein, 140 aa, Zea mays
  unsure (1)..(140): unsure at all Xaa locations
  Clone ID: MRT4577_185392C.1.pep
GTVPAPLLQLRGLRTLVLSHNALSGEIPAXVRAPLLHLDLRGNRLSGGVPPLPGTLSYLSLAGNRLSGPVDGVLRRLPRLTFLDLGRNWLSGEVPGEVFAFRRIAYLQLRKNAFSGELRPAGRVPAGATVDLSHNALSGR

SEQ ID NO: 278310 - protein, 58 aa, Zea mays
  Clone ID: MRT4577_185393C.1.pep
GSTEFILLFCVWVWFLGRHGSWMGVGGSRIPKSWSHGPVGIVFQVQSALRKLHSFNTS

SEQ ID NO: 278311 - protein, 68 aa, Zea mays
  Clone ID: MRT4577_185394C.1.pep
SKSDDLHCPSPINALTKGPLTVGVLTEYLQLWDMTSDWQLQPEVEDKHVFSIAPNGIYLAKIAYEGFY

SEQ ID NO: 278312 - protein, 147 aa, Zea mays
  Clone ID: MRT4577_185395C.1.pep
MMIKVEHRARSHMSKTKMARNQISHCIPLLAILLALLPLTTNAALGLDQPALLRQLMESRRSARRSVGVSDETDGGTWTDPVSSFGKLPTYCESPEQQGSKEADRIAALPGQPRRVNFEQYAGYVTVDEEHGRALFYYFVESPYDAA

SEQ ID NO: 278313 - protein, 157 aa, Zea mays
  unsure (1)..(157): unsure at all Xaa locations
  Clone ID: MRT4577_185396C.1.pep
METRGGSLLILAEMLLRKELLPASTEGLVRVELNKLDVDQNGRVNARLSGEKRQRLLHRKANAMSSSGDNDSDIIALKNYMNAQXFGEIPVGSLQXKYTVIFDTDSSNLWVPPAKSXFSIACYFHARYKTAQTRTRYKNGKPAAIRYGTASIAGSSS

SEQ ID NO: 278314 - protein, 152 aa, Zea mays
  unsure (1)..(152): unsure at all Xaa locations
  Clone ID: MRT4577_185397C.1.pep
MRPSDGRTQLSGFAQSDESTLDVEGHCYHQQSFPSSPSMQPIASGCTHTENSAAYFLWPTSNLQHCAAEGRANYFANLSKGLLPKSGRLPKGQQANSLLDLMTIRAFHSKVLRCFSLGTAVGFRIRKGALTDIPAILLLVARKXHEKWLNPT

SEQ ID NO: 278315 - protein, 67 aa, Zea mays
  Clone ID: MRT4577_185398C.1.pep
GLVRFYPNPYGLRGIEGVSIPSKSKSPPIRINPLQSIWIGNNQTSPNWENGGGNLHCLWRRPVSRSR

SEQ ID NO: 278316 - protein, 55 aa, Zea mays
  unsure (1)..(55): unsure at all Xaa locations
  Clone ID: MRT4577_18539C.1.pep
PSRAKAQTQPASPPPASSHGVRLPRRKPHAAPPFPRSTLHXTXSRTLPRXPPAXL

SEQ ID NO: 278317 - protein, 69 aa, Zea mays
  Clone ID: MRT4577_1853C.1.pep
RPFVLLETQISLNGNYISCFTVLGFLLCYCAPVGRYCIYVFFFWSDVICATILLAKEFRIILAVYSNSN

SEQ ID NO: 278318 - protein, 70 aa, Zea mays
  Clone ID: MRT4577_185401C.1.pep
EQAEQFTVIRNCSQIHIGNKVTTLIIVIHVQLEYVENCFKAKMILTKTETTGLITQTQLTYSTNTAEGVR

SEQ ID NO: 278319 - protein, 166 aa, Zea mays
  Clone ID: MRT4577_185402C.1.pep
RPRSFCSPSPRRSPEPPTATRSAAARAGTPAASRACTRARRRRRSTTRRRRRPCTRHHRRRSTTRRRPRPRPRPTARRRRRAAATSRRPDTRPGTTRRRRPAPAGTRPRTTRRRARSTRRTPGSGPTPRRPASPRRGARRSSSPPRRRRRWPAPAWPCDAVGGRRG

SEQ ID NO: 278320 - protein, 132 aa, Zea mays
  unsure (1)..(132): unsure at all Xaa locations
  Clone ID: MRT4577_185403C.1.pep
SSPRIEKSGYVSHVQIGVKYKPQSCMIEAHXGDDDXLHYRXKLPDGTFVDASXERGDPIXVEVSTGQVIKGXDQGLLPMSVREKRKMYIPSQLGYXTHGSPPTIPGAATSHILTRSLVAVTASNQPSNADEL

SEQ ID NO: 278321 - protein, 172 aa, Zea mays
  Clone ID: MRT4577_185404C.1.pep
MARRPRPCAHLTATLLLLAVAAAVARAADGDEKCGSPCGNPCGEPCVYASPPPPPVYYPPPPPPVYSPPPPPEYYPPTTPTPTTPYCPPPPSGGGYEPSPGYTPYTPGYNPTPPSGSGWYTPSYNSPPGTLYPQDPGFRPNAAPARVAAPWRAALFLAAAASAALARACLDL

SEQ ID NO: 278322 - protein, 138 aa, Zea mays
  Clone ID: MRT4577_185405C.1.pep
MARLLRAAAVLALLAVSTAALSAPAWAGGVSAGDLAHLGAAVVIRRGGGRACRGGTTVGECMEYLDVDAEGEADVAGMATGGSKRRVLQGGSGYIGYDALRRDNVPCSQRGASYYNCQPGAEANPYSRGCSAITQCRG

SEQ ID NO: 278323 - protein, 52 aa, Zea mays
  Clone ID: MRT4577_185406C.1.pep
TTYVRIITGRTLHEVIQASQRFLIKGRTGTGLVLQHPIMVLLQDPSIIFSMG

SEQ ID NO: 278324 - protein, 72 aa, Zea mays
  Clone ID: MRT4577_185407C.1.pep
RLLRTPPPVGFRGGLVGEREEMAASDVEYRGFLGGLAWATCDHSLIIALRTYGEVLVSKIILDRGGGRDRGL

SEQ ID NO: 278325 - protein, 131 aa, Zea mays
  Clone ID: MRT4577_185408C.1.pep
MARLLRAAAGLALLLAVLAPAASAGGDLAQLGAAVVTRRGGGRTTCRGGTVGECMEYLDVDAEGEADVAGMATGGGKRRVLQGGSGYIGYDALRRDNVPCSQRGASYYNCQPGAEANPYSRGCSAITQCRG

SEQ ID NO: 278326 - protein, 101 aa, Zea mays
  Clone ID: MRT4577_185409C.1.pep
KNFPVAGDRVKIHYVGTLESKDGKKFDSWGDRGKPFECQIGVGKVIKAWDQGVVQLSIGQEAYFKCPPSIAYGAAGCQNVIPPNSTLFFKVELLEINGRKS

SEQ ID NO: 278327 - protein, 59 aa, Zea mays
  Clone ID: MRT4577_18540C.1.pep
PKTGHQGPGVDLPFLWPSGEDQPARLVLISTGLDSFYSTLSLWIKTEGAGFNSYWQNHK

SEQ ID NO: 278328 - protein, 261 aa, Zea mays
  unsure (1)..(261): unsure at all Xaa locations
  Clone ID: MRT4577_185410C.1.pep
MAALLALVLLLLSGGAAGDDVAALLEFKKGIADRDRDQLLGSWSPPAATEAVIFGGACPASWRGVVCDGGAVVGVALDGLGLSGELKLGTLSGMRALQNLSLAGNAFSGRLPPGIGSLSSLRHLDLSGNRFYGPIPGRLANLSSLVHLXLFYNNFTSGFPTDGIQQLQNLRRFDVRSNNFWGNATDLLAKLPQAEHVDPLDNLFTGTIDLDIQSLASIGNTVKYLNLSHNKLDGGFFRNETVAAFKNLAVLDLSNNGLGGI

SEQ ID NO: 278329 - protein, 153 aa, Zea mays
  Clone ID: MRT4577_185411C.1.pep
FVFGRLIVRLAIGHTSFYQTELSRYKKPFSLKKKKKKKKKKKKKKKKKKKKKKKKKKKKKKKKKKPKKKKKKKKKGGPPPQETPPPGIFFGPVPLGAPTFPFWGGFKRGGFKGANMFPGKNVFPFKIPKKITRGKLKFKPGGPHRGATPPFLG

SEQ ID NO: 278330 - protein, 88 aa, Zea mays
  Clone ID: MRT4577_185412C.1.pep
RAFFLFYLLLSQRHKSCTGLEKMPELLDFDKQQRQLEDDLSKLQNALKHWQTWHVEYEMLKEEVEAVCKNSETELKAIPGVSEGELLK

SEQ ID NO: 278331 - protein, 67 aa, Zea mays
  Clone ID: MRT4577_185413C.1.pep
HLLLKRAQRMAGPRLCGKDGAKEEGAAAPANGAKQPAQSQSTAGTGPRQSYQIVCFQHVQSADHGCL

SEQ ID NO: 278332 - protein, 188 aa, Zea mays
  unsure (1)..(188): unsure at all Xaa locations
  Clone ID: MRT4577_185414C.1.pep
LFHDAIKISGFDPPPARVFSWGVLEFKKQGVHXNVSMAVANNKSRPKKKAKKKGFKELKKIPPTERRKPPPNPYPRAIKEIQAEEKKFFMGRLHNPKVFFFLNKIKEERDRIFRDKTGGDRFFYPQVFFCLAPWGLKKKHGPPRVIKNGCWRFIWQKLNPGFCFSNFWGLNAPWKAMFIGICFAPQRV

SEQ ID NO: 278333 - protein, 52 aa, Zea mays
  Clone ID: MRT4577_185415C.1.pep
SKLVSPIICVGQFNHQNSFRKRFDPISLSSSNVGFITVQNYITLLSRTFDRV

SEQ ID NO: 278334 - protein, 159 aa, Zea mays
  Clone ID: MRT4577_185416C.1.pep
FTGLSGVAPNCPVCQRSNGYTAPTVDCNAIVQRYSARLRAQKSEQHQKAHRTVQWPTCQKLQRSEPNGRVTWLAHRTMSVARRTMSGDAPDCPVLLATAASTNGQLGGWGYKYPPTTTLQCIQVFSHQTSHKGYRLHSRHKQRDQILSQVRRSFQSNSD

SEQ ID NO: 278335 - protein, 79 aa, Zea mays
  unsure (1)..(79): unsure at all Xaa locations
  Clone ID: MRT4577_185417C.1.pep
LLHPPPTNXAGHLQPIMHTHNKTHTSKTITPKTHSTNTTNNTKSNTQHNDCIPPHQTTAHNIWQATIGPTHNFLLQHPQ

SEQ ID NO: 278336 - protein, 81 aa, Zea mays
  unsure (1)..(81): unsure at all Xaa locations
  Clone ID: MRT4577_185418C.1.pep
MNALLLLGYITHLFSVLGLLLKIYATNSCSRVSRETHELYMLVFAASYLYLCTDYVSLYNXLMKIVFITSSAAIVMCMRHH

SEQ ID NO: 278337 - protein, 916 aa, Zea mays
  Clone ID: MRT4577_185419C.1.pep
MADRVTIISPRDPWPFSTVTASDLEELVGEGLLRPLTDGQQPEWIPPMGGVAPSPPPGYVVSFVSFHERGFGVPTGRFMRAILFHYGVELHNLTPNSISQAAIFVAVCEGYLGIAPHWDLWTHLFLAEPFALPTGERRVRAAVRAGDCTLLLRQSRASQYIPAILASSNKGWQRRWFYLRNDGELLPPFSQRVVTAATDAWRHGTPHERQKNLEPLLEALKALREGGLTAAGVVAAIHRRRVLPLAERRLPLWEMTPEADWEGSRMSPDPLPFDALQWRVSAAMGKPDSHAYSQLRMRPDQGCVTLEVGWHKPSLPRVPEDAVDRAARRVAAEEKKKKKDAEKARARERRRARDALEKRRRQQEREGLPREPSPETPDDDDDDDDEEEDDMAARLGLSPGLGCGQEPSSQPPSGPTPSVPGVGVSGSRPEARGRPESKRSHGQTDLAPRKALKTAPDCAASAAPGLVVQPTLSRGISPQGARASPVSGERAPEAGSSAEAAIVVGEAADADVVPSPPVVPAMLAPATAEVAAVPVRERPVAASVGMADASAPSASEEVGADARSVQPGGSLIAVRRSPVARRPLLRFRTREASDPVFVLDDEHEDQSWDELRERAEATVGSLRSSLEVFCRDVPKILQDLTDRSAAKSSFIRREVDVWGSLRSLRTSLAGATARLSQQDAKVADLQLLCADLRAEAAAARAEAQRQRSEFVQVVEERDQSRGRAAEAESRAKTLAADLAAAQVAASEQRARAGELESALDESAKALAEALAGAAEQREADLAAMSEAVSDVYRILGSGDVPSGSSPQSCLQALGDHARDRVREALHHGVRRAFAVLASHYVVDLERVSEGYCLPDKDEATLAEVQRLDAVAAGPSAALATTFEAEILPPAPSPEAEMDLTDGGDGAEGAAPSQGGA

SEQ ID NO: 278338 - protein, 272 aa, Zea mays
  unsure (1)..(272): unsure at all Xaa locations
  Clone ID: MRT4577_18541C.1.pep
MCRPSQTPHLTMSSARIGPARPGLGAKRRGGAPLPTHGISKITLKVVVFHLRPEAPTYPTPLKSFHKVGLESSSTGSSFPADSAKPVPLAVVSLDSRQGXSGISLIHSCASLXMTRHLATLRESXYSRXVYPRLVEFLHFDIQSTXEITLRQHPXDRRNALFXLNSRIPLVRTSSESVVRRPGKAPEGAVPGPSPGRHAAARSRRASSSSIPPAADGFGAGTPEPNPQSQSFSRSYGSVLPTSLAYIVPLARGCSPWRPDAVMSTTGQRPRI

SEQ ID NO: 278339 - protein, 83 aa, Zea mays
  Clone ID: MRT4577_185420C.1.pep
MYLYSLTLQRATGAVCAVIGSFSGRDSKKSAASGSGSTQEIAVARGSTLDLLRPDPETGRLRTLLSVDVFGAIRSLAQFRLTG

SEQ ID NO: 278340 - protein, 986 aa, Zea mays
  Clone ID: MRT4577_185421C.1.pep
MEPFGGLAFEPLTSMTASDLEELVGEGLLRPLTDGQRPEWIPPTGGVAPSPPLGYVVSFISFHERGFGVPTGRFMRAILFHYGVELHNLSPNSISQAAIFVAVCEGYLGIAPHWDLWTHLFLAEPFALPTGERKVRAAVRAGGCTLLLRQSRASQYIPAILASSNKGWQRRWFYLRNDGELLPPFSQRVVTAATDAWRHGTPHERQKNLEPLLEALKALREGGLTAAGVIAAIHRRRVLPLAERRLPLWEMTPEANWEGSRMSPDPLPFDALQWRVSAAIGKPDSHAYSQLRMRPDQGCVNLDAVDRAARRVAAEEKKKKKDAEKARARERRRARDALEKRRRQQEREGLPREPSPETPDDDDDDDDEEEDDMAARLGLSPDSGCGQEPSSQPPRGPTPSVPGVGASGSQLEARGRPERSPVPSAGGAEVAPKGQVRASAPQGPSLVPVAHGGDPQVIAAVPGQSAPRASKTRVAPKVPAKRTSTAVSGAGTQEGFPQAQWIMARSGKRSHGQTDLAPRKALKTAPDCAASAASGLVVQPTLPQGVPLQGARVSPVSGERAPKAGSSAEAAIVIGEAADADVAPSPPVVSTTSTPVAAEVAAVPVGERPVAASVGMADASAPSASEEVGVGARSVHPGGGLVAVRRSPEARRQLLRFRTREASDPVFVLDDEQENQSWDELRERAEAMVGSLRSSLEVLCRDVPKILQDLTDRSAAKSSFIRREGDVWGSLRSLRTSLAGATARLSQQDAKVADLQLLCADLRAEAAAARTEAQRQRSEFAQVVEERDQSRGRAAEAESRAETLTADLVAAQVAASEQRARARELESALDESAKALAEALAGAAEQREADLAAMSEAVSDVYRNLGSGDVPLGSSPQSHLQALGDHARGRVHEALHHGVRRAFAVLASHYVVDLERVSEGYCLPDEDEAALAEVQRLDAVAAGPSAALATTFEAEILPPAPSPEAEMDLTDGGDGAEGVAPSQGGA

SEQ ID NO: 278341 - protein, 943 aa, Zea mays
  unsure (1)..(943): unsure at all Xaa locations
  Clone ID: MRT4577_185422C.1.pep
EQRPEWIPPVGGVAPSPPPGXYVVSFVSFHERGFGMPTGRFMRAILFHYGVELHNLTPNSISQAAIFVAVCEGYLGIAPHWDLWTHLFFAELFALPTGERKVRAAVRAGGCTLLLRQSRASQYIPAVLASSNKGWQRRWFYLRNDDELLPPFSQRVVTTAADAWRHGTPHERQKNLEPLLQALKALREGGLTAAGVVAAIHRRRVLPLAERRLPLWEMTPEADWEGSRMSPDPLPFDALQWRVSATMGKPDSHAFSQLQMRPDQGCVTLEVGWHKPSLPRVPEDAVHRAARRVAAEEKKKKKDAEKARARERRRARDALEKRCRQQEREGLPREPSPETPDDDDDDDDEEEDDMAARLGLSPGLECGQEPSSQPPSGPTPSVPGVGASGSRTEARGRPDRSPDPSAGGAEVAAEGQVRASAPQGPPLVPAAHGGDPQVIATVPGSSAPRAFKAKVAPKLPAKRTSAAVSGAGIQETSPQARWIMPRSGKRSHGQTDLAPRKALKASGARASPVSGEQVPEAGSSAEVAITIGEAAGADVVPAPAVVPAMLTPAATEVTDVPVGERPAAASVGVADAPAPSVSEEVGMDARSAQPGGSLVAVRRSPEARRQLLRFRTREASDPVFVLDDEQEDQSWDELRERAEATVRSLRSSLEVLCRDVPKILQDLTDRSAAKSSFIRREVDVWGSLRSLRTSLAGATTRLSQQDAKIADLQLLCADLRAEATAARAETQRQRSEFVQVVEERDQSRARAAEAESRAETLAAGLAAAQVAASEQRARAGELESTLDESAKALAEALAGAAEQREADLVAMSEAVSDVYRALGFGDVPSGSSPQSRLQALSDHARGKVREALHHGVRRAFVVLASHYVVDLERVSEGYCLPDEDEAALAEVQRLDVVAAGPSAALATTFEAEILPPAPPSEAEMDLTDGGDGTEGATPSQDGA

SEQ ID NO: 278342 - protein, 553 aa, Zea mays
  Clone ID: MRT4577_185423C.1.pep
LFTRTKHAITVLKIAPWQLLGMEFDVLEPLKKSYDNLPSDKLRLCLLYCSLFPEEFSISKDWIIGYCIGEGFIDDLYTEMDEIYNKGHDLLGDLKIASLLEKGEDEDHIKMHPMVRAMALWIASDFGTKETKWLVRAGVGLKEAPGAEKWNDAERISFMRNNILELYERPNCPLLKTLMLQGNPGLDKICDGFFQYMPSLRVLDLSHTSISELPSGISSLVELQYLDLYNTNIRSLPRELGSLSTLRFLLLSHMPLETIPGGVICSLTMLQVLYMDLSYGDWKVGASGNGVDFQELESLRRLKALDITIQSVEALERLSRSYRLAGSTRNLLIKTCSSLTKIELPSSNLWKNMTNLKRVWIVSCGNLAEVIIDSSKEAVNSNALPRSILQARAELVDEEQPILPTLHDIILQGLYKVKIVYKGGCVQNLASLFIWYCHGLEELITVSEEQDMAASGGGGQGSAAFRVITPFPNLKELYLHGLAKFRRLSSSTCTLHFPALESLKVIECPNLKKLKLSAGGLNVIQCNREWWDGLEWDDEEVKASYEPLFRPLH

SEQ ID NO: 278343 - protein, 132 aa, Zea mays
  unsure (1)..(132): unsure at all Xaa locations
  Clone ID: MRT4577_185424C.1.pep
GLDQFKYALGSELAQGICNLNCVCCLYLVAIASHDAXGYTIVVSQPSVWPVLRRYGXLSVLMPCTHVMLKRFXSLPVLSVGTCVPVVRTLVWTALGXHVTAWAHVPPGLRSIVTTRTLSADSVVGLLAFSVH

SEQ ID NO: 278344 - protein, 923 aa, Zea mays
  Clone ID: MRT4577_185425C.1.pep
MGGVAPFPPPGYVVSFISFHERGFGVPTGRFMRAILFHYGVELHNLTPNSISQAAIFVAVCEGYLGIAPHWDLWTHLFFAELFALPTGERKVCAAVRAGGCTLLLRQSWASQYIPAVLASSNKGWQRRWFYLRNDGELLPPFSQRVVTAASDAWRHGTPHERQKNLEPLLQALKALREGGLTAAGVVATIHRRRVLPLAERRLPLWEMTPEADWEGSRMSPDPLPSDALQWRVSAAMGKPDSHAFSQLRMRPDQGCVTLEVGWHKPSLPRVPEDAVDRAARRVAAEEKKDAEKARARERRRARDALEKRRRQQEREGLPREPSPETPDDDDDDDDDEEDDMAARLGLSPGLGCGQEPSSQPPSGPTPSVPGVRASGSRPEARGRPEGSPDPSAGGAEVAPEGQVRASAPQGPPLVPAAHGGDPQVVATMPEPSAPRASEARVAPKLRVKRTSAAVSGAGIQETSPQARWIMARSGKRSHGQTDLAPRKALKASVCAASAAPGLVVQPTLSQGISPQGARASPASGEQAPEAGSSAEAAIVIGETAGADVVPSPLVVPAMLAPAATEVAAVPVGERPVAASVGMADASAPSASEEAGVDAQSVQPGGSLVAEDQSWDELRERAEATVGSLRSSLEVLCRDVPKILQDLTDRSAAKSSFIRREVDVWGSLQSLRTSLAGATARLSQQDAKIADLQLLCADLRAEAAAAHAEAQRQRSEFVQVVEERDQSRGRAAEAESRAETLAADLAAAQAATSKQRARAGELESALDESAKALAEALAGAAEQREADLAAMSEAVSDVYQNLGLGDVPSGSSPQSRLQALGDYARGRVREALHHGVRRAFTVLASHYVVDLERVSEGYCLPDEDEAALAEIQRLDAVAAGPSAALATTFEAEILPPAPSPEAEMDLTDGGDGTEGAAPSQGGA

SEQ ID NO: 278345 - protein, 60 aa, Zea mays
  Clone ID: MRT4577_185426C.1.pep
ADAQLREELRIAVSERLIPAYRAFLGQGTRHPARHVKWSLDDLECYMLDFFEGVQKFVRW

SEQ ID NO: 278346 - protein, 107 aa, Zea mays
  Clone ID: MRT4577_185427C.1.pep
RPQKAGCASTRFFSFQKGRGFPPKGWSGPTNKGCKFCGGPPLRMLKQMQLAAGSYFSLGPWFPPKVNVCGCKSQVWFGQVPPKVLCQPFGKVVFPPPSLLFWPPKYP

SEQ ID NO: 278347 - protein, 87 aa, Zea mays
  unsure (1)..(87): unsure at all Xaa locations
  Clone ID: MRT4577_185428C.1.pep
MACVAIAKWYHTIHALLQTAQHGMTVSGQGVLVDMTRDPDWAFEDAGLEMREGXDTAYHAGLYXTDAHRVAFEVLLQDLSKFRLKAV

SEQ ID NO: 278348 - protein, 179 aa, Zea mays
  unsure (1)..(179): unsure at all Xaa locations
  Clone ID: MRT4577_185429C.1.pep
MAELKRLSESRDLTRIERIGAHSHIRGLGLDSSIEARDASEGMVGQLPARRAAGLILQLIRQGKIAGRAVLLAGQPGTGKTALAMGIAKSLGAETPFASVAASELFSLDLSKTEALTQAFRRAIGVRIKEEAEIIEGEVVEISIDRPVSAGXGHTFSATAAGKTGRLTLKTTDMETVYE

SEQ ID NO: 278349 - protein, 122 aa, Zea mays
  Clone ID: MRT4577_18542C.1.pep
QVIVSLLQQAVTFVVVVGIVFGGGIFSCGTAADVFYAYPLCSRWWQPLPYQSASPRCRTTIWMWRGSIRVFLYCLAAFRPSSTPSHARCSSTTTRCPAAPEESRSGSFAHRGVATIAGNQLG

SEQ ID NO: 278350 - protein, 64 aa, Zea mays
  Clone ID: MRT4577_185430C.1.pep
CMQLCMFFSEIVVGTHLNVYKYNHYHFLYLQQDGNTVLTPSFSFIINTVLIPSIPFISLWACCY

SEQ ID NO: 278351 - protein, 150 aa, Zea mays
  Clone ID: MRT4577_185431C.1.pep
RTAPDSFLCAPAAHPWLAAPMAERLPWRARRDAPAPASSLLGQTIGLPLLGARRHGRCLFPARVLCASFSPCSSGSAPISMAPCVSIRHALLLPVPLASPGSFSAPVSPSAVDPLAQAMSCLFAIVEPFSVARRRSSPDSCVLLAFASRA

SEQ ID NO: 278352 - protein, 82 aa, Zea mays
  Clone ID: MRT4577_185432C.1.pep
PGNLLGGPPNLVGITGSSKKIDVYPLNWCPSVQPGPLPLIKEKFFLGFFWGPGGSGIGVLSFGKGKSAYPPSLEPESLAMEP

SEQ ID NO: 278353 - protein, 38 aa, Zea mays
  Clone ID: MRT4577_185433C.1.pep
RRAFRKDHVYCTFSISPLETPARAEYSARVSGEPGTQF

SEQ ID NO: 278354 - protein, 104 aa, Zea mays
  Clone ID: MRT4577_185434C.1.pep
MFAAIENMNAKELAGRNITVIQAQSRGGGGADGGSGGGFAAAAGYGVWCRGAGYDDGDGYVGRPQGGVAVYEAGGGYFGRPHGGVSKNAAGDFVVFLNKCVGLG

SEQ ID NO: 278355 - protein, 230 aa, Zea mays
  Clone ID: MRT4577_185435C.1.pep
MTTAARPTWAPAKGGNEQGGTRIFGPSQKFSSRDLAAHTSLKPRKDGQQTQEELQKRNLREELEERERKHYSSKDKSYAEERDRRKSSSHLLLEGSKRETEDKIVPREIDADDSDVEPKSDDESDEDDDDDDTEALMAELERIKKERAEEKLRKERQQAEEEAKMKEAELMRGNPLININNAGSFSVKRRWDDDVVFKNQARGETKTPKRFINDTIRSDFHRKFLQRYMK

SEQ ID NO: 278356 - protein, 123 aa, Zea mays
  Clone ID: MRT4577_185436C.1.pep
QEFAASSLMQSKHKWCFYRVVTHDFCSLRVDLMLAAAIQMRVFTDLHMLYLKAREASVITSSGSPQDDVSPAVSVHEVGVLPSRECICDVQAGSVIYLSIQFFISVTKSHTEEQSGVTTCLTR

SEQ ID NO: 278357 - protein, 94 aa, Zea mays
  Clone ID: MRT4577_185437C.1.pep
MSSSRFSPALQASDLNDFIAPSQDCIISLNKNTCSSSRRPQNIEAGWLKWRQAAGVLCDHRVPRKLKGKFYRTIRPAMLYGAECWPTKRHMSNN

SEQ ID NO: 278358 - protein, 83 aa, Zea mays
  unsure (1)..(83): unsure at all Xaa locations
  Clone ID: MRT4577_185438C.1.pep
MSCCGGNCGCGSGCKCGSGCGGCKMYPDMAEQQVTTTAKTLVMGVAPSXRGTPXGFEAAAGAGAENEGCKCGPNCSCNPCTCK

SEQ ID NO: 278359 - protein, 123 aa, Zea mays
  unsure (1)..(123): unsure at all Xaa locations
  Clone ID: MRT4577_185439C.1.pep
YSFLIGIHFCDDISASKXGSSTFTASPSXHGLFDLDLDRVRYLLXVVLILNQSVXKSESFQGGGTTELCFSDDAFDMVPDCSRYVTAFYLGIYALLQFLCITFAYHHCCYRHITLLYVILEIG

SEQ ID NO: 278360 - protein, 47 aa, Zea mays
  Clone ID: MRT4577_18543C.1.pep
YELCGIASTKKWTPKLKVKEDMNLHLAHQLISAQFLVTLSIKWINQN

SEQ ID NO: 278361 - protein, 216 aa, Zea mays
  unsure (1)..(216): unsure at all Xaa locations
  Clone ID: MRT4577_185440C.1.pep
MAAHLPSFCSRHASMAVAAALMIVMATEAPAGVALLKDDIGFMWGPDHSFFYDDGNALALCLEKSHGSGFRSNAANLYARYDIDVKLVANDSAGTVTTVYLTTDDVRPGYHDEVDMEFLGNVTGEPYTLHTNIFVNSVGNREQQFRLWFDPTKEFHTYSVEWTPKNIIFLIDGTPIRVYKHEPSLGGTFPTQRHMRLDGSLWXNADDWATQGGPRA

SEQ ID NO: 278362 - protein, 155 aa, Zea mays
  unsure (1)..(155): unsure at all Xaa locations
  Clone ID: MRT4577_185441C.1.pep
LLTAGVRNQCACVAMHTXGYHMARAHLSTDSSGIDQPKESAEELYQKMLKSVEAQTMPPNAWLWSMISSCSSEEDIKLLFQILQKLRIFRLSNLRINANFNDHLCMKVSEACARVXVVDYXVKVLWNHNVYGITPTIGSAHYLLAHAKEHNDTKL

SEQ ID NO: 278363 - protein, 41 aa, Zea mays
  Clone ID: MRT4577_185442C.1.pep
KVINTLSCKDNQYSRTCSNYINLSNYYISFTVTTRWIHPLI

SEQ ID NO: 278364 - protein, 250 aa, Zea mays
  unsure (1)..(250): unsure at all Xaa locations
  Clone ID: MRT4577_185443C.1.pep
MQAATARARRLLASPAASGIQGILSASHRGCAAAAELVLLPHLENGFPASRSSPDHTRSFSSHLPRTLLSQTATSHCRCNKSVCYHMARAHLSTDSSGIDQPKESAEELYQKMLKSVEAQTMPPNAWLWSMISSCSSEEDIKLLFQILQKLRIFRLSNLRINANFNDHLCMKVSEACARVGXLDYGLKVLWNHNVYGITPTIGSAHYLLQHAKEHNDTKLMEKIMQVLXRNSLPLXPGTADIVFSICYTL

SEQ ID NO: 278365 - protein, 98 aa, Zea mays
  unsure (1)..(98): unsure at all Xaa locations
  Clone ID: MRT4577_185444C.1.pep
MWRTAVVTAAALALAVLGAAAMAAAAPQVPCYFIFGDSLVDNGNNNFIVSMARANYPPYGIDFAGGPTGRFSNGLTPXDVIAKLLGFXDDLVPPFSEA

SEQ ID NO: 278366 - protein, 95 aa, Zea mays
  Clone ID: MRT4577_185445C.1.pep
KKTFFFEFFLGLPPQGGTPPPGQMENSKKGGLFLKPGGGFPFPGNFFTLQNFWTFFFGPPPLFGFFNLFFGFPGVLVNLFKPPLFSGLRFSPPFF

SEQ ID NO: 278367 - protein, 110 aa, Zea mays
  unsure (1)..(110): unsure at all Xaa locations
  Clone ID: MRT4577_185446C.1.pep
LMTGHERNELEGAKHSSVTGEMADMTTYYQCAVIDEIHMVGCXXRGYSLTHALVGLRSYELHDXGDHTXRPLIQQILEATGDVDTDQYYERLSTVDPLNISLGCFCNITA

SEQ ID NO: 278368 - protein, 186 aa, Zea mays
  Clone ID: MRT4577_185447C.1.pep
MKGSSEPGETSKQAPLGSRGVSKGVSVLDLILRFIAIIGTLASAIAMGTTNETLPFFTQFIRFKAQYSDLPTLTFFVVANSIVCAYLTLSLPLSIVHIIRSRAKYSRLLLVVLDAAMLALVTAGASAAAAIVYLAHKGNVRANWLAICQQFDSFCERISGSLIGSFGAMVMLVLLLLLSAIALARR

SEQ ID NO: 278369 - protein, 67 aa, Zea mays
  unsure (1)..(67): unsure at all Xaa locations
  Clone ID: MRT4577_185448C.1.pep
DQGNFEEVLFHFGQASFYKIFQLFFCGSPHMCIPPPLTKVSFLEMAGTFYXXPQGAEGWAWPGFFGR

SEQ ID NO: 278370 - protein, 137 aa, Zea mays
  unsure (1)..(137): unsure at all Xaa locations
  Clone ID: MRT4577_185449C.1.pep
HLWNEFAILLLSISDYXSVLSGRGHDMLHIDPARAATCVALAAVWVKNGXNXALTCAKESLTVDDIHIXGYMIKGNPGLSFEXPDYSVTDCRVAQELRSXDLRXSYQGLAASYLALSKCNYALFTAREAMKAMHKSA

SEQ ID NO: 278371 - protein, 47 aa, Zea mays
  Clone ID: MRT4577_18544C.1.pep
ALLLSEAAGGYYHHVLDLGSPAALEGRHKDEVVGPETSGIESTRSSG

SEQ ID NO: 278372 - protein, 59 aa, Zea mays
  unsure (1)..(59): unsure at all Xaa locations
  Clone ID: MRT4577_185450C.1.pep
EVRKNNLSNSIVSALIQNVGGNSTHTNNKKHNSPKNFGRHGRFELELXKTLVGGHPTRH

SEQ ID NO: 278373 - protein, 86 aa, Zea mays
  Clone ID: MRT4577_185451C.1.pep
CSAARTSGYLEIASDEGVHWAVQNGLHLSRSTVVYFKHNDVASLASTLEKLARGNKRAKKIRRYIVVESIYKIIPVFWFDLEYTYV

SEQ ID NO: 278374 - protein, 99 aa, Zea mays
  Clone ID: MRT4577_185452C.1.pep
SKVRWLRPSEAVLLPCCLDARVLPMLGTLKSDLAFRQTHPIWKGSARRAGGHGRRWSCHELQNQQYGHHRTGHFLLATLHDRLCSLYLIVSRPPALERR

SEQ ID NO: 278375 - protein, 79 aa, Zea mays
  Clone ID: MRT4577_185454C.1.pep
LFFYSRRRHGAWRWQAIVFDESNYLYRKICIFAYYRLDLECSYKWFTIYLAIDLVDVWMIMMTFGLFLSFWLCTWHVLL

SEQ ID NO: 278376 - protein, 103 aa, Zea mays
  Clone ID: MRT4577_185455C.1.pep
LFYYCALLQMSGATLFNLSLLTSDMWAVAIRVLFYQQEINRLYYLAFTVVAIGLIIYSLNDRSSDDETAGSTEAPAQYQQLPIEDNSTRIGSSSGKCLIGSRS

SEQ ID NO: 278377 - protein, 70 aa, Zea mays
  Clone ID: MRT4577_185456C.1.pep
RKLILILFLILLSFLGQLNVFLYMKQPAFYSAYLYAIFDLVKIHALTMKCLRTLIHYYPTNRYELLPYVS

SEQ ID NO: 278378 - protein, 275 aa, Zea mays
  unsure (1)..(275): unsure at all Xaa locations
  Clone ID: MRT4577_185457C.1.pep
PPTPLLSPLPIWIRSLSAPPNLPSPASRPPSPXLTVASSPXPPSLLPTSTGRXDSPPXSSPPSTLEPVGRGTHSVASRTLASFLPTPERNYLLPPGARGAARGRAPCVPRNSSIPLSRPQIRRGSTRRCLSRHRRDALDRATGEPPRGHALDPLSXRWIRPPPATPTLRRXPPPHPRPATVTPRHDPPPRSSPRLPPIRHGARDPTPRSAKLSSLFQPRDPTPPSVDGSVALTHTGSLPLPGLRQSRSHGAPAGCSSLQVGWIGGAVPKSLVFSL

SEQ ID NO: 278379 - protein, 34 aa, Zea mays
  Clone ID: MRT4577_185458C.1.pep
YVAAHKIISIHWFLPSPLNFPRPGVHLIKKGKDP

SEQ ID NO: 278380 - protein, 213 aa, Zea mays
  unsure (1)..(213): unsure at all Xaa locations
  Clone ID: MRT4577_185459C.1.pep
MYGACSSCCSSGSSSPSPWPPQALPPPSLLILVFNLSPLIELTRIHRLVGVHGVDAPLTQSFLAYLLLTLVYVPIVLRRRQKLQIAWYWYLALAFFDVQGNYLVVKAYQYSYITSVTLLDCWTVVWVVMLTWYALGTRYSLWQFVGAGTCVAGLALVLLSDAKSQDEQDPKKXXLLXDALVIAGTVGFAFSNVXEEYCVKKRIELELLQCSVS

SEQ ID NO: 278381 - protein, 74 aa, Zea mays
  Clone ID: MRT4577_18545C.1.pep
FPYSLPSCVPSAFRFPLVLAVFGFAPLVVFFPFPLSLLFVLCSTSVSAAPFFVLLGVRFSVHVYGTSMFKKKLY

SEQ ID NO: 278382 - protein, 59 aa, Zea mays
  Clone ID: MRT4577_185460C.1.pep
QRPPTRPTSSRGERQARHVDAMQAQRTSLQITWKRERGLQIYIQCWIYDLQLIKPIESC

SEQ ID NO: 278383 - protein, 97 aa, Zea mays
  Clone ID: MRT4577_185461C.1.pep
NTPVSAQRADHQRAHSRGGHPGTTRSRSYTGADAQVDQVLRLLLVIGIEDTCVAVVDAVEEEAYEGRSDETTGPNVQLCIPLAPHASHQPTRSILPL

SEQ ID NO: 278384 - protein, 88 aa, Zea mays
  unsure (1)..(88): unsure at all Xaa locations
  Clone ID: MRT4577_185462C.1.pep
AKKRGLPPPPSKTACGNGCPGPPPRKRKTGGGPPPPGSPPPQKRGGTRLGKGGGPRSGPGGPSLVGPNPPLKKPGRXGKGPPPPPMRE

SEQ ID NO: 278385 - protein, 62 aa, Zea mays
  Clone ID: MRT4577_185463C.1.pep
FQDILWWGQPLLAPPPQKTQTGEPGAGKPRGALFFTFKTPLFWLEKNLHYFFSREPFWALGF

SEQ ID NO: 278386 - protein, 55 aa, Zea mays
  unsure (1)..(55): unsure at all Xaa locations
  Clone ID: MRT4577_185464C.1.pep
KSRQRSMLQTSVTTESKNNEEFHAADVNLVIDIHFXSIRWHACGRLHVLREKWKE

SEQ ID NO: 278387 - protein, 50 aa, Zea mays
  Clone ID: MRT4577_185465C.1.pep
MSRVLVGMHGPYQTTNRLIWARLFMKKRSCELYFECIPSVKLEQRFSPLN

SEQ ID NO: 278388 - protein, 177 aa, Zea mays
  Clone ID: MRT4577_185466C.1.pep
AADAKLNFECNAAFRQKEVFAMRDPTQEDPREVAAAKVDLNYIGLDGEIGCMVNGAGLAMATMDIIKLHGGTPANFLDVGGNASEHQVVEAFKILTSDDKVKAILVNIFGGIMKCDVIASGIVNAAKEVALKVPVVVRLEGTNVEQGKRILKESGMKLITADDLDDAAEKAVKALAH

SEQ ID NO: 278389 - protein, 219 aa, Zea mays
  unsure (1)..(219): unsure at all Xaa locations
  Clone ID: MRT4577_185467C.1.pep
MKGDSIIASEAEESSLPLLLPLHAAPSQEYEQFTCNGSVDIRGYPASKRHTGNWRACYSILGGEFCGAMAYYGVGTNLVSYLTKAQKKSNVAAASNIASWQGTCYLTALLGAFLADSYLGRHRTIVVSLMVVTMGVLLLTLSASIPASIHVMATATSNSQEALSSLGLFLTALGLXGIWPCVPTFGADQFDDTDAAEKEQKQLYXHWYYFAXHGGFLFA

SEQ ID NO: 278390 - protein, 123 aa, Zea mays
  Clone ID: MRT4577_185468C.1.pep
EFVDPKLTEYDAYEVLRVIRVALHCTQGSPHKRPSMSRVVAMLNGDADAAEDVAKPSYITEWQVMAADVSGSFASSHVGSSSTQTQPTSSSGGHGGAQASPEPGDLTPAVPSPLYTSIIEEGR

SEQ ID NO: 278391 - protein, 228 aa, Zea mays
  Clone ID: MRT4577_185469C.1.pep
MGSLPLPSLAVLAALLCCFLAVGGGAVELNTTDPSPFDVDLNATDATKYWGPWTPARATWYGQPNGAGPDDNGGACGFKHTNQYPFASMTSCGNQPLFKDGKGCGSCYKIRCRKDMSCSGRTETVIITDMNYYPVAPFHFDLSGTAFGRLAKPGLNDRLRHSGIIDIEFTRVPCEFPGLKIGFHVEEYSNPVYFAVLVEYEDGDGDVVQVDLMESRGPGGGKWTKMRE

SEQ ID NO: 278392 - protein, 53 aa, Zea mays
  Clone ID: MRT4577_18546C.1.pep
FFQWPKPQNTNFNIKHFLTVKRNLILFMGAVFKISYPLKLSYQGAILTDSMFC

SEQ ID NO: 278393 - protein, 111 aa, Zea mays
  unsure (1)..(111): unsure at all Xaa locations
  Clone ID: MRT4577_185470C.1.pep
AYIFSEPITSGMHPFAELAEYELYAXLPSIECTVRGSASIMASRDYVIYXDFMNNKVHCXLXMEPTGISKWLHTMTRLMYTPLHDSFDQTQMTTNYXLLKPCYGYVYDTMG

SEQ ID NO: 278394 - protein, 69 aa, Zea mays
  Clone ID: MRT4577_185471C.1.pep
MRNFNLMQSQKSRVLGAMSSSLPILPNPLKGSFSRPHNPQHIPMLRQLPDDSMPLCIDTHQSASLHPRA

SEQ ID NO: 278395 - protein, 102 aa, Zea mays
  unsure (1)..(102): unsure at all Xaa locations
  Clone ID: MRT4577_185472C.1.pep
NTITNFYYRLHNNPPTTATGIFLFLILLALTASATSAHTIPQCSQAXPIASFHIPYXIPLTPPVYENPTVHLYTTEQVIAPGNLPXSPYVLPQPYVLLQPYT

SEQ ID NO: 278396 - protein, 181 aa, Zea mays
  Clone ID: MRT4577_185473C.1.pep
MSKDDLADSLAYNSIKGLILSNALRAQKNVEDESCTIALSNLRSEVSKMKEDKAKYNAQAEAQKSEVEDLQKQLAEAKENCEVAKASQEISEWWKAKLEKNIEELRESKERCFEKFLDCVKNLKNSFAKVGAYSSEENFVRGDSEGIIEWISGEAKAFEEILNDRGDICAFSDARGIAAIL

SEQ ID NO: 278397 - protein, 277 aa, Zea mays
  Clone ID: MRT4577_185474C.1.pep
MAEMTVTVAAAKGTLRTCPGARRAAVLGRWMPLAPAAPANLRLFSPAVRVPRATSPAAVEDGSNTDIVPIPKVIIDQDSDPDATIVEITLGDRLGDLLDTMSALKNLGLNVVKASVCLDSTGKHIKFAITRAFTGRKIDDPELLEAVRLTIINNMIQYHPESSSQLAMGATFGPEAPTEEVDVDIATHIDIYDDGPERSLLVVETADRPGLLVDLVKIISDISINVQSGEFDTEGLLAKAKFHVSYRGRTLTEALQQVLCNSLRYFLRRPTTEDASF

SEQ ID NO: 278398 - protein, 110 aa, Zea mays
  Clone ID: MRT4577_185475C.1.pep
SVVVPRLRSDGIHHDDAASCPVCLEDYAPGQRAREMPCMHRLQRNSIGPRLKRHICCPVCRLHLTATGYRRSCSVRDGVYLNVDPDRDGHDHGRCDGRASCPGNAYLACT

SEQ ID NO: 278399 - protein, 105 aa, Zea mays
  Clone ID: MRT4577_185476C.1.pep
MSSRFWRWYADRQFHKWEKTVLWDMVEPYRPPRSFAPLVGTYVAAFYTGVVGAAVTEQLYKEKYWEDHPGEAVPIMPPKFYWGPWRVMNGEVPRFIQPPDEAKTA

SEQ ID NO: 278400 - protein, 59 aa, Zea mays
  Clone ID: MRT4577_185477C.1.pep
MATHISKNIELRRDLWFYAEFNDMLVGDQLVQYFSSSGVEVCDTPMRTADTSSAQRVTL

SEQ ID NO: 278401 - protein, 159 aa, Zea mays
  unsure (1)..(159): unsure at all Xaa locations
  Clone ID: MRT4577_185478C.1.pep
RAARGNPPTDPEAARDRDHRQRNRTRGAPPEPATKGPKPKGAAKAEAKPEEKSKAAENPAKGTKGKAGKDPNKPNRPPSAPPXPTDEPRKEXKENNPKNKPAAAAAKAAXDRRKPPSQPDKAPHAPKANQPKPQHHKATAAHHKGEXTAAKNAPGQAGT

SEQ ID NO: 278402 - protein, 66 aa, Zea mays
  unsure (1)..(66): unsure at all Xaa locations
  Clone ID: MRT4577_185479C.1.pep
IFQVVKSCICRIYYCCTLKWWVANLLCHGSLGEGQKDVIDVDSMQVHGMLCTXLFDYFQSIWIGGD

SEQ ID NO: 278403 - protein, 113 aa, Zea mays
  unsure (1)..(113): unsure at all Xaa locations
  Clone ID: MRT4577_18547C.1.pep
TLDPWISRGESVLRWGFGQKVYSMLAAQLFLSTGFSDLTGLHPTLNSLLYDYQDFELVLPVLPFILMIPXYHYHHKHPRNFVLLGLFTLCLSFSIDEACANTQGRIDLEALVL

SEQ ID NO: 278404 - protein, 182 aa, Zea mays
  unsure (1)..(182): unsure at all Xaa locations
  Clone ID: MRT4577_185480C.1.pep
RGAGTPAGGGRARGRRSRGGLGFGGTRGPGWAPRGSGPPPGPATAPPRGPXQPPPNERGGRPPQPGLPPXPGVXPRGPTPPGXARRHPPPPXPSGLGPGGASPPGAGNPAIVPXTPGQTKPVCSXPGLNNAPPVKRPGVPPPGXAPPGPRTPPKARPPXPPPKGXPKPGGRRTPIPPPGERA

SEQ ID NO: 278405 - protein, 466 aa, Zea mays
  Clone ID: MRT4577_185481C.1.pep
MLAGYGGGGRSVHLSSHKDLLLGRCGRSFLFGNTWFLLSTYPARLLHTTDRRAPSAFVAAINRVPCVRSHCTGQGLLQRGSIVMAACGYVLRRAELGAAKRQQPDKDPSGGTRASRIAAMGSLGSAARPEVSFRYRGLEHCKKIGASLKCREPWGNRAFWTNATGPGWKLSFTVEPWTKDFSTACAAPYSAGATEDQLPLNEKMNSSTVGMSPVSEKLKLLSGSCYLPHPAKEATGGEDAHFISIDEHVIGVADGVGGWADLGVDAGLYAKELMRNSMSAIKDEPEGTIDPTRVLEKAYISTKARGSSTACIITLKDQGIHAVNLGDSGFVVVRDGRTVLRSPSQQHDFNFTYQLESGGGSDLPSSAQVFHFPVAPGDVIVAGTDGLFDNLYNNEISGVIVEALRVGLEPQIAAQKIAALARQRATDKNRQSPFASAAQEAGYRYYGGKLDDITVVVSYVKSAGAP

SEQ ID NO: 278406 - protein, 56 aa, Zea mays
  Clone ID: MRT4577_185482C.1.pep
WGPSIRGPPITFPDDADLMFYYLGLPNVKQLTIANLNRSLAVVHGPAPKVPVWILL

SEQ ID NO: 278407 - protein, 150 aa, Zea mays
  unsure (1)..(150): unsure at all Xaa locations
  Clone ID: MRT4577_185483C.1.pep
KADGERSPRETTTPRRGPPPGARATTRARTPRGPPRPRATPPRPGAGPPPARPPXGTPRAPPPXPRPPERAPPTTTPTARAAPTRPATGGTTTTRPPGGATTPRPPTTARPRTAGQKSPPSAPPEAGGATGTTRAGRRSPAPPPPSGDSG

SEQ ID NO: 278408 - protein, 217 aa, Zea mays
  Clone ID: MRT4577_185484C.1.pep
AGRFRKKKNTLFISPIMQYNGGSVVAMVGKDCVAIAADKRLGSQFMTVSTDFQKIFKATDKTFIGLPGLATDVLTLADRFRFKTNMYKMREEREIEPKTLAHMVSSTLYERRFGPYFVEPVVAGLGKDNKPFICAMDLIGCINFAKDFVVSGTAGPNLYGMCESLWEPDLEPEDLFETISQALLNAQDRDALSGWGAVVYVITPTEVTVRSLKARQD

SEQ ID NO: 278409 - protein, 60 aa, Zea mays
  Clone ID: MRT4577_185485C.1.pep
TRPGLCLIVWMLDENLCTTCLRFKLSPSMHINIDYCRREILHHMFAIATCSTKCTVFINT

SEQ ID NO: 278410 - protein, 62 aa, Zea mays
  Clone ID: MRT4577_185486C.1.pep
INISLLLSLLLFVLNPFYFISKVLVSHSFSLINILPYNFYIFSIILSLFAYSNNFIHLFLYL

SEQ ID NO: 278411 - protein, 162 aa, Zea mays
  unsure (1)..(162): unsure at all Xaa locations
  Clone ID: MRT4577_185487C.1.pep
MAETAIAAVLSKFGGLAASEAKVLLEVGDDMMLLRDRLEWLQAFLRDADHKRRTGDDRLTRVWVRQMRDVAFEAEDAVDEFFRKVXGRHGLPTLDHMXLKKCLLGSIRKLSGRLEKINSRLHQISENQKEYKVEHTPSATVLTSSTTAXXAWAGWYRNGVGF

SEQ ID NO: 278412 - protein, 67 aa, Zea mays
  Clone ID: MRT4577_185488C.1.pep
NEAGAQLASKSALAGWRLLSVSSSGTDLTTTDGALKEHKWGLYSCSAEYNNIVWALTCTRTRSRNAE

SEQ ID NO: 278413 - protein, 90 aa, Zea mays
  unsure (1)..(90): unsure at all Xaa locations
  Clone ID: MRT4577_185489C.1.pep
DSRVDASLYTRRRNSTGTENQCPTIHGSVDSFPFKAGKXRIRTMCREPTSFTVNGDGSTKNAPPEFQNTKLMRRRIXTLDXIEGPLDVSS

SEQ ID NO: 278414 - protein, 44 aa, Zea mays
  Clone ID: MRT4577_18548C.1.pep
FCPAVSVLAVFGLPSSSLQFFARCASLVLAPINLGGLPEYQCGP

SEQ ID NO: 278415 - protein, 75 aa, Zea mays
  Clone ID: MRT4577_185490C.1.pep
KGINIFFNGKEGIPTILKPQKTSISYPCIMWSSKPIMDCHAMLSDSILSLASQGLGPKLGPLGAPDYRFNPFHYS

SEQ ID NO: 278416 - protein, 142 aa, Zea mays
  Clone ID: MRT4577_185491C.1.pep
QGNSRSASRPSEQANDSKRKAKSQDPGWKFGWWPDPSKKEFVQCIFCMKVVPSGIKRFKQHLAGGFGDTMKCARVPEVVSKDMQAYLKKNTRSALVLDDDESIEGEDDAAAAAPVQSEPSSGTKYKQAKKKVSQAAMSSFVV

SEQ ID NO: 278417 - protein, 85 aa, Zea mays
  Clone ID: MRT4577_185492C.1.pep
FPLRIGSGDKRPSPAPPEPATSSDSSSSWASGSHKRRKRGEAAAANMAMALVPPPSQLNRPAQPWFPAAPVEQAAMAPRVEQLVV

SEQ ID NO: 278418 - protein, 164 aa, Zea mays
  Clone ID: MRT4577_185493C.1.pep
MWGGDDGGTPEVTLETSMGAFTVEMYHKHAPKTCRNFVELARRKYYDNVVFHRIIKDFIVQGGDPSGTGRGGESIYGAKFEDEIRPELKHTGAGILSMANAGPNTNGSQFFITLAPCQSLDGKHTIFGRVCRGMEIVKRLGSIQTDKNDRPINEVKILRTVVKD

SEQ ID NO: 278419 - protein, 277 aa, Zea mays
  unsure (1)..(277): unsure at all Xaa locations
  Clone ID: MRT4577_185494C.1.pep
MLLNPASETSVLDTIRQHLLEEPAAAEARPADESFGSLVADQWSGSLPFRTDDADDMVVFGGLQDAFAYGWLPDGSFGHVKPEPVRSPDSSSXGTPAPTTAQPASASGTRSSXTPGTTTPGRGPEGAPAAKARGKHYRGGRQRPWGKFAAXIRDPARNGARVWLGTYDTAEDAALAYDRAAYRMRGSRALLNFPLRIGSGDKRPSPAPPEPATSSDSSSSSASGSHKRRKRGEAAAANMAMALVPPPSQLNRPAQPWFPAAPVEQAAMAPRVEQIVV

SEQ ID NO: 278420 - protein, 45 aa, Zea mays
  Clone ID: MRT4577_185495C.1.pep
STLTHLTIISIHALHQNIPPFHTLLHLITHISLILHCINSNLRLT

SEQ ID NO: 278421 - protein, 126 aa, Zea mays
  Clone ID: MRT4577_185496C.1.pep
HVCHYNRSACTKELVRLAQTDIQEIIKHVLKQQAVRQSWDGRDRLACLVLGHSHRRFEEVVISQSSSAWLDKEYNSGRTSPFKLYEDRSVRQDPFVAGHPSSPLGRSKQRHEAANYDGQAPHNPMQ

SEQ ID NO: 278422 - protein, 60 aa, Zea mays
  Clone ID: MRT4577_185497C.1.pep
NSSTLQNTNFILLPYEQNILLVFKTTAHHIRRTYLIIFNIYTHRGTTHITYPSTIIIQCD

SEQ ID NO: 278423 - protein, 31 aa, Zea mays
  Clone ID: MRT4577_185498C.1.pep
GFVGHQGFFPEVKKKPLIVQKKEILGGFCPP

SEQ ID NO: 278424 - protein, 54 aa, Zea mays
  Clone ID: MRT4577_185499C.1.pep
YYNFITKYLNFPTVTNNLTVKYLITFPLTSSLTTNTSTISYNTPITTTTQYNPR

SEQ ID NO: 278425 - protein, 67 aa, Zea mays
  Clone ID: MRT4577_18549C.1.pep
MTKRGVQRHIGEDFAEDLQDGLLTSKVYFLIKSLMGYRHMQDLRCIVFVERVITSIVLEALLSTIIK

SEQ ID NO: 278426 - protein, 43 aa, Zea mays
  Clone ID: MRT4577_1854C.1.pep
CVFCFTLYMACACCSWRRISSATGLSIRDHEHECGLESVCWRS

SEQ ID NO: 278427 - protein, 54 aa, Zea mays
  unsure (1)..(54): unsure at all Xaa locations
  Clone ID: MRT4577_185500C.1.pep
HIFASPTYXFLDTKYXNWAWGPFXIHNVAFKITVXGGYLTVNTLVAVVLPFLGD

SEQ ID NO: 278428 - protein, 316 aa, Zea mays
  unsure (1)..(316): unsure at all Xaa locations
  Clone ID: MRT4577_185501C.1.pep
KFDNRLKEFTERWEVDAFLSASGYLGDNIHPFFVALPKDRGTISNEEFRRQICHVDIDVLRHLRDNVKGGFNEEKYGSHIGFSCLRKYLESELQKRYKEAAPATLALLEQRCTEVSMNLTRLDSKLQAASDVSQLRRSAMLHAASICTNLNALLDGAADPAPEIWGKTTEEEQIHSGIGSWPGINMPVKPANSSLKLXGGAAFEXRVMHEXFRCATYXIXECPQVSREXKVANILLAHAGRRGTVGXTXAAVAIARAAARSWLAPLIDTACDRLAFVLKIWFDLAMERNRNNDSQYHQNXEDMDKXMLGFLAALRC

SEQ ID NO: 278429 - protein, 93 aa, Zea mays
  Clone ID: MRT4577_185502C.1.pep
ANDLGKNTTHPTCIIRGYRLAMREACKYVEEKLAGKVDKLGKDSLMNSAKTSMSSKLINSDSDFFATLVCEAVQAAKITNAKGEVKYPIKPSL

SEQ ID NO: 278430 - protein, 98 aa, Zea mays
  Clone ID: MRT4577_185503C.1.pep
PGSRQNPSAAAANPARPHHDRAEPPYPGKTSQIYAIRQAVAKGLVAYYQKYVDEAAKKEIKDIFTRYDRTLLVADPRRCEPKKFGGRGARARFQKSYR

SEQ ID NO: 278431 - protein, 136 aa, Zea mays
  Clone ID: MRT4577_185504C.1.pep
AALPRKKTAVAVAYTKPGRGLIKVNGVPIELIRPEMLRLKAFEPILLAGRSRFKDIDMRIRVRGGGKTSQIYAIRQAVAKGLVAYYQKYVDEAAKKEIKDIFTRYDRTLLVADPRRCEPKKFGGRGARPRFQKSYR

SEQ ID NO: 278432 - protein, 137 aa, Zea mays
  Clone ID: MRT4577_185505C.1.pep
MTVLSRPTPGTAQCFGRKKTAVAVAYTKPGRGLIKVNGVPIELIRPEMLRLKAFEPILLAGRSRFKDIDMRIRVRGGGKTSQIYAIRQKYVDEAAKKEIKDIFTRYDRTLLVADPRRCEPKKFGGRGARARFQKSYR

SEQ ID NO: 278433 - protein, 148 aa, Zea mays
  Clone ID: MRT4577_185506C.1.pep
MTVLSRPTPGTAQCFGRKKTAVAVAYTKPGRGLIKVNGVPIELIRPEMLRLKAFEPILLAGRSRFKDIDMRIRVRGGGKTSQIYAIRQAVAKGLVAYYQKYVDEAAKKEIKDIFTRYDRTLLVADPRRCEPKKFGGRGARARFQKSYR

SEQ ID NO: 278434 - protein, 51 aa, Zea mays
  Clone ID: MRT4577_185507C.1.pep
ANIEELQYSLMDGMITPTSEIDLEFIILAYYNHYESKSATLEFIMDRPCMI

SEQ ID NO: 278435 - protein, 148 aa, Zea mays; identical to SEQ ID NO: 278433
  Clone ID: MRT4577_185508C.1.pep

SEQ ID NO: 278436 - protein, 45 aa, Zea mays
  Clone ID: MRT4577_185509C.1.pep
IGGLFSISSRPYMLCSRFSCLPSTLQTFMYNNSHRDKPSFGLSIC

SEQ ID NO: 278437 - protein, 117 aa, Zea mays
  Clone ID: MRT4577_18550C.1.pep
FKIDNKSELGFDGCLLQLTQQEYIPLLSGTVLLPPVTVVIPEAKVSAKPKTHHGTGHSSSSTSSTKKNQPCKYFLKGNCKRGNDCWYLHPSVPSSNGNSHSKSKIAVPQKTDGRSQK

SEQ ID NO: 278438 - protein, 93 aa, Zea mays
  Clone ID: MRT4577_185510C.1.pep
WNTQSVHIFFFFFSLPLLVLTNLYKNKPIFFQYLLSPICLFFFHFFFSGVLQNQIIPEKYFIFSPPGSLPKHPISNISFFFSKTQKIYVSIFY

SEQ ID NO: 278439 - protein, 56 aa, Zea mays
  unsure (1)..(56): unsure at all Xaa locations
  Clone ID: MRT4577_185511C.1.pep
FXFFFFFFFXGRSVQTSMKFWLNIFGTEWNSPEFSSRTKNCPKFHTLPNRNKIVLV

SEQ ID NO: 278440 - protein, 174 aa, Zea mays
  unsure (1)..(174): unsure at all Xaa locations
  Clone ID: MRT4577_185512C.1.pep
AEGAEHRQAVGPGARGGQERDDARDQAQSLRLLAAQAAPPLVTSSVTDSDCSLASSPVDPFFDPVTSADNRRRCKFSPATPPAAPRQQQQRQPGAGLGSAADAALEMLAAKRPLPHRGRLLAAVMEAGPLLXNLLVAGPLPRWRYPPTVRAPDTLPLGASRAGYACVAVPLAVS

SEQ ID NO: 278441 - protein, 70 aa, Zea mays
  unsure (1)..(70): unsure at all Xaa locations
  Clone ID: MRT4577_185513C.1.pep
ARTYELQTRPGTVYIVYITQSRGGCTRYGDQVKTLPVPXVVLAXEXTSRIXGLRPLGVAWGSGWIPCLGA

SEQ ID NO: 278442 - protein, 83 aa, Zea mays
  unsure (1)..(83): unsure at all Xaa locations
  Clone ID: MRT4577_185514C.1.pep
LAVLIPYPPPCPILQLQHLCARDATLRGRLCLLSHAPPTSSGSCARCAFSPRXLNPELRRLSRMPPPMXGDASSVRCSSFPAH

SEQ ID NO: 278443 - protein, 126 aa, Zea mays
  unsure (1)..(126): unsure at all Xaa locations
  Clone ID: MRT4577_185515C.1.pep
MPFEHICSSTGDAIAEFCDVHTADSRKTLEAHLIGKTYVSGDSITNDDINVFAVEPSKPDAEFPNAARWYETDSAAAASRVPGKAXGVNLPAGSAPAASAPADEADDDDDHDLFGDETDEDTKASD

SEQ ID NO: 278444 - protein, 754 aa, Zea mays
  unsure (1)..(754): unsure at all Xaa locations
  Clone ID: MRT4577_185516C.1.pep
MLSHKRFSFSDAGRTPIFVTFVGGEHPPGEGMASRMTPSKRPFQRRSSDYDGRGKWQKTKHPSPHKSQFKIEPGVPIFHILCPASQSGNVNGKGGAIIVXIREEPMRYVKVIGGVGVCNGRLYRLTCFTKVGDLEPDLCGESAHGTTAPTGGDQARGYECGWNXGSTGMXRAHASEYQQEFHRFPNSLRYLTQRPSGNTPLMPLAHANSDSVRLKMQQVLVLDQQLLMQEREESLGCESXKLGETDRVIPLALKAVSLVFDRIFATEGNNETGNASAASAPVSLRMLVLYSQAGWLLGKGGSVVKQMAADNGCEIRVLKDNLPSCALLNDKLCQITGEIDSVRKGLNAVSEVLLAHPPKETDAVADVHSSGSSSRSLFSQPDGLPSGMQSNFHIPLQGPPSQANGPFDIVDLQPPIHGHASVAIESLSFRMLCPQDKVGSIIGKGGNIVKTIQNDTGCEIKVLDTVPKTDDRIISISGPAHPSDGISPAQNAILHVQRKIMLPSSDKKEGPATCRLIVSGNQVGCVLGKGGSIIAEMRKLSGAFIVVLSKDKIPRGVPEHDEVIQINGSCEAIQEALMQVTARLRNHLFRDRMPAVGPNMRPPFGLLDPQFGPFSGNHESSSLFHKDFMGRPLDGIAAPWTVKGMRDLSDPVSISDIPGAGHREAGGFPGPGQPSMMPNLTAEVLVPRLVIPVLCGEDGGCLDRIREFSEAKITVAEPTADAMDTAVLISGTPEQMHAARSLVEAFVMSESFGP

SEQ ID NO: 278445 - protein, 208 aa, Zea mays
  Clone ID: MRT4577_185517C.1.pep
VKSNKRYAGASNWTVKEVVESARNDFGSIDILVHSLANGPEVTKPLLETSRRGYLAAISASSYSYVSLLQHFLPIMNPGGASISLTYIASERAIPGYGGGMSSAKAALESDTRVLAFEAGRKGKIRVNTISAGPLGSRAAKAIGFIEKMIEYSYVNAPLQKELLADEVGNTAAFLVSSLASAITGSTVYVDNGLNTMGLAIDSPTITS

SEQ ID NO: 278446 - protein, 51 aa, Zea mays
  unsure (1)..(51): unsure at all Xaa locations
  Clone ID: MRT4577_185518C.1.pep
HQLITFNHQNGWPSLNYXXFKHXLXNLLPXFXXHPTQPNTXLLFLPIHTNL

SEQ ID NO: 278447 - protein, 55 aa, Zea mays
  Clone ID: MRT4577_185519C.1.pep
LGWGSYARVSAILWRMVLRHRKLVPCPPRLCFSRLDAAVVLLVNTVTGALFRSPR

SEQ ID NO: 278448 - protein, 156 aa, Zea mays
  Clone ID: MRT4577_18551C.1.pep
MPKNKGKGGKNHRRGTKENDDQRRELTFKEDGQEYAQVIKMLGNGRLEALCFDGSKRLANIRGKMRKKVWINQGDIILLSLRDFQDNKGDVILKYTADEARTLKSYGELPENAKINETDSFGQGEDGEAYFEFGDADSDESDDGAAGKKEVDIDDI

SEQ ID NO: 278449 - protein, 184 aa, Zea mays
  unsure (1)..(184): unsure at all Xaa locations
  Clone ID: MRT4577_185520C.1.pep
GSKVHHRHGSQVCLALIALLALCASATXATHIPGHLPPVMPLGTMNPCMQYCGGQQGLASLMACPSLMLHXMLALPLQTMPVMMPQMRTANMMSPLMXMPSMMSPMVLPSMMSQMMMPCRMLLPQCHCDAGSQXIMLLHXLPFMFNPVAMTIPPMFLQXPFVGAAFSVATICVVSNNELTCHRV

SEQ ID NO: 278450 - protein, 56 aa, Zea mays
  Clone ID: MRT4577_185521C.1.pep
EGVIDGASIIPLEPVPERVKPRSTSEERSRDPQRFFPPDVPDDEKSWSKSCILGEC

SEQ ID NO: 278451 - protein, 107 aa, Zea mays
  Clone ID: MRT4577_185522C.1.pep
MASHLSAAVPRFHGLRCYSAPRSAVAALPSVRVGRKRSSSHGIRCDYICSATNLIMVTTTTLMLFAGRFGLAPSANRKATAVLKLDARDSGLQTGDPAGFTLADTLA

SEQ ID NO: 278452 - protein, 107 aa, Zea mays
  unsure (1)..(107): unsure at all Xaa locations
  Clone ID: MRT4577_185523C.1.pep
MASQLSAAVPRFHGLRGYAAPRSVVAALAFVRVGRKRSSSQGIRCDYIGFATNXIIVTTTTLMLFAGRVGLAPSVNRMATAGLKLEARDSSLXYGDPVGLPXRDTLA

SEQ ID NO: 278453 - protein, 89 aa, Zea mays
  Clone ID: MRT4577_185524C.1.pep
MASQLSAAVPRFHGLRCYTAPRSAVAAMPSVRVGRTRSSSEGIRCDYIGSATNLIMVTTTTLMLFAGRFALAPSANRTATDGLKLEARD

SEQ ID NO: 278454 - protein, 114 aa, Zea mays
  Clone ID: MRT4577_185525C.1.pep
MASQLSAAVPRFHGLRSYSASRTAKTALPSARVGRKRSSSQGIRCDYIGSATNLIMVTTTTLMLFAGRFGLAPSANRMVTAPLKLEARDSGLQTGDPVGFTIFDILGWGAVRMI

SEQ ID NO: 278455 - protein, 115 aa, Zea mays
  Clone ID: MRT4577_185526C.1.pep
PVHGIYRVGAQDWATRLLGSAYRRIAGSAWPHAQKPMPKVACGGRGTSTGEHTHRWLVIIRGHIILRNVSANKRDMPSSITSEESIIRMFIQGWTIEVLATHAAVAALVFVAYMY

SEQ ID NO: 278456 - protein, 106 aa, Zea mays
  Clone ID: MRT4577_185527C.1.pep
MASQLSAAAPRIHGLRGYAAPRSAVAALPSVRVGRKRSSSQGIRCDYIGSATNLIMVTTTTLMLFAGRIGLAPSANRKATAGLKLEARGLGLQTGDPAGFTLAHTL

SEQ ID NO: 278457 - protein, 91 aa, Zea mays
  unsure (1)..(91): unsure at all Xaa locations
  Clone ID: MRT4577_185528C.1.pep
LSQLSAQLVPRIHGLRGYAASSSAVAALPSVRVGRKRSTSQGIRCDYIGSATNLIMVTTTTXLMLFAXRLGLHPSVNRKGTLALKLLPRHS

SEQ ID NO: 278458 - protein, 187 aa, Zea mays
  Clone ID: MRT4577_185529C.1.pep
YVSSEFVSRLKKMALRVIAESLSEEEIAGLKEMFKMIDSDNSGHITLEELKTGLQRVGANLMDSEINALMEAADIDNSGTIDYGEFIAATLHINKVEKEDKLFAAFSYFDKDGSGYITQDELQKACEEFGLGDTRLEDIIGDIDQDNDGRIDYNEFVAMMQKGDNPLGRKGHQSNASFGLGDALKLR

SEQ ID NO: 278459 - protein, 67 aa, Zea mays
  unsure (1)..(67): unsure at all Xaa locations
  Clone ID: MRT4577_18552C.1.pep
MASPELSRXENVSMAKLAEQAERYEEMVEFMEKVPKXTVDSEELTVVERTLLSVAYKIVLGARRASW

SEQ ID NO: 278460 - protein, 153 aa, Zea mays
  Clone ID: MRT4577_185530C.1.pep
TYQSSCSCSAGYCLSHTQLNALQMKQAACRCRAGAATSAVILLYLLLLLNSSATAAVVVVASSSSAAAAAQRAGGSDSNPAVAAASQGWAQRRATTSSRRLLRPAGAATMATNTFDVKSHRTTASPTATTKPGVEFNGSTKSAPTSRYNPRQN

SEQ ID NO: 278461 - protein, 166 aa, Zea mays
  Clone ID: MRT4577_185531C.1.pep
MASQLSAAVPRFHGLRGYAAPRSAVAALPSVRVGRKRSSSQGIRCDYIGSATNLVGIYICIHVKSDEYVRKRPTIISLTTAYVRTQIMVTTTTLMLFAGRFGLAPSANRKATAGLKLEARDSGLQTGDPAGFTLADTLACGAVGHILGVGIVLGLKNTGALDQIIG

SEQ ID NO: 278462 - protein, 83 aa, Zea mays
  Clone ID: MRT4577_185532C.1.pep
MASQLSGAVPRFHGLRGYAAPRSAEAALPSVRVVRTRSSSHGIRCDYIGSATNLIMVTTTTLMLFAGQFGLAPSENRKATAVL

SEQ ID NO: 278463 - protein, 48 aa, Zea mays
  Clone ID: MRT4577_185533C.1.pep
MATHAALAASRIPAGARLHSRAAASSRHGVQRLDFRNFSEVTCWAIFG

SEQ ID NO: 278464 - protein, 107 aa, Zea mays
  Clone ID: MRT4577_185534C.1.pep
MGWELSAGVPRFHGLRGYAVPRSAVAALSSVRVGRKRSSSQGIRCDYIGFATNLIMVTTTTLMLFAGRFGLAPSANHKVTAVLKLEARDSGLQTGDPAGITLVDTLD

SEQ ID NO: 278465 - protein, 41 aa, Zea mays
  Clone ID: MRT4577_185535C.1.pep
MAATARSPLLSLLAPHAAAVLRYYEQHQQQAFRDVRGGRAL

SEQ ID NO: 278466 - protein, 120 aa, Zea mays
  unsure (1)..(120): unsure at all Xaa locations
  Clone ID: MRT4577_185536C.1.pep
NIPLSPLLCQQSPALXLGGGIXVQTIMSQHLQQLLLPVINQVSMANLSTYSSXQQFLSFNQLSTLNPAAYXHQQLLPFNQLASAYSQQQQLFPFNQLGALNXPAYFSQXYLLPFIQIATI

SEQ ID NO: 278467 - protein, 62 aa, Zea mays
  Clone ID: MRT4577_185537C.1.pep
SRNLQKKPMNEIILFMHLNLPKNPCYFSSRLYATATQSHTHTHALVTLSLTRVLDRLRRPGR

SEQ ID NO: 278468 - protein, 81 aa, Zea mays
  Clone ID: MRT4577_185538C.1.pep
YSTKAMRRAPQNKQPLWPSRTHKHWVNKIACVVPPFNGPLRLVDDSTRSRATPAPGLTVRVSPGTIRHTVASSTSQRLFMN

SEQ ID NO: 278469 - protein, 97 aa, Zea mays
  Clone ID: MRT4577_185539C.1.pep
VRPTRPRTRGKKNNQKKNLKILKRKKKKREKGNIIILKKTTTMVHGRSLLNIPVCSAYSPAFFTMGHPKFLYWSDVFHPVAVHPPLSPIITTGPPPP

SEQ ID NO: 278470 - protein, 78 aa, Zea mays
  unsure (1)..(78): unsure at all Xaa locations
  Clone ID: MRT4577_18553C.1.pep
GRRPRGRSCRAPGPSCRGSSPLPRCGXRGXPCGAGAVLRGFRSRAGPPAGASRPARGLALAVASLFIVSCPXGVLSLL

SEQ ID NO: 278471 - protein, 61 aa, Zea mays
  Clone ID: MRT4577_185540C.1.pep
GHLFPTADAGLPTDQNGAWALMRRLLPKSWACAVGCWNISWYVGIPTDTRRTGSMIISLAC

SEQ ID NO: 278472 - protein, 95 aa, Zea mays
  Clone ID: MRT4577_185541C.1.pep
RPGSPSSKLLFFPHPLLGRGLGFSRDPDSAEFEMIENMHSHSMPTRDQEGPTHTIRFRLYCRRTRRPRRAGTTPAYHPVERPSSARTESKTLLMP

SEQ ID NO: 278473 - protein, 202 aa, Zea mays
  Clone ID: MRT4577_185542C.1.pep
ESTAAALEWTMANLVKSPDLQQKLRLEANAMACGKRVIEEEDLARMPYLRAVVLESLRRHPPVPFVIRRVDGDDAKKVIGVSRLPDGGATVNFLVGKIGRDPAAWSDPMSFKPERFMPAGEGDGTDLTCTTELKMMPFGAGRRVCPGLATAMLHLKYFVANLLTEFEWWEAEDDKVDLTEFRGFFFTVMNRPLQARLVPTDA

SEQ ID NO: 278474 - protein, 44 aa, Zea mays
  Clone ID: MRT4577_185543C.1.pep
WYCAIPSNPLVCLQQHPLYPLFTDSSKKITSFSLAASSILKYLY

SEQ ID NO: 278475 - protein, 58 aa, Zea mays
  Clone ID: MRT4577_185544C.1.pep
TRTPPIWLKHTLPREVEEMSTKAATNGQIPTHIDLLLRDQHGIPVVQSRTGGRILTFL

SEQ ID NO: 278476 - protein, 120 aa, Zea mays
  unsure (1)..(120): unsure at all Xaa locations
  Clone ID: MRT4577_185545C.1.pep
PRVHIYTIMFIXKFFDYFTGNINGFSVNYQALRLNNIFLLFSIIYNTSFKLFTTILYIFIHNSLIITQLNFSIIHIKTKIIQINESPKTLHVHTIFNTNTILYTLTFYLLLSYYIANSIL

SEQ ID NO: 278477 - protein, 46 aa, Zea mays
  Clone ID: MRT4577_185546C.1.pep
EVGLGTVPTVSFGYRQLSVCNSLVIYTRKGSALSGAIPAQLKIAYG

SEQ ID NO: 278478 - protein, 43 aa, Zea mays
  Clone ID: MRT4577_185547C.1.pep
LRQTVSLILKYLRVSPIQSLGAAMTIVQQQQQRLFNLKVQSST

SEQ ID NO: 278479 - protein, 458 aa, Zea mays
  unsure (1)..(458): unsure at all Xaa locations
  Clone ID: MRT4577_185548C.1.pep
MASSFSFPLMNPADIAEALHSYCIAPSPGLRAEHIVTPQPGLVAEVLALFLANFVGDDEPDEQLEFQALQAIDNPEHHMRAIALSRLYRRANAFLHSIXLPGPXTLRDLLRADGRRVVYILSAIINFLHYRQDKLSFLEPIVQEYSPLQERHTELRAKIAELRNAKEDHLLKEQMEAPVVQQLEKEVNALKQRLREYNKEQLSLRVATKAIDEKKQELLGKMNQADFELVKVMQEKERLSAKIVHSPEKLLRTLEEKKAVRDELRNSEKVAMQKVQEKTNTLETYTKVSEKLVKHLSKISAVHEKGTVAKASEKDVKAHKEKIGDQNLEIKALRNKAAEWQLKVLENEGILNAKEKERDQRVAENNLKMNALKSEVESEHKCHAEKEIKIKEKLEKVAELCSQADSVAEAGNKKIQEICGKYNQVCEAANMYMDGIDRSFEEIDEAAVSLKAIGQSGA

SEQ ID NO: 278480 - protein, 104 aa, Zea mays
  Clone ID: MRT4577_185549C.1.pep
AGGATGGAKSQGGPPRGPLSGRSPPSGPRRPRRPGPPRIPGRRRLEAAPQTPGFSREDPNTLGNGNPRRPKPGLSTEGAGPVGAGAESPRLGGAAGETKMGGVA

SEQ ID NO: 278481 - protein, 70 aa, Zea mays
  unsure (1)..(70): unsure at all Xaa locations
  Clone ID: MRT4577_18554C.1.pep
MKMVIVLVVCLALTAANASVMQMPCPCAGLQGXYGAGSCLTTMMGAGRLKIYSXSRRXQAQLMPMAAEPY

SEQ ID NO: 278482 - protein, 96 aa, Zea mays
  unsure (1)..(96): unsure at all Xaa locations
  Clone ID: MRT4577_185550C.1.pep
XKRAMFRSEIEKLRAGKSSQPLRDRDAERGKAKSSTRRPGSFPPLLSAPAYLGRPRLRPLPPPHDEHFSRRRRRFAFAAYCCRRRGRAGDRDGGGR

SEQ ID NO: 278483 - protein, 150 aa, Zea mays
  Clone ID: MRT4577_185551C.1.pep
SGYSLTSVGLGLCWVSPRFFPVLEWFGQVRVPKRSPSPCLVLLPRRLGWVPFLFPIQGLGVVGSFFPRHVVRGPFSLPLLGRSAGFPVLFPGPLGVFFPFPSRYFFPLGLPGVFALPGWSPVIAWGFPVPRATRARGYPSGGFGYWPLAI

SEQ ID NO: 278484 - protein, 145 aa, Zea mays
  Clone ID: MRT4577_185552C.1.pep
RLSLSSRLGLWRRRRRFPPSSRRLLSPDLDATAAVVIRPPLLLRPFLWCKVCPALASGSSALKGPSLPLRLWSGVPRRLVRQPQLRRHPGRISSQLIPLDLVRGNDAIPAESRQRSWSLWISSAHGTAALSHDLKRIRSLWIFTF

SEQ ID NO: 278485 - protein, 133 aa, Zea mays
  Clone ID: MRT4577_185553C.1.pep
IRLETCFRTFVSALVFVFRQRGMPKLVSGWTYRDVQVNDILLNDYLVENATKHAMYLPHTEGRYSKKRFRTAQCPIDERLINFLRMHGRNNGKKVMAVRIIKHTLEIIHLLTDANLIQVVVDAIINSGPREDA

SEQ ID NO: 278486 - protein, 180 aa, Zea mays
  unsure (1)..(180): unsure at all Xaa locations
  Clone ID: MRT4577_185554C.1.pep
VPLPLQFLQPLRRCYAGHRNHVSLNQYVAVNXTKHVMHLPHTVGHYSKNRLQKVQCXIVERLTNYLMMHGHNNGKKVMVVRIIKHTLEIIHLLTDDNPIQVVVDAIINSGPREDATRIGSAGVVRRQGEXISPRRRVXQIIYLLTTXARDSAFRNIKTIAECLADELINAAKSSSNSYAI

SEQ ID NO: 278487 - protein, 193 aa, Zea mays
  unsure (1)..(193): unsure at all Xaa locations
  Clone ID: MRT4577_185555C.1.pep
RLRQPWNRFSWTFDDVQVNDILLNDYLAVXATKHAMYLPHTEGRYSKKRLRKAQCPIDERLTNFLMMHGRNNGKKVMAVRIIKHTLEIIHLLTDANPIQVDGDAIINSGPREDATRIGSAGVVRRHAVDISPLRRVNHAMYLLTTGASESAFRNIKTIAECLADELINAAKGSSNSYAIKKKDEIERVAKANR

SEQ ID NO: 278488 - protein, 158 aa, Zea mays
  unsure (1)..(158): unsure at all Xaa locations
  Clone ID: MRT4577_185556C.1.pep
ANRHTKRPRGAAERHESTTSREQGRRARAAGGEAGGRSTRRRTAKREPQSRRDGHDRPKEPGPSPKQTPPDRTGENAGDDGRDTAGRXGDPETYTRNREREENHSRXATQGAGRCETPETPGKNGDKNGEAERAKAGAETGTQGGLDYLREPNLVHAQ

SEQ ID NO: 278489 - protein, 209 aa, Zea mays
  Clone ID: MRT4577_185557C.1.pep
RADAVPSPLAVAPAVAPRQLCRAPRPCSQRRLLLLLLTLVAGEGRTVRRRHGHRRRGQCHRREPTGRRAAQRAGKEVVAVPGYGRPRHGQRAECAQLVGPTPQPLKRLCQPPAIHAASTSTVSYIVPLVACFLAAQCGLVFRLQRIELRIRVNVADFGLAGLPFRAFVNTNSLAVYTMPCVYKFPEKKKKAQFTTVSRFYDGSILYVCM

SEQ ID NO: 278490 - protein, 92 aa, Zea mays
  Clone ID: MRT4577_185558C.1.pep
KVLVSAWLTLGASAGRFFTLPSPTRGFPQPLKSLPGFVFGCLALVQGPGTSPGVFAICQNFFKPAFFFFSPGIQNMFPQKGVIGFFGSFKLI

SEQ ID NO: 278491 - protein, 74 aa, Zea mays
  Clone ID: MRT4577_185559C.1.pep
NLCPFVPHELHPSTVFFIFVLCAAHQRLYARGAPQSIVRGSPFSRGPVCASQTHPCVFHFIVRTIRHVRVCMSV

SEQ ID NO: 278492 - protein, 69 aa, Zea mays
  Clone ID: MRT4577_18555C.1.pep
GTHTGQFFYFETAGLKRFFFLYNPVNQAFGAFFSPKNGSLMKNTYKTPRFFMQSAHPIIGVPGLLQREF

SEQ ID NO: 278493 - protein, 59 aa, Zea mays
  Clone ID: MRT4577_185560C.1.pep
QQPEHLLFILYMIFANLLMLYPTPIAHQRNNISSMSCKLLLKLYLLTLILNTFNLYTFN

SEQ ID NO: 278494 - protein, 173 aa, Zea mays
  Clone ID: MRT4577_185561C.1.pep
MGNCQAAEVATVLLQHPGGRVERLYWSTSAAEVMRANPGHYVALVTLRVAEDRQDAPGGQRRTVRLTRVKLLKPKETLLLGHVYRLITTQEVTKAVQARKQDKQRKAQQQLLEPRQGQGVASGAAAEEEDDDDEAALDASLDQLARQDNGSRSSSARHRQWRPSLQSIDEATT

SEQ ID NO: 278495 - protein, 169 aa, Zea mays
  unsure (1)..(169): unsure at all Xaa locations
  Clone ID: MRT4577_185562C.1.pep
MGNCQAAEAATVLLQHPGGRVERLYWSTSAAEVMRANPGHYVALVTLRVAEERQDAPGGERRTVRLTRVKLLKPKEALLLGHVYRLITTQEVARXVRARKEEKQRKAQQLLESRQGVARGAAEGEDDDDEAALDASLDQLARQDNSSRSSSAGQRQWRPSLQSIEEATT

SEQ ID NO: 278496 - protein, 69 aa, Zea mays
  Clone ID: MRT4577_185563C.1.pep
GSIRTSPTPIISPSAKTERSIIIIMAMPPQLSCIASIDSFSLLYLSTIEGAGHACISLYVTKEAGSSPA

SEQ ID NO: 278497 - protein, 52 aa, Zea mays
  unsure (1)..(52): unsure at all Xaa locations
  Clone ID: MRT4577_185564C.1.pep
DSXAQSRTHGARAQPALDLPAAEHARPPYLSSPLTSMVPTGIPTSSSITRTL

SEQ ID NO: 278498 - protein, 167 aa, Zea mays
  unsure (1)..(167): unsure at all Xaa locations
  Clone ID: MRT4577_185565C.1.pep
SRSWCRXRXPRGGRXGPGXRXXXCARGPXXXLVPGWRSLLPLAXXSPSXXXXXLSPSGSXXVFPFFPSXXFPFPPRSSXRPXAGSRCFXRFSGASXPXVXXXXXXPPFFRXXFFLCFAPXPAPPFXLSAAGXXXXSRAXLGSLSSVPGXXRXXPVXPPCCSAPXXRL

SEQ ID NO: 278499 - protein, 106 aa, Zea mays
  Clone ID: MRT4577_185566C.1.pep
LGFCGGFLMAYERGANRFLGWTENEREQKRQHEEFAQVARSGRPIWGESTIQPWIQTVAHHNSQFAHLKFSTIPWFNFVNHQNHGVDVSQYYNDAKVWRQENGLEN

SEQ ID NO: 278500 - protein, 74 aa, Zea mays
  unsure (1)..(74): unsure at all Xaa locations
  Clone ID: MRT4577_185567C.1.pep
VARGGGRRIGAGVVALACTSAVXVVVTTIGARGAGLCGECTAGVYDSRPLPRVHGSLLQVLSVDHGAHVCSLSW

SEQ ID NO: 278501 - protein, 124 aa, Zea mays
  Clone ID: MRT4577_185568C.1.pep
PCTMGRARNAPHPPLILAQIRNCVTAIHGSPKSTQGRHAQIRSLGHGRNHPWKESAQNPSLTIGPFHPRRHPSMDGDPCHRRCPPSVMPYIKVMSANLPLQMGAEPSSSPPGMTSQSVASLLPG

SEQ ID NO: 278502 - protein, 132 aa, Zea mays
  unsure (1)..(132): unsure at all Xaa locations
  Clone ID: MRT4577_185569C.1.pep
MEAPAAPPPSYDGGGGGGYVLVDLSLTLGPTATPHPASSSSPEPDHTPAAAAAGSSSAGVRLFPCLFCNKKFLKSQALGGHQNAHKKERSVGWNAHLYLPPPAADTASASVAGGAAXLVPRRRPSAAATRCR

SEQ ID NO: 278503 - protein, 110 aa, Zea mays
  unsure (1)..(110): unsure at all Xaa locations
  Clone ID: MRT4577_18556C.1.pep
AGPTLPPPSLNPSAFSSLGEPPPQKKDLXKQERPPPPPFPXPPPPXPKFPTTSSLPPPFPPLIFIPFYTINIPPPPPXPKSNFLPKVPXPCYPKKPPPPPINFPQNPSLF

SEQ ID NO: 278504 - protein, 164 aa, Zea mays
  unsure (1)..(164): unsure at all Xaa locations
  Clone ID: MRT4577_185570C.1.pep
MPTATATATAAPRHAAVFLPLLLLLLGLHATSDADARSRVAXTPSSRPPSRSPMPNKPRVKPPGPGAARPIFPGFGIPGMGNFGIPGKRVSWWRDDYKGPAVEYAXGGEVDPTVTRSEKGPCYGKKVPCPKNCFSSYSGAFKEYGAXCGGGRCTVDCKVQCTDY

SEQ ID NO: 278505 - protein, 126 aa, Zea mays
  Clone ID: MRT4577_185571C.1.pep
MIYAPESSMYQVDDRETKPNCLQSNRSHGSLNNLSNSVLELKNADSYSTSNYSAKDAMFTQCSPRHDLRCFNAFSAKFIKKSSLSDLVSRGSMSRKFKTSTASDDWSDVSSRWAKDSQVDFLERFE

SEQ ID NO: 278506 - protein, 71 aa, Zea mays
  Clone ID: MRT4577_185572C.1.pep
ALSRKKKKEKGKKKKKKKKKKKRGNQYKENQSLQLQNYYNVVFFFIGNWFSVFVPPVFYVVGVGTHKFLPP

SEQ ID NO: 278507 - protein, 108 aa, Zea mays
  unsure (1)..(108): unsure at all Xaa locations
  Clone ID: MRT4577_185573C.1.pep
AEQTRGSXXESRPXRPPGRGQPPGARAPAPPHTGTPPPPHPRAAPSRPADRRPGNREPPRHARPSASRARDRPQQEEEEEEEDARTGEETGDKAGPPRDPHAEGARTP

SEQ ID NO: 278508 - protein, 213 aa, Zea mays
  unsure (1)..(213): unsure at all Xaa locations
  Clone ID: MRT4577_185574C.1.pep
RPPCHDLALLCPSPRRHRPARSPASSHCPPPPMTSRRRAAGSRGRHRPARSPASSHCPPPPMTSRRRAAGSRGRHRLAPSPTSTLILSSVPPPMTKRKRAAGRGLHRSARRAVPSSXLLRRRRRXSSLRSXPEEASAAQRGLDLLRRGQDPHRARRRAPGVRAAAGLSVRSPGRHPPPGRSEAGKPHSRRRRQEGAQPHGQVQEGDRLRWPER

SEQ ID NO: 278509 - protein, 102 aa, Zea mays
  unsure (1)..(102): unsure at all Xaa locations
  Clone ID: MRT4577_185575C.1.pep
EKKKKKKKKKKKKKKKKKKKKKKEGAAPPRXGXGXGXGGPPPPPPXXXGKXEATXXAXXXXXPGPRGGEKPGNSDFEIRLCXSMYHXTIVEILPQTEGXKKG

SEQ ID NO: 278510 - protein, 63 aa, Zea mays
  unsure (1)..(63): unsure at all Xaa locations
  Clone ID: MRT4577_185576C.1.pep
KKKKKKKNIKKKKKKKKKKKKKKKKKKKKKKKKKKKKKKKRKKKKKEKXKKKKKKLTTTDKKN

SEQ ID NO: 278511 - protein, 37 aa, Zea mays
  Clone ID: MRT4577_185577C.1.pep
LAEMPHVGSPQLYQAGGRKPRHRINYVCAHRWYLLLV

SEQ ID NO: 278512 - protein, 114 aa, Zea mays
  unsure (1)..(114): unsure at all Xaa locations
  Clone ID: MRT4577_185578C.1.pep
FGSRAGGASAFAHALWTGQSRFTVDTRCELPGRQSITICTARSRRTEGLFQPSLFSMETPXXHETTYNXLMTRERDIRTDLYGYMDLSXGTTISPAMSSRMSKAITAVAASYMK

SEQ ID NO: 278513 - protein, 76 aa, Zea mays
  Clone ID: MRT4577_185579C.1.pep
MSDRRRGTCASTGTRKDEVTTRQYTINLHKRLNGCTFNKKAPNAINEITMIAQTTMDTNDVRIDVKLNMHVWSTRI

SEQ ID NO: 278514 - protein, 99 aa, Zea mays
  Clone ID: MRT4577_18557C.1.pep
GPWVWPGSALGKCCAPGPSSCCWSAPRSPPGLYAPAVTRFPFVHVNPINVWSSVFTSLSADQSWYTCPSVDMMVMWRPYLARVARLISPPGGGSPPNSP

SEQ ID NO: 278515 - protein, 59 aa, Zea mays
  Clone ID: MRT4577_185580C.1.pep
MRFINLSYQDLPSTSEDLLLPVPCLVFRPHQDLDNSLQSHKHLQESLKHLVLQFLYQIA

SEQ ID NO: 278516 - protein, 97 aa, Zea mays
  unsure (1)..(97): unsure at all Xaa locations
  Clone ID: MRT4577_185581C.1.pep
MLALSSSPLALAWEKAEPECLSCVSGSPPSAGVPLPPLGVPSVPLPPVRXPSVPIPPVSQLPPVVGLPPVSLPPFPLVGGGPPLTGLRXACPPPPSP

SEQ ID NO: 278517 - protein, 64 aa, Zea mays
  unsure (1)..(64): unsure at all Xaa locations
  Clone ID: MRT4577_185582C.1.pep
QRRAEXXRGHDEGRGGGSSRRPRVPRPPEALHGLQLREVHRNRSPIEGMAPRGVATRDXGSSRD

SEQ ID NO: 278518 - protein, 118 aa, Zea mays
  Clone ID: MRT4577_185583C.1.pep
MVYNSINRQLIGPRKDPPCMNTIAEKMEEYRAKKGILFTEFQEMILMWVRKDLRLVLANKAAVAILGAPLLAVTAKNAARQVPRISDAVEQVPTPLLAAVFSVGLMLLQDVRLGKQRG

SEQ ID NO: 278519 - protein, 35 aa, Zea mays
  Clone ID: MRT4577_185584C.1.pep
TGHIFRGECNHVFCTTAPQYVTSIAYSSRKPTPYT

SEQ ID NO: 278520 - protein, 140 aa, Zea mays
  Clone ID: MRT4577_185585C.1.pep
MAAAASALLLLLCSAFCSLAHRAAGVDYGSWQSAHATFYGGGDASGTMGGACGYGNMYSTGYGTNTAALSTALFNDGAACGSCYELRCDNNGQSCLPGTITVTATKPPNLATWWWEMFGDCTFWDREHQCLFMVYYMQYI

SEQ ID NO: 278521 - protein, 289 aa, Zea mays
  Clone ID: MRT4577_185586C.1.pep
MALRQAVLAAVVLAALLPLALSRGLGLVHGHVRPHTHGLGLGHHHAQPHPHGHAPLVGGAWSSAHATFYGGGDASGTMGGACGYGNLYSQGYGTNTAALSTALFNNGLSCGACFEVRCDAAGGGSHSCLPGSVVVTATNFCPPNNALPSDDGGWCNPPRAHFDMSQPVFQRIALYRAGIVPVSYRRVACNKKGGIRFTINGHSYFNLVLVTNVGGAGGAGDVAVICDRAPRTGSQPSTRTRGQNWQSNSYLDRQALSFQVTASDGRTVTSNGAVPAGWQFSQTFEGGQF

SEQ ID NO: 278522 - protein, 245 aa, Zea mays
  Clone ID: MRT4577_185587C.1.pep
MAIAGALLLLLGLLAREAAAGGWQSAHATFYGGGDASGTMGGACGYGNLYSTGYGTSTAALSTALFNDGAACGSCYELRCDNDGRWCLPGTITVTATNFCPPNYGLPSDDGGWCNPPRPHFDMAEPAFLRIAQYRAGIVPVAFRRVPCVKKGGIRFTINGHSYFNLVLVTNVAGAGDVRSVSIRGSRTGWQPMSRNWGQNWQSNSYLDRQALSFQVTASDGRTVTSNGAVPAGWQFSQTFEGGQF

SEQ ID NO: 278523 - protein, 220 aa, Zea mays
  Clone ID: MRT4577_185588C.1.pep
SVLLPLLNYRPNTNRKLHADQGSCVLSPWLKEEPRSPPTRPPTRPPTRPCYELRCDNNGQSCLPGTITVTATNFCPPNYGLPSDDGGWCNPPRPHFDMAQPAFLQIAQYRAGIVPVAYRRVPCVKKGGIRFTINGHSHFNLVLVTNVAGAGDVQSVSIKGSSTGWQPMSRNWGQNWQSNSLLDGQSLSFQVTASDGRTVTSNGVAPAGWQFGQTFEGAQF

SEQ ID NO: 278524 - protein, 150 aa, Zea mays
  Clone ID: MRT4577_185589C.1.pep
INNYIIRRQRSSNPKLTGRRRPKSLSRTHRSILHAPHPAVPVLDRVTPHKFYRSAPPTSWARDATPVFHHFEHALVCDPTGRRRPRSPQRPARRPRTLHAASTGKSLDVQGAAPLNTLPATLPFSLCSSFLLSRLREYIVSAYSLVFFLF

SEQ ID NO: 278525 - protein, 112 aa, Zea mays
  Clone ID: MRT4577_18558C.1.pep
PSLHNRGGTAIRIDYTQLRISNHMTYVALNPCICQLATGVLKTRSGSCQPRAQIHHRPTSCHRGYTLLSPSLHSHCVLSYSGISLPKAKLTHDEACDQLKGPRSAGLHRQGP

SEQ ID NO: 278526 - protein, 90 aa, Zea mays
  Clone ID: MRT4577_185590C.1.pep
SVCRSLFVASQGRCLRSPRFCRPTHVFLCTPAHRCACLELCSAAALGYPWFQQRGMGTYDSLASWREIVVCVVLMEEKCLLCKFVPVLRS

SEQ ID NO: 278527 - protein, 65 aa, Zea mays
  Clone ID: MRT4577_185591C.1.pep
KRWWRRLSPDMYIARVQPRMSAQLEDLIAKSWLCLPKGFFLSCLVDLCTAVKNLADLFGVWTPVN

SEQ ID NO: 278528 - protein, 226 aa, Zea mays
  Clone ID: MRT4577_185592C.1.pep
MKKLILLLSSFFFFSARARTTGGACGSGNLYSTGYGTSTAALSTALFNDGAACGSCYELRCDNDGRWCLPGTITVTATNFCPPNYGLPSDDGGWCNPPRPHFDMAEPAFLRIAQYRAGIVPVAFRRVPCVKKGGIRFTINGHSYFNLVLVTNVAGAGDVRSVSIRGSRTGWQPMSRNWGQNWQSNSYLDRQALSFQVTASDGRTVTSNGAVPAGWQFGQTFEGGQF

SEQ ID NO: 278529 - protein, 160 aa, Zea mays
  Clone ID: MRT4577_185593C.1.pep
LGDDGLDLSHELIAASFMRLILRYLFLTWHLRFQVPACFLDDTCPRASYAAQVLPKRAADFLGSRCDSSLSPLRARPGLRPNRTTAPAQSSTPGEEAQNAPRRKHRKVPGRPGCGTVEHPPGNAPVLSLLFLSSLSTARIHRQRILVGFFSLLVNRDPGR

SEQ ID NO: 278530 - protein, 83 aa, Zea mays
  Clone ID: MRT4577_185594C.1.pep
SDGSDGKVEAGCAPDVRVWHEVPVCPNVNVLGGYELELIGLLIGKAGKPAEVLPKSLVLSAVNAAAGQLGVRVGRHPEVPAPV

SEQ ID NO: 278531 - protein, 253 aa, Zea mays
  Clone ID: MRT4577_185595C.1.pep
MAAAASALLLLLCSAFCSLAHRAAGVDYGSWQSAHATFYGGGDASGTMGGACGYGNMYSTGYGTNTAALSTALFNDGAACGSCYELRCDNNGQSCLPGTITVTATNFCPPNYGLPSDDGGWCNPPRPHFDMAQPAFLQIAQYRAGIVPVAYRRVPCVKKGGIRFTINGHSYFNLVLVTNVAGAGDVQSVSIKGSSTGWQPMSRNWGQNWQSNSLLDGQSLSFQVTASDGRTVTSNGVAPAGWQFGQTFEGAQF

SEQ ID NO: 278532 - protein, 147 aa, Zea mays
  Clone ID: MRT4577_185596C.1.pep
ISHELIAASSLPLILWYLFLTWHLRFQVPACFLDDTCPRASYAAQVLPKRAADFLGSRRDSSRPPLRACPGLRPNRTTAPAQSSTPGEEAQNAPRRKHRNVPGRPGCGTVEHPPGNAPVLSLLFLSSLSTARIHRQRILIGFFSLSG

SEQ ID NO: 278533 - protein, 245 aa, Zea mays
  Clone ID: MRT4577_185597C.1.pep
MAIAGALLLLLGLLAREAAAGGWQSAHATFYGGGDASGTMGGACGYGNLYSTGYGTSTAALSTALFNDGAACGSCYELRCDNDGRWCLPGTITVTATNFCPPNYGLPSDDGGWCNPPRPHFDMAEPAFLRIAQYRAGIVPVAFRRVPCVKKGGIRFTINGHSYFNLVLVTNVAGAGDVRSVSIRGSRTGWQPMSRNWGQNWQSNSYLDRQALSFQVTASDGRTVTSNGAVPVVWQFGQTFEGGQF

SEQ ID NO: 278534 - protein, 88 aa, Zea mays
  Clone ID: MRT4577_185598C.1.pep
DSKYQLALQVTRVLTAFEGGADQRRNAVHSEAQVQAIRHHFEHDLVCDPAGRRRPRSPQRPARRPSPLHAACTGKSLDVQCATATEFT

SEQ ID NO: 278535 - protein, 63 aa, Zea mays
  Clone ID: MRT4577_185599C.1.pep
RAISPRPQLNLYQRSRSHHGCEECRKRREGPLGELLVLLRVPPSAAEHQYGTFGPPSGASGEF

SEQ ID NO: 278536 - protein, 93 aa, Zea mays
  Clone ID: MRT4577_18559C.1.pep
VESEKHIDFSQTIVFKNGMAKSIHHARVLIRQRHIRVGRQLVNIPSFMVRVESEKHIDFSLTSPLGGGPAGRVKRKNQKKASGGGDDGEDDDE

SEQ ID NO: 278537 - protein, 119 aa, Zea mays
  Clone ID: MRT4577_1855C.1.pep
CAQVTSLCYCAQEDSTNTHNRHVVKSYLHECTCLEWQHTGKPCPHALALITAQESVDVELEDFVHEYYSVQRFKNAYKRIIEPLPDRSQWPHVDLPYMVGAPLDKRGRGRYKKLRIKSC

SEQ ID NO: 278538 - protein, 50 aa, Zea mays
  unsure (1)..(50): unsure at all Xaa locations
  Clone ID: MRT4577_185600C.1.pep
PPPSPPPILLPTFSPTXNTLKRSKLDASCSYIVTLPDSPMGRPRAQLCSL

SEQ ID NO: 278539 - protein, 185 aa, Zea mays
  unsure (1)..(185): unsure at all Xaa locations
  Clone ID: MRT4577_185601C.1.pep
MASGGAARGRLAEERKAWRKSHPLVGAGFVAKPAMLPDGSVNLMLWNCVVPGKEGXMIESTENLKDCCCGAGRAIIKXTDWEGGYFPVTLHFTENYPSIPPTCKFPRRFFHVNVYDSGDVCLSILGDAWAPSITVRQILIGIQELLENPNPASPAQDFAYDVFAENMPEYKRRVREQAKRYPSLV

SEQ ID NO: 278540 - protein, 159 aa, Zea mays
  Clone ID: MRT4577_185602C.1.pep
MASGGAARGRLAEERKAWRKSHPLGFVAKPAMLPDGSVNLMLWNCVVPGKEGTDWEGGYFPVTLHFTENYPSNPPTCKFPRRFFHVNVYDSGDVCLSILGDAWAPSITVRQILIGIQELLENPNPASPAQDFAYDVFAENMPEYKRRVREQAKRYPSLV

SEQ ID NO: 278541 - protein, 36 aa, Zea mays
  Clone ID: MRT4577_185603C.1.pep
QEPLNSCTASQLIFTAPWICIQASRSHLNFEVTGPL

SEQ ID NO: 278542 - protein, 80 aa, Zea mays
  Clone ID: MRT4577_185604C.1.pep
YALIFLQPEYVGLFLCLDGVLSESARGPSSEGMKSSSAPDLCALEIGRMSEVMGAKNTARRRRSAGTGRVPLHVEDSFRG

SEQ ID NO: 278543 - protein, 69 aa, Zea mays
  unsure (1)..(69): unsure at all Xaa locations
  Clone ID: MRT4577_185605C.1.pep
VQHASAHTSAFDDLPHDLKSCFLYFXAALPMKTPVKAPKLESSWMEKGFLKPKNGKTMEKVGRINLKDL

SEQ ID NO: 278544 - protein, 112 aa, Zea mays
  Clone ID: MRT4577_185606C.1.pep
RIVRLKTHQCHLRSLRHHPQHIHGEHQGGAHGLENLGAMASRVGEVAGSCWPESRGRSLGADEMLLWGEGRWRMCRGRGTRPCCSRPKVEDEQDMCRGREMVARRRSRGGDG

SEQ ID NO: 278545 - protein, 242 aa, Zea mays
  Clone ID: MRT4577_185607C.1.pep
GKLLYYKLYSMLEDSSISHLISWAENGESFVMSPSADFSKVLSQYFKHTNISSFVRQLNMYGFHKERDVFHTGHPESTLWEFKHGNGNFKRGDLLGLREIKRRASRHALVHRENSYAKPSSSHPGTPAEAMPMPPETSESRMTSIEHTLFDLSARLQRSEEAAQYMHVRNSVITDTMGRLLHFNQELSRTVLSLFPSESPHYRDVMALQAGIQKQVDAVRALDEHHEAPYGGRQHYFGAMEN

SEQ ID NO: 278546 - protein, 83 aa, Zea mays
  Clone ID: MRT4577_185608C.1.pep
TLSYPIALFGTSKSVISFPTEISALFPRLIEDINILVVMNQLFGGKESDERSSPDLVQQQPTILQMNLNEQKQNHANPWCNFL

SEQ ID NO: 278547 - protein, 149 aa, Zea mays
  unsure (1)..(149): unsure at all Xaa locations
  Clone ID: MRT4577_18560C.1.pep
RWRLKHQRRRRRRRQQQPRPPHRRPTVAIALSHHRRRPRRPSPRCPRRXSPSPSPRGRAVXPSPGSTIRASPRRASSVLSELPPPRQRPSRSRRRCGSRRLQGRATSSTPGADAPAESRCPPTTRGGTPSPRRSRSAPGNAAARDQTPA

SEQ ID NO: 278548 - protein, 117 aa, Zea mays
  Clone ID: MRT4577_185610C.1.pep
QGAFWPTRVLGPAGPLCTPSKKGPRGRWIFAPPPVPPFLLFSKFGSCRSFWTAPQPGPFLCFFILVPAPCFFWDGACPIPPPSRWPRPPVRLSPEGGLACGPPSPGPRPTQERDPRI

SEQ ID NO: 278549 - protein, 103 aa, Zea mays
  Clone ID: MRT4577_185611C.1.pep
RAAQCRSGPLFNSVCSACYCCERATKSSNSTLRSISVNTKLCLLHCALLLYTRSSVWAQTPGNVATSTPRNRPLDALHHYTVLLNALARYLSSPTSAFSSGYT

SEQ ID NO: 278550 - protein, 88 aa, Zea mays
  Clone ID: MRT4577_185612C.1.pep
VDFIIRHASGKRLSKEEILEARHYAQKLQYPKGALVFNGTDEDDFLYCLPDNKEISVCRKMAKSMGFLRLEDDLADSLAYNGLNVHEL

SEQ ID NO: 278551 - protein, 85 aa, Zea mays
  Clone ID: MRT4577_185613C.1.pep
WFRELGLPFRPFWYVKVVSCSRVYSNKKGGEGWFSFLMSKKDANKALGCKFDVEKKCRRFKLGKGVHFFFFKPKNKKKKKKKKRE

SEQ ID NO: 278552 - protein, 66 aa, Zea mays
  unsure (1)..(66): unsure at all Xaa locations
  Clone ID: MRT4577_185614C.1.pep
MTRMHRLRPLFLSXLLASLQCGAATAAAGYGGGAEGFCSAEPPSKCSDQSLYWKVRHSTLSPVHQD

SEQ ID NO: 278553 - protein, 84 aa, Zea mays
  Clone ID: MRT4577_185615C.1.pep
GHPLKREVIPLVRCFPQFWNPRFCLLCALREPLCPFPSPFCGPPLAGGWAFYRWEFPRTFFVWPHPKKKKPNQKKKKKKKKKKP

SEQ ID NO: 278554 - protein, 172 aa, Zea mays
  Clone ID: MRT4577_185616C.1.pep
KKKKKKKKKKKKKKKKKKKKKKKKKKTWAGTPLRAIFEVFLPPGGGSIFLLGGPFGPFGGRFKMAGPGFYKGGTGKTRGFPNLLALGKIPFSPAGLFAKRPPLSAFPKIGPPSLGIGPPLWGGFKRGGGGGSPQRNRSPCQGLIPRFFGFFPFLFPPGSLVFPPILLIRGLP

SEQ ID NO: 278555 - protein, 139 aa, Zea mays
  Clone ID: MRT4577_185617C.1.pep
MLPGEPPFVLLKWVWGLYGRNAVLDAADEQLRGGGDDDECIERALVVGLWCAHPEQSERPSIAQAMHVLQSADARLPALPPQMYKTASDLAVTGRSYGVLSVESYSGGDSSTTTTTAGYSKTSSGSSTTALLRDSKERP

SEQ ID NO: 278556 - protein, 47 aa, Zea mays
  unsure (1)..(47): unsure at all Xaa locations
  Clone ID: MRT4577_185618C.1.pep
LLGVTNLDAHLYLAKMKRTSVDRAMSSPPVLXHELGAEVHHEDTELG

SEQ ID NO: 278557 - protein, 57 aa, Zea mays
  Clone ID: MRT4577_185619C.1.pep
LARRIKLMLADSIETGVRTVFIFRISSHSNATAINHARCSGVQLLVLHDAPENGSAF

SEQ ID NO: 278558 - protein, 75 aa, Zea mays
  unsure (1)..(75): unsure at all Xaa locations
  Clone ID: MRT4577_18561C.1.pep
FTGFQQQLLKNTKGKQMGTNQTNGTFQSSIIKHLNQHLNLDLFFSFLGGXSKKNEIFGELNQGQNWPCTFLQTKF

SEQ ID NO: 278559 - protein, 108 aa, Zea mays
  Clone ID: MRT4577_185620C.1.pep
PTRPISFQVHAEWCLTKREDGSYGSLGLEHIASLQRVVVTIVCEGYVFELDLTETEAELIHAINVHPNNPTLTWTVLNEGIIRSYTLGDTDDDLAIEEQESKAPFSSP

SEQ ID NO: 278560 - protein, 60 aa, Zea mays
  Clone ID: MRT4577_185621C.1.pep
MIHYFLKIIHLFDEYSKCLLDGAHNVGSKPIQQIRIFLFEKALALIGNKTLIRQGLHGHL

SEQ ID NO: 278561 - protein, 82 aa, Zea mays
  Clone ID: MRT4577_185622C.1.pep
MAFAGNADDSAEDYSAEATVVRFDPPLPLLRAPVPSPASSGEGPVLAFRDVASWRAAWEAAEASLVSQCELAEVPRDSHARQ

SEQ ID NO: 278562 - protein, 77 aa, Zea mays
  unsure (1)..(77): unsure at all Xaa locations
  Clone ID: MRT4577_185623C.1.pep
SVAPGTLEPVMDGRLLPVRAKVLRAXLRRDTWQVLIHWRDLAEDDATGEDLDEFRTTYPDLQLEDELFAKAGRDVMY

SEQ ID NO: 278563 - protein, 141 aa, Zea mays
  Clone ID: MRT4577_185624C.1.pep
MARSSKMMMAAAALLALALAVATTAEARNIKTTTTAAAAEKKADNDAVVQPQTFPPFDRLGGGASPAFGGLPGTGSSIPGSSIPGFSLPGSSGGSSMPGFLPGSGSIGSMPLFGGGSPFSGFGGMPGSPTAGSVPEHANKP

SEQ ID NO: 278564 - protein, 77 aa, Zea mays
  Clone ID: MRT4577_185625C.1.pep
KPTVTPTGPLVPPNTSNLIPLLGRPGLIITRLCRSGGVNQFSMDTLQARISINILPHITPPTGRKRPIRPRSRPPPY

SEQ ID NO: 278565 - protein, 35 aa, Zea mays
  Clone ID: MRT4577_185626C.1.pep
YDTQSNLGTENREFFCSNTGKLLSELPNRRDSSSH

SEQ ID NO: 278566 - protein, 43 aa, Zea mays
  Clone ID: MRT4577_185627C.1.pep
AVNSQVTGLVAEDVQCGPKPSQYDTPRQLLLPMVKPSYGLNVW

SEQ ID NO: 278567 - protein, 81 aa, Zea mays
  Clone ID: MRT4577_185628C.1.pep
GFATGPVKIRYFKGYITEVKKAINDGAKVLGDFGWSLLDNFEWRVGDPSRFGLGYVGSQTFKRVPQDLAFWVKHMLSQKRR

SEQ ID NO: 278568 - protein, 32 aa, Zea mays
  Clone ID: MRT4577_185629C.1.pep
LAQRLVKTHSDFVSPARPSGADSTYSGDQLPI

SEQ ID NO: 278569 - protein, 49 aa, Zea mays
  Clone ID: MRT4577_18562C.1.pep
APRAVESFALLALPAHSASVATGTIIPHCSQQYLSPKTAARTEYPTIQY

SEQ ID NO: 278570 - protein, 110 aa, Zea mays
  Clone ID: MRT4577_185630C.1.pep
MLFNFLTLIYIAFSAVNCWLKCMLLEPYNQIDHPECKSRPDSGLSAITELDPGYITGPLSSVWKEWVKWCVEFGIEANAIIAVPYDWRLPPSMLEERDLYFHKLNRISKS

SEQ ID NO: 278571 - protein, 79 aa, Zea mays
  Clone ID: MRT4577_185631C.1.pep
SRPDSGLSAITELDPGYITGSVRVNGPVTDSRYPAHQQIPQAYGYRQMPARLDSTNPSQAMGGYTLQSQKETLFEELPF

SEQ ID NO: 278572 - protein, 206 aa, Zea mays
  Clone ID: MRT4577_185632C.1.pep
TVFWTDYVATRWYRAPELCGSFFTKYTPAIDIWSIGCIFAEVLTGKPLFPGKNVVHQLDLMTDLLGTPSTDTISRVRNEKARRYLSSMRKKDPVPFSQKFPSADPLALKLLEKLLAFDPKDRLTAEEALRDPYFKGLARAEREPSCQPIRKVEFDFEHKRMSKEEIRELIFREILEYHPQLLSSYINGTERTTFLYPSALTYSCSP

SEQ ID NO: 278573 - protein, 682 aa, Zea mays
  unsure (1)..(682): unsure at all Xaa locations
  Clone ID: MRT4577_185633C.1.pep
MPADWKESPSRSRPPPAPPFPFLPLPLPLSLGARRDRAEEPYRPPSPKAAAEAGAQLRGRLEVRGCVWNRRWAREIRPAGMQQDQRNKTSAEADFFTEYGDANRYKIQEVIGKGSYGVVCSAIDLHTRQRVAIKKIHGIFEHVSDAARILREIKLLRLLRHPDIVEIKHIMLPPSRKDFKXDIYVVFELMESDLHQVIKANDDLTKEHYQFFLYQLLRALKYIHTANVYHRDLKPKNILANSNCKLKICDFGLARVAFNDTPTTVFWTDYVATRWYRAPELCGSFFTKYTPAIDIWSIGCIFAEVLTGKPLFPGKNVVHQLDLMTDLLGTPSTDTISRVRNEKARRYLSSMRKKDPVPFSQKFPSADPLADRIAADTTDIYTRSLNSIVEALRDPYFKGLARAEREPSCQPIRKVEFDFEHKRMSKEEIRELIFREILEYHPQLLSSYINGTERTTFLYPSAVDQFKKQFSHLEESGGNGPSVPTDRKHASLPRTTVVHSNPIPAKEQPLGASSRVRPVSDDSCKNPWEKGSGPGNVPRTSLTPQGLQAQAGSVRVNGPVTDSRYPPHQQIPQAYGYRQMPARLDSTNPSQAMGGYTLQSQKAYACANGKGSPDVAVNMRAPPFHLPAGPKKNPLDRIAPDTTDIYTRSLNGIVAAAAASVGAGAGTHRNIGVVPSGMSRMY

SEQ ID NO: 278574 - protein, 54 aa, Zea mays
  unsure (1)..(54): unsure at all Xaa locations
  Clone ID: MRT4577_185634C.1.pep
TILTEALSRSNVAXTPQARGIDTGLLGSPLANERGKSGKAIKWGRARDLAVMTY

SEQ ID NO: 278575 - protein, 159 aa, Zea mays
  Clone ID: MRT4577_185635C.1.pep
VPRLHGRSRFPLWAPEHYFLLTVRLPGAELPSLAPSMESPGRASSFLASSPLPRSDRRPPCPSSSRGRAVVLRVQHRQTTAVVLGNFGTTSFSLARTMTFSRSEVHHCPKAHLDGAPQPLCPLYPLRRVLPRSPHCVVVDFSAYCCGSWITLASTRTSR

SEQ ID NO: 278576 - protein, 137 aa, Zea mays
  Clone ID: MRT4577_185636C.1.pep
MSGEGWLFLFSVLLSAVLLFTMVFFIIMFSDLECDYINPIDLCNKLNQFILPEMAAHAVLTVFFLLSGQWIAFLLNVPLVAFNVNKVMNKNHTLDATEIFRTLSAHKKQCFIKLGFYLISFFYYLYRMILALIADTE

SEQ ID NO: 278577 - protein, 66 aa, Zea mays
  Clone ID: MRT4577_185637C.1.pep
SHMSLTRMTTPRNKGQRRPTMSKKDKHQHKTSKIKLNRQRNQDPQFRMKSFLIILFLATTYYLYLP

SEQ ID NO: 278578 - protein, 44 aa, Zea mays
  Clone ID: MRT4577_185638C.1.pep
GSRGFFKFGKTFKIKYPPLVLGLALKNFAPPLFFCVKSGTLLFN

SEQ ID NO: 278579 - protein, 76 aa, Zea mays
  unsure (1)..(76): unsure at all Xaa locations
  Clone ID: MRT4577_185639C.1.pep
SVSEFLGVDSTASRPTSSRYRXCVLYKYQHPEESLASACAMLRSFGTRRGRKKGCEWHDSCLATKVLRVYLSFXGT

SEQ ID NO: 278580 - protein, 67 aa, Zea mays
  unsure (1)..(67): unsure at all Xaa locations
  Clone ID: MRT4577_18563C.1.pep
KTITLEVXSSDPIANFKAKIQDKEGIPPDQQGFIFAGKQFEDGRTLTDFNIQKESTLPLVLRFRGGQ

SEQ ID NO: 278581 - protein, 102 aa, Zea mays
  Clone ID: MRT4577_185640C.1.pep
EKRNFFPAPRKRGDLRAGKGPLQTLGGGPPRAGGLPFPKVDPLLATFHPGKVFMNPPPPQKQFFPFLKKFFFLFGWGLGSLTLGTTIFFFFSPRGTFVPWAP

SEQ ID NO: 278582 - protein, 160 aa, Zea mays
  unsure (1)..(160): unsure at all Xaa locations
  Clone ID: MRT4577_185641C.1.pep
RPAATRPPWPTLGFAHHIPVNSGSDDTFNFIRRCITGCIGNPKHTACKFPCPSALSPPKRLLDVGKSSSPIRLIDTQCKNFQYAALSHCWGSSQPLVSTKETWPKMSVNISFDTFPPLFQDAIIITRQLGLRYLWIDSLCIIXDSIRDWETESAKMGSIY

SEQ ID NO: 278583 - protein, 109 aa, Zea mays
  unsure (1)..(109): unsure at all Xaa locations
  Clone ID: MRT4577_185642C.1.pep
ANHINNRTALSSKILSLLALLALIASATNAFIIPQCSLASRSIITQLLPPVTSMGFXHPALQAYRLQQAIAAIVLQQPISHVQQQSLSHLTIQTIXTQQHQQFLPSLIH

SEQ ID NO: 278584 - protein, 86 aa, Zea mays
  Clone ID: MRT4577_185643C.1.pep
MALTGSRAWIERGVPFIFISGIKRNGARKPPLYLVATVAIFRLCNMGIISKVPQVIWFAFQDSKLVMETCQEAKNLWKIVTLFYLD

SEQ ID NO: 278585 - protein, 138 aa, Zea mays
  Clone ID: MRT4577_185644C.1.pep
SKPSSEDSSVHEIELPESSDSKHLDTEPHELSSAGTTVEAATKLVSSVAVACAGPNVGTCEGPTAAAGSSASCSTTTFEASSPVGAWAGAGSSPAPVDAGVTEGPLPTSVEGASSTPGASGSMLSRSPRSSTSSSCAI

SEQ ID NO: 278586 - protein, 59 aa, Zea mays
  Clone ID: MRT4577_185645C.1.pep
FSGLHIGACNSSAGSNLRRRGERTLLHRAWVQGCTPLNLGCGRGSILSWGPLRFGGGAG

SEQ ID NO: 278587 - protein, 93 aa, Zea mays
  Clone ID: MRT4577_185646C.1.pep
KKKKKKKKKKKKTIKKKKKKKKKNYFGKKKKPKKKKKKKKKKKKKKKKVCPWAGTPLGGILEVFLNMGGGWGLLLGGPFRLLGGGFKIKGRGF

SEQ ID NO: 278588 - protein, 77 aa, Zea mays
  Clone ID: MRT4577_185647C.1.pep
AEEHKLRQKDEHSRDAKSDLERSRLPSRGREDIHQSYANRDRVDIQGRSYNKVRETEILPRRDDGVHSRRAKEEDLR

SEQ ID NO: 278589 - protein, 83 aa, Zea mays
  unsure (1)..(83): unsure at all Xaa locations
  Clone ID: MRT4577_185648C.1.pep
IPQIGMTFSSSDEAWNFWVTYGGRMGFDVXKCYSNPSALDGLVTLSRSVCSNQGYSAENKEVXVSKRDRAHTRTDYRVCMGIT

SEQ ID NO: 278590 - protein, 160 aa, Zea mays
  unsure (1)..(160): unsure at all Xaa locations
  Clone ID: MRT4577_185649C.1.pep
MGRQEQGLMPTEIGNRGAQPTGPEAGXSRTXSPRVRRRLPQLLQARKLQNARLXYHYLISHXAHLDTIPVFLLMSAAQLGSLSRDKLWRKVWGEVTYDLATVIAFLDVLVFTISVYIMSRPRTVYLIHFACYKPGDELKAPKGEFIDLARKTAKIDQDRL

SEQ ID NO: 278591 - protein, 356 aa, Zea mays
  unsure (1)..(356): unsure at all Xaa locations
  Clone ID: MRT4577_18564C.1.pep
RRFYYHTQKTRELDNLLGDIYHKILDMERAIIRDLVCRVLQFIPQLTKAVNFAAELDCILSLATVAHQNNYVRPILTEDSILEIHNGRHALQEMTVDTFIPNDTKIRDAGRINIITGPNYSGKSIYIKQVALIVFLAHIGSFVPADSAIVGLTDXDILCNGKQIHDNRTVNFYDXFTSSWNNAQXATSRSLCLLDEFGKGTLTEDGIGLLGGTISHFANYGSPPKVLLSTHLTEIFTENYLPQCEHIKCYAMSVLNPDGQTSNEDITFLYRLVPGQALLSFGLHCAQLAGVPNEVVQRAGIVLEDMHSKKPTRRVTSEKLTATDKQYQDAVTKLMAFDTQKGDLNSFFQELFPVDL

SEQ ID NO: 278592 - protein, 101 aa, Zea mays
  Clone ID: MRT4577_185650C.1.pep
GTSRPAGPGFQYNSHSVFSVTDREGNRVLDAQPSYIQEMLEADDWYYLEARNTVGVVALEDYTSIDLTGIDRALLFEVCVVLAAMGSVVKMRSMKDVAMSS

SEQ ID NO: 278593 - protein, 157 aa, Zea mays
  Clone ID: MRT4577_185651C.1.pep
DELIMTELILETTLASYEPEEVVALLSGFVFQEKSDSEPVLPPKLEAGRDVVLGIADRVGRVQDLHKVAVPDSKSKLKFGLAEVVYEWAKGMPFEQITNLTDVAEGTIVRVITRLDETCREVRDAARVIGDTDLFKKMEEAQIKIKRDIVFAASLYF

SEQ ID NO: 278594 - protein, 81 aa, Zea mays
  Clone ID: MRT4577_185652C.1.pep
GVSHTYARILLFASQKKRALKLHIAVYIPNQDSPRETNIPDVNCTIIIQPRATNPIPIIDDPCAIHKPHQPAGDHRHGKPQ

SEQ ID NO: 278595 - protein, 47 aa, Zea mays
  Clone ID: MRT4577_185653C.1.pep
VGKGGVGVNVNPVRSGKPGCSTVRARKGGVSVNVNPCYRKPGGTTVG

SEQ ID NO: 278596 - protein, 71 aa, Zea mays
  Clone ID: MRT4577_185654C.1.pep
KLLFRKKPSRFTFQKGWAFPKRVYFNGDNWVMPPPNAYPWVPNAFPGLWVSLPPPLVAAWTAFPILLMTHP

SEQ ID NO: 278597 - protein, 159 aa, Zea mays
  unsure (1)..(159): unsure at all Xaa locations
  Clone ID: MRT4577_185655C.1.pep
MAASNMAIFSTAIAGNPIKVGFFGEGRITIGKNVGKPKVAAXSGTPCNAPTGSNNFGPFSANPPTYLTGNFPGNXGWETAGFSANPKTFPRNRKLEVINSRWAIFGAFGXFFPKLFSRNDFNFGEGLXLKAGSKIFTEGVLDYFGNPSLXINAQAFLAI

SEQ ID NO: 278598 - protein, 78 aa, Zea mays
  unsure (1)..(78): unsure at all Xaa locations
  Clone ID: MRT4577_185656C.1.pep
MDGGMFGXIETPPMAALHHFLDVPDGDSSADGDXAGRGGTTRTYVRDARAMVDTPVDLMELSSAFTLLVDMPGLGTVD

SEQ ID NO: 278599 - protein, 72 aa, Zea mays
  Clone ID: MRT4577_185657C.1.pep
ATPPPTHPVLHSALDEQHKRPDHLQREDDPPHKLLRTLKPLHPHSPDQHSLYRYYSPATRLSTQHALHLHLP

SEQ ID NO: 278600 - protein, 66 aa, Zea mays
  unsure (1)..(66): unsure at all Xaa locations
  Clone ID: MRT4577_185658C.1.pep
MTLDSLVVQYLKHQHQTVIKFNGTGDVIYAILRRNLDDVTSSINARRVRHPLFPAFXTIDAVTYSD

SEQ ID NO: 278601 - protein, 236 aa, Zea mays
  Clone ID: MRT4577_185659C.1.pep
MSLNIAQVILNSEVWDLRKFKLLRSVPSLDQTVIKFNGTGDVIYATLRRNLDDVTSCINARRVRHPLFPAFSTIDAVTYSDIATVQMDRCVLDLATESNDSLIGVVAMDDHQELFSSARLFEVGRKRITDDDSDPEDAGETDDDSDDDDDDSDDGVLAPVLEGGTDSEDISSSSSDDGDEDGGDDDIPSSDGIEDDRFIDERRREFMMDLFGDGWDDDEAYMMGSFSSGDEEGWIM

SEQ ID NO: 278602 - protein, 62 aa, Zea mays
  Clone ID: MRT4577_18565C.1.pep
CGATCVLYRNLGLELLCWYNSVKPAVSRSKICQLCEFKHSGPALIICSRLNPHTKNCTYSSF

SEQ ID NO: 278603 - protein, 614 aa, Zea mays
  Clone ID: MRT4577_185660C.1.pep
MLNKTPLSLTLKRTLVYLNENNSLSATNRLATTDQTYQPSVFQTPAPTRKGLSVAVDSPTSFHCGRTNFNYVSTENLDNSQSTPGTLITTTLPGVNDQQSGNLERMTLDSLVVQYLKHQHRQCPAPVTTLPPLSLLHPHVCPEPSRSLSAPANIAARMGSREIRRQFSGIQIPRRDRHFIYSRFKQCRVCRDEASLLTCMTFLGDASRVVAGNHTGELRIFDCNTANLLETQTCHLHLVTTMEATCSGGHELILTSSLNEVKIWDAFSVSAGPLHTFEACKAARFNHSGTSFAALSTDTAQREVQLYDVQTYTLATQLPDNTSSSGTGRGYIQPIIHFSPSDTMLLWNGVLWDTRQPNFVHQFDQFTDYCGGGFHPAGNEVILNSEVWDLRKFKLLRSVPSLDQTVIKFNGTGDVIYAILRRNLDDVTSSINARRVRHPLFPAFRTIDAVTYSDIATVQIDRCVLDLATEPNDSLIGVVAMDDHQELFSSARLFEVGRKRITDDDSDPEDAGETDDDDDDDGDSDDDVLLAPVLEGDTDSEEISSSSDDGDEDGGDDDIPSSDDIEDDPEYIDGGGDFEGGGGLMDILGDDEGEGDESDMMESFSSGDEEGWIM

SEQ ID NO: 278604 - protein, 45 aa, Zea mays
  Clone ID: MRT4577_185661C.1.pep
FFFKLGIRPGSVVIIGTAQYGKKKLIQRQKKRHKLERECPLKRRS

SEQ ID NO: 278605 - protein, 84 aa, Zea mays
  unsure (1)..(84): unsure at all Xaa locations
  Clone ID: MRT4577_185662C.1.pep
VVATEARTIIIVRRYRWTDGSFLASRSEARPHLIVSGPTRHERTCGAWAVALARSGGPARHXLIFFYKKXIYTYVQFIFNIVNT

SEQ ID NO: 278606 - protein, 85 aa, Zea mays
  Clone ID: MRT4577_185663C.1.pep
NSGRGYLYSCSDTYLWSRGSGHTCLVCRRPSLGAWSAFMHDYTMCARKLYRDQRICFERHGDCRSVVCLDLRNGEARRRLFRILT

SEQ ID NO: 278607 - protein, 92 aa, Zea mays
  unsure (1)..(92): unsure at all Xaa locations
  Clone ID: MRT4577_185664C.1.pep
CLLHVLSDTFMYRRRRMNAAEDASVYDDLKLTIVKHSESANTMLIFIWWIEHYYCLSARCKPLSHDAPHLYXDKXILALDILFVTLYVALAC

SEQ ID NO: 278608 - protein, 77 aa, Zea mays
  Clone ID: MRT4577_185665C.1.pep
MFLYNAQRGGKKALGISARGEEDRKGIAFTVGLAMGRLRGCALLLGVLLAGSLLALRAGPVEGLKLGAALGLYLAAT

SEQ ID NO: 278609 - protein, 54 aa, Zea mays
  Clone ID: MRT4577_185666C.1.pep
LVLHHKHLVHIQNQMDQPPLINWRSSGISRRRMWKAPIVVSGTMRLFFRTLVDP

SEQ ID NO: 278610 - protein, 107 aa, Zea mays
  Clone ID: MRT4577_185667C.1.pep
LEPLRKVYDIFCRLALAAGFNTGSGGSSVANEVLMVVRKQVSNPDMKYRRMGIIGVLRIVSTIASTDVNAAVNCSSSQQPNCEEALELLKMSVNSCKFVTLLLIFLY

SEQ ID NO: 278611 - protein, 43 aa, Zea mays
  Clone ID: MRT4577_185668C.1.pep
LCLLKKKKKREKKKKKKKKKKKKKKKKKKKKKKKKKKKKGRPF

SEQ ID NO: 278612 - protein, 80 aa, Zea mays
  Clone ID: MRT4577_185669C.1.pep
ALKFEHRNSKGCNYGPPYEWQVYSALNGCYGVPWVHYKGRQGDYYVLVMDILGPSLWDVWNSFGQSMTPNMVACIAVEAI

SEQ ID NO: 278613 - protein, 96 aa, Zea mays
  Clone ID: MRT4577_18566C.1.pep
SLPTNPSFPLRFRHHTSLSLSSCCSSLPPRGAVGGRLGQKLSAADADPAPTRSAGPSASHPLGRPLGQQYCARSPISVRHNMAPEGEPRSSLPFQN

SEQ ID NO: 278614 - protein, 192 aa, Zea mays
  unsure (1)..(192): unsure at all Xaa locations
  Clone ID: MRT4577_185670C.1.pep
MVPPVDVAGLRPRLGDVEAPPKPRLSLSSMAEVESEPPGRARRRSPADAGAESEPWGRAKRNSSSSGAEPKSEPWVGRGRDRRLSGLSPSPIPGSXAEFTVFWDLARVRALGRAEFAVFRDLARVRALGRAEFAVFRDLARVQALGRAKRSFLWCLRSGLAACQPHSVEWHRSRSGAGGAVFLSGWSVERRS

SEQ ID NO: 278615 - protein, 86 aa, Zea mays
  unsure (1)..(86): unsure at all Xaa locations
  Clone ID: MRT4577_185671C.1.pep
QLKLWPKNLSHFXIRGRINFAGRGQHKHLLXVLILHQLCLWDNHHPAHNISYASPHINWRITWKRRRLFYIIQSLRFKLCLLLFVQ

SEQ ID NO: 278616 - protein, 36 aa, Zea mays
  Clone ID: MRT4577_185672C.1.pep
SPQDLRSPIAERAINSNLFMLRIKRKETISKSGSVS

SEQ ID NO: 278617 - protein, 78 aa, Zea mays
  Clone ID: MRT4577_185673C.1.pep
GEKKKGLGYRKFYSWGRTLGGIWNLGAGTCRGTLWRYSGGFTRKLGTGAWWGTLLNCWGFIFTLGLLGGRLIRGGKGA

SEQ ID NO: 278618 - protein, 196 aa, Zea mays
  unsure (1)..(196): unsure at all Xaa locations
  Clone ID: MRT4577_185674C.1.pep
SENRRIPNFVVNSCPNPTDLYFPLPSIDPPSRQRHPLPKAPGASDCETVGSEGCISDHIGETCIESSNACWELYXLQHDIQPDGQDDXDKTCRSHHNDAFNTFFSXDCVLTKHAPRAAIXVDLEPYVIYCTCLTGSYRQIFHPEQIIIGNDDAANNFFRAHYTIGXEIVDMSLERIRKFADNCTXGLQEFLLFNAA

SEQ ID NO: 278619 - protein, 113 aa, Zea mays
  Clone ID: MRT4577_185675C.1.pep
GLDLSSSDKHYNVNQPRGFCPVCRKVFDEKDIEHVRDLLGDNTSRLVCIRYDSCTIPAFTCIGNLVSIHLNIDHNIWGLNHHCPSCIVTIIYVNDTHSNSFCVCLFTFQHHYS

SEQ ID NO: 278620 - protein, 69 aa, Zea mays
  Clone ID: MRT4577_185676C.1.pep
SPPEPGAGAGCSFMYRRPLSPHAGRAPQSFATARSGRVTRNQESSHVRIILTSANAQRSRGSCSMLGDP

SEQ ID NO: 278621 - protein, 53 aa, Zea mays
  Clone ID: MRT4577_185677C.1.pep
LLQTGSGQRTYTINFSTEKERILRLSVEHLCIMELVNSIILQELENFCNAYAL

SEQ ID NO: 278622 - protein, 49 aa, Zea mays
  Clone ID: MRT4577_185678C.1.pep
LHSIDGKGCCGATQGRDQDATLWRCVTTSRASRTPIDPDASASDVDVSI

SEQ ID NO: 278623 - protein, 251 aa, Zea mays
  Clone ID: MRT4577_185679C.1.pep
MDVPNASVEAEPLLVPRSSTEGGSAAATESKRLLRLAGPLVLSFILRNAVQMVSVMFVGHLGKLPLAGASLASSLANVTGFSLVAGMAGALDTLCGQAFGARRYALLGVYKQRSMLVLALASLPVVLTWVFVEQLLLAIGEDPDIAAEAGAYARWLIPSLAAFVPLTCHMRFLQTQSVVVPVMASSGVTALAHVLLCYTLVYKVGMGSKGAALGAAVSYSVNLAVLALYVRLSSACKQHGTGFSTEAFSFS

SEQ ID NO: 278624 - protein, 124 aa, Zea mays
  Clone ID: MRT4577_18567C.1.pep
MAVVSRKTSTMVAAVAVVVALLLASASSASAAITCGQVGTALAPCIPYATGRASALPSSCCSGVRSLNGQARSSSDRQAACRCLKSLANSVKSVNMGTVATIPGKCGVSVPFPISMSTDCNKVS

SEQ ID NO: 278625 - protein, 167 aa, Zea mays
  unsure (1)..(167): unsure at all Xaa locations
  Clone ID: MRT4577_185680C.1.pep
MASRAILFCTGMAVVLFTTYTIFKAWGFSVFGAHGEYMIGAXYVALMLFFLLALLWHSLSICFLNQASFHINTMVXILTPPATTTPPXGLSLTATWDYICDVLDRGFTLNLVGNRLFYACVPLLLWIFCPLLDFLSSMVMDLITFSLDVLXYGPQRMRLSLRQICGD

SEQ ID NO: 278626 - protein, 124 aa, Zea mays
  Clone ID: MRT4577_185681C.1.pep
QSYQVRSPVDPFCLYACVASALRLREPEHAPGGPGPPHHVGVEMKTVDCAVLVADAYVTGGLDVEVPAPDPSRAYSGRVPGRGGRAGGPPGLPFRLLPAVTPKDDRWARGLAASVCTWANAAYI

SEQ ID NO: 278627 - protein, 63 aa, Zea mays
  Clone ID: MRT4577_185682C.1.pep
KIDVRSWLCCDLMLCRMNISSDLRKDAPLMNFLGLLSSNLYGPLFIRYPVDQVQFSMYETQYL

SEQ ID NO: 278628 - protein, 88 aa, Zea mays
  unsure (1)..(88): unsure at all Xaa locations
  Clone ID: MRT4577_185683C.1.pep
RWTVLMVPTTVVLAVKPTVQCCSDERWLXRDGPMAVFALAFNAYVVVHLNPFALGLMGRWSNTLSPLLLLIAFFTVRMLCIVLYVQML

SEQ ID NO: 278629 - protein, 94 aa, Zea mays
  Clone ID: MRT4577_185684C.1.pep
MNETVQQGPRRRGARAISCLKDVPTNFDQTLVKALVHQPFCVFSEAFLRHWPFYSGGVFDGPCGSELDHSVAAVGYGSSKGQDYIIVKNSWGTH

SEQ ID NO: 278630 - protein, 93 aa, Zea mays
  Clone ID: MRT4577_185685C.1.pep
NKGQPEGGRPLHPFRVCCRPGITPCIFIFLLYNVPHIGSRLFLFVSPISEFFFFFFFLLPLFFLSCFIFFFSLSEAKKHDRGSHKHCNSSSKL

SEQ ID NO: 278631 - protein, 49 aa, Zea mays
  Clone ID: MRT4577_185686C.1.pep
ISAGSHRFEFTSLSCHAVQLGLLSGASSYSRLTSVFIRQLFEFSHLTAS

SEQ ID NO: 278632 - protein, 77 aa, Zea mays
  Clone ID: MRT4577_185687C.1.pep
NRQRWFDLNFCDLLYIKKETFCGNLCRLATIFLGNSSGPYDRTLVVFIRKTNDGPTICAGGFPYLFPCALFMRQPGA

SEQ ID NO: 278633 - protein, 40 aa, Zea mays
  Clone ID: MRT4577_185688C.1.pep
TFSIIRKCHLRVREVYIYEPLCLVIYKNFTILECSPFCTV

SEQ ID NO: 278634 - protein, 84 aa, Zea mays
  Clone ID: MRT4577_185689C.1.pep
VPGLSGRGVELPHIVLIRVHMGVVVLFVRARIFIMLDAIKHLVKDLGYRARIIVMLANHPYTATMLIVVEPFYAIGAPPPNIEY

SEQ ID NO: 278635 - protein, 661 aa, Zea mays
  Clone ID: MRT4577_18568C.1.pep
ASAWSSPRRATAALLSRLPTTVSRPAQAHLDRDKDMQLQTVWAKLRRNEVNKDDFLRVIRNIVGDQMLKQAAHKVFVQMQAQAQRNSQANSSQQSLFSQLSAQQMASSGSAQLHDQKIRPPGPPNQGQKNQVSSSPQAFAPPSGTQPQNSVHYLAHDNPNQNPDAKGTNVVPNQPSRMNTSVPLQTKNKQHQPTQLQQASQQIYGASNPGAQAYPRSITGSLRSPSPVPETQPSMHAPGMAPAKMVPPPTHPMMQHNATAWQMHQNRELKTNAPPPNANMKQNSESVGKVRMAGTGNSSAKGKQGTPNSTPNASGGTKSSKKSGGQKKSLEAAGSMQPSSKKQKTSGGSQEQSIDELNDVTAASGVNIREEEEQLLSAPKEESLASQEARRIAKEEEENLFLRKGPLLRKLAEIARKCDLKNISDDVEYCLSMCVEERLRRLISTLIRVSKQRIDTEKTGHRLVITSDVGRQILQMNQRAKEEWDKKQAEEADKNKKQTEADGSGATELEKEKEESRPKNVKPNKEEDDKMRANAANVAARQAVGGSDMLSKWQLMAEQARQKREGIDVSAASQPGRGPGSRQLSKFGKGPGEHPEGSKRSHSMAFGTGGMKRPGRTAFAGPQRLISVKDVICALEREPQMTKSRLIYRLHERLPVDSTVD

SEQ ID NO: 278636 - protein, 113 aa, Zea mays
  Clone ID: MRT4577_185690C.1.pep
CYGSGAIGGIFAPMLGIASIVSVAMARHFHLLFPSQIPEPAVMAIAGMGALVAATVRAPLTAILLTIEMTDNYFVILPLLVTCLVASVVAEALGGKPIYTVLLERTLAKQNRG

SEQ ID NO: 278637 - protein, 114 aa, Zea mays
  Clone ID: MRT4577_185691C.1.pep
KKTGCPTHPRKQKIEREKQTRQYPKQNPKAYHLHLKGDSLKLDRKKTHSPLKKKNVIRSQIHKKTQPEPKKENPGGGGRDQTHTNWGALNDRHKNRNPPCPVEKQTPQPPEKNP

SEQ ID NO: 278638 - protein, 57 aa, Zea mays
  Clone ID: MRT4577_185692C.1.pep
TADDRTYIHALVVEILIPDDVCSDVLLQTRVFSATGHPVVNVSAMLDIFGMLPRYTV

SEQ ID NO: 278639 - protein, 145 aa, Zea mays
  Clone ID: MRT4577_185693C.1.pep
WSGIPGPTHASAHASAHASAHASAHASENLRVRVYRPTTPPGAKKKLPVLVHFHGGGFCLGSCTWANVHEFCLRLAAEAGAVVLSAGYRLAPEHRLPAAFDDGAGFMRWLRDQSAIGGAGASDAWLAEAADFGRVLVTGDSAGAT

SEQ ID NO: 278640 - protein, 149 aa, Zea mays
  unsure (1)..(149): unsure at all Xaa locations
  Clone ID: MRT4577_185694C.1.pep
MGAAESVPETSIHEFTVKDCNGKEVSLETYKGKVLLVVNVASKCGFTETNYTQLTELYQKYRDKDFEILAFPCNQFLRQEPXKVRVNGPDAAPVYKFLKASKPGLFGSSRIKWNFTKFLVDKDGKVIERYGTSTAPMAIEKDIQKALEE

SEQ ID NO: 278641 - protein, 261 aa, Zea mays
  unsure (1)..(261): unsure at all Xaa locations
  Clone ID: MRT4577_185695C.1.pep
MDCGSVDAVTPVRICSKLILRKKWCFLVLQKKKKKKKKKKNWNKKKKNTRKIKSGDGDSREPRSGREGKERRSGGEMGAAESVPETSIHEFTVKDCNGKEVSLETYKGKVLLVVNVASKCGFTETNYTQLTELYQKYRDKGLXLPDVVLDVVQRLKCEALXFRCNEVGRQRPGTDQQIQDFACTRFKAEYPVFQKVRVNGPDAAPVYKFLKASKPGLFGSSRIKWNFTKFLVDKDGKVIERYGTSTAPMAIEKDIQKALEE

SEQ ID NO: 278642 - protein, 325 aa, Zea mays
  Clone ID: MRT4577_185696C.1.pep
MAMEGPVFCRPAMQAKLPAAALINNSLTKSGQLGTALFGAISKYRNISRFISPISQTSTKNIGPCCSFSSSSDGNGYMAGNSSESDEDYVNSTVLEAVEVRSGSEGYVIKMRDGKNLRCVHSNFQGRNIPENTPQPAIVLRIEDGSGTLLPIIVLEMPSVLLMAAIRNVHIARPTIYQVVKEMIDKMGYEVKLVRVNKRIQEAYCAELYLTKVNDPTDNITFDLRPSDAINIAVRCKVPVQVHRSLAYSDGIRPVEPARMAVTAGLSDGLLFTELDRPDGQPCVEAQEFGLVRNMLIAAIEERYKDAASWKDKLIRLRSKRENWA

SEQ ID NO: 278643 - protein, 60 aa, Zea mays
  unsure (1)..(60): unsure at all Xaa locations
  Clone ID: MRT4577_185697C.1.pep
VACWRPPAXLVXXXAPVLXVPPGPCRXRPXFAASSXWCRSXLGASXXPLCXAAGXVVLLA

SEQ ID NO: 278644 - protein, 63 aa, Zea mays
  unsure (1)..(63): unsure at all Xaa locations
  Clone ID: MRT4577_185698C.1.pep
MSCVIYLQQIQNPNAIMIARTTLAXDDTSGVGITSTVFFVGELMKQGEWCIDKGIFYLFCEHI

SEQ ID NO: 278645 - protein, 103 aa, Zea mays
  Clone ID: MRT4577_185699C.1.pep
VTYKVDSYHIGGISMYQWMQHLGGRMKIEEILIFCAAANNGVDLLVQRRCVQLVLDLLVILKEMTQVFADVMALTGSSMERRKTNRPGSSGKIVTHSSRAALR

SEQ ID NO: 278646 - protein, 65 aa, Zea mays
  Clone ID: MRT4577_18569C.1.pep
MMMGTDVCSSRMLSLPRYESGDEELTVLPRHTKVVVTGNNRTKSVLVGLQGVVKKAAGLGGWHWL

SEQ ID NO: 278647 - protein, 106 aa, Zea mays
  unsure (1)..(106): unsure at all Xaa locations
  Clone ID: MRT4577_1856C.1.pep
TPERRRNAVDSKRAMVVDLFLLALTASATSTHTIGGCXCQPALSTHVTSSVHLAAPVHLRXXVHLDTTDKLVAAVTAASAVHVPXTVHHDDEGCHYANEPITAHTH

SEQ ID NO: 278648 - protein, 203 aa, Zea mays
  unsure (1)..(203): unsure at all Xaa locations
  Clone ID: MRT4577_185700C.1.pep
TFQHFSHLSAIYEDIGPCCSFSSSSDGNGXMAGNFSDSDEDYVNSTVLEAVEVRSGSEGYVIKMRDGKNLRCVHNNSQGRNIPESAPQPAIVLRIEDGSETLLPIIVXRKSFSLIXNLEVGTFNXLXMSTFSIFSVEMPSVLLMAAIRNVHIARPTIYQVVKEMIDKMGYEVKLVRVNKRIQKAYCAELCLTKIDDSTDSITF

SEQ ID NO: 278649 - protein, 95 aa, Zea mays
  Clone ID: MRT4577_185701C.1.pep
GRRMLKKDANKANRKSKSEWLPLEDISRTSQVTPDRREVKTTRALASETNQKRKRSSFKSSMSCGYPDIATQDFCKLKLLCHLCSSRQISLFQVV

SEQ ID NO: 278650 - protein, 127 aa, Zea mays
  Clone ID: MRT4577_185702C.1.pep
TRCQHSVPRLESFGSLNSTCCVTLDPRTWHVVSFGSINLYYCAPTWHVISASSLSKSSFKQFCTGRPSYLTCFSELQRAKLKGLYIYISKHLFLLIYIAMFVTKCPFSFPLHTYLIKSPRVSVLLSK

SEQ ID NO: 278651 - protein, 74 aa, Zea mays
  unsure (1)..(74): unsure at all Xaa locations
  Clone ID: MRT4577_185703C.1.pep
LNDFMKNDNLMHLLNXSXDYVPTYXHKDPDCILDCDHPCEMLIESCKKLHIMKCTEAIELSPRAMDKCNIRISS

SEQ ID NO: 278652 - protein, 59 aa, Zea mays
  Clone ID: MRT4577_185704C.1.pep
DAGHVKRHGVLALFKGGVPGILQLCLRHRRREGQRVLGAGVYNEVLPVKMGRRAGGSWC

SEQ ID NO: 278653 - protein, 94 aa, Zea mays
  Clone ID: MRT4577_185705C.1.pep
QSREKKKKKKKKKKKKKKKKKKKKKKKRKKKKKKKKKKKKKKKKKKKKKKRGGPFIKNQILLPLYCKLIIFFWGPQNKINGPCFKNVGIEKTLG

SEQ ID NO: 278654 - protein, 180 aa, Zea mays
  unsure (1)..(180): unsure at all Xaa locations
  Clone ID: MRT4577_185706C.1.pep
TPALRGSNIVWDISPKKTMGVTPQNPLMEEXPPRGPRVKKTPNPXDLFKLLFKKGLLPFGFNPPGPHPFXNRIPPKPQMGLKNHKEKKNPEAYPHKPPLEENPGENKKEEGDLIFFFFKGEKKRKKKNPPPPPPFCFFAKSCWDEKKKKKKKKKKKKKKKKKKKKKKKKKKKKKKKNPPP

SEQ ID NO: 278655 - protein, 70 aa, Zea mays
  unsure (1)..(70): unsure at all Xaa locations
  Clone ID: MRT4577_185707C.1.pep
HAGCSDIMYHSLFLVGEVAGNDYYRTLLSRVLMEIIRAITPSAVAMMSSTISELHRLXAITLVGPGNLTV

SEQ ID NO: 278656 - protein, 467 aa, Zea mays
  unsure (1)..(467): unsure at all Xaa locations
  Clone ID: MRT4577_185708C.1.pep
TLNTRHDAAMVSVLLKHSEAKVFLVESQFHAVARDALRLLADAKDRLPLVITVSDPSSSSSTGDGRGSNDGSVAVAEYEALLRSAPRDFEIRWPADERDPISLNYTSGTTSRPKGVIYSHRGAFLNTLATVLVNEMATMPVYLWTVPMFHCNGWCMVWATAAQGGTSVCIGSVSPGVVFDHIVRHGVTNMGGAPTVLSMLANAPAADRKPLPRRVRISTGGAPPPPQVLAKMDELGFDVAHGYGLTETYGPATTCVWKPEWDALPPAERARMKALQGVAHAMVQEVAIKDPASMXTLPSDGRAVGEVMLRGNTVMGGYYKDAGATEEAMRGGWLRTGDLGVRHPNGYIQLKDRSKDIIISGGENISSIEVESVLFGHPAVLDAAVVARPDDHWGEAPCAFVTLRDGARATADDIIRFCRARLPHYMAPRTVVFSDLPKTSTGKTQKYLLREKARAMGGLRKPDRSRL

SEQ ID NO: 278657 - protein, 559 aa, Zea mays
  unsure (1)..(559): unsure at all Xaa locations
  Clone ID: MRT4577_185709C.1.pep
MDGSMWCAANYVPLTPLSFLERAAVVYGDRAAVVCGDRRFSWRETRERCLAGAAALARLGVGRRDVVAVIASNVPAMYELHFSVPMTGAVLCTLNTRHDAAMVSVLLKHSEAKVFLVESQFHAVARDALRLLADAKDRLPLVITVSDPSSSSSTXRLRQQRXSVAVAEYEALLRSAPRDFEIRWPADERDPISLNYTSGTTSRPKGVIYSHRGAFLNTLATVLVNEMATMPVYLWTVPMFHCNGWCMVWATAAQGGTSVCIGSVSPGVVFDHIVRHGVTNMGGAPTVLSMLANAPAAERKLLPRRVRISTGGAPPPPQVLAKMDELGFDVAHGYGLTETYGPATTCVWKPEWDALPPAERARMKALQGVAHAMVQEVAIKDPASMETLPSDGRAVGEVMLRGNTVMGGYYKDAAATEEAMRGGWLRTGDLGVRHPNGYIQLKDRSKDIIISGGENISSIEVESVLFGHPAVLDAAVVARPDDHWGEAPCAFVTLRDGARATADDIIRFCRARLPHYMAPRTVVFSDLPKTSTGKTQKYLLREKARAMGSLRKPDRSRLS

SEQ ID NO: 278658 - protein, 138 aa, Zea mays
  Clone ID: MRT4577_18570C.1.pep
PPHFWSMACPHHHTKESFSYTSYPDKSRHSNLRRNHAAQVQESGLCGRPTATSRSSSTRRRRARPAAAAGGGGREEAQRLKCGERKVPGDGTEAAGGGATGLGSGAGRGGRREKNTRKERRGVSLFDLLRSASTVRLF

SEQ ID NO: 278659 - protein, 40 aa, Zea mays
  Clone ID: MRT4577_185710C.1.pep
EIRWTLSSSGSRSTRARLAVDHFLRLPARFAWLAGNPEMT

SEQ ID NO: 278660 - protein, 96 aa, Zea mays
  unsure (1)..(96): unsure at all Xaa locations
  Clone ID: MRT4577_185711C.1.pep
KNIAVIAGTVTDDKRIQEVPAFMVTALRFTDTAWSRIDYANCACLTXDQIDLSSTTSDDHAPIEVQPISRGAIDSHSRASCLVEKPLSRSYAVPDY

SEQ ID NO: 278661 - protein, 38 aa, Zea mays
  Clone ID: MRT4577_185712C.1.pep
CVELSCNRCCRDSIIDNGGGLGFVGVKDYMGDGNGTED

SEQ ID NO: 278662 - protein, 99 aa, Zea mays
  Clone ID: MRT4577_185713C.1.pep
SMLFGIGITSEQYRRLSLLRTGYLVLEITSEQKRTFSCVPSLLSWSLACLSFHYFLVERHFKWVSCMYSPKPSRKGHRQPKYTYITTSFRKKKKRTVEN

SEQ ID NO: 278663 - protein, 72 aa, Zea mays
  Clone ID: MRT4577_185714C.1.pep
MEGPEKTQTPLFFMPPLLENDQKLFFVKWFLTSPGGFSIKKEMGCWAFVFKRFFRYPQGCKIKCFVVLSRAR

SEQ ID NO: 278664 - protein, 111 aa, Zea mays
  unsure (1)..(111): unsure at all Xaa locations
  Clone ID: MRT4577_185715C.1.pep
APRGGEFEDRQGSXRKXEXEPXQEGTTLMANKNAEXQRLTGIYKNILSKANVKLIEGRGKVIDPHTVDVDGKIYTTRNILIAVGGTPFIPDIPRKELAIDSDAALDLPPKP

SEQ ID NO: 278665 - protein, 60 aa, Zea mays
  Clone ID: MRT4577_185716C.1.pep
LMQEIGESLNDEICIKMFMKKYISISSTFLLCSYFLNGFKGTEINAIYMQLWRDSKHNRS

SEQ ID NO: 278666 - protein, 100 aa, Zea mays
  unsure (1)..(100): unsure at all Xaa locations
  Clone ID: MRT4577_185717C.1.pep
LGPSRPAWPGFSPSPRLEEEGRXRDKRXXASLFLXXXXXHSGGCVGRWLASPAGWVSSDDGRRPRPPGRRIXSHRGLAWDIHPRGSLGHSSGEALLWWVK

SEQ ID NO: 278667 - protein, 85 aa, Zea mays
  unsure (1)..(85): unsure at all Xaa locations
  Clone ID: MRT4577_185718C.1.pep
PFMLLDVGKLTQGCGXQCTADGMHYDGGVYDAVMHIMLNALVIESQQRISVAGGFFNRFAPNPLFFLVSHGTQVTRDCCELGKVL

SEQ ID NO: 278668 - protein, 94 aa, Zea mays
  Clone ID: MRT4577_185719C.1.pep
EAPHGLFGRPRHDDRARGHGQHPEPAERAADGPHCGESLRLRRRSRRLLLARFGRARILALVVLLEQVLPVAPQHVGVAGDGVLMRLRMRREKA

SEQ ID NO: 278669 - protein, 135 aa, Zea mays
  unsure (1)..(135): unsure at all Xaa locations
  Clone ID: MRT4577_18571C.1.pep
AEEEGEEGRTAAAAAGAATRXXXTNRQHEEPXRXAPXPEPXKPSXXPAXTKNXGTRGGKXRTDDTNXAXHKAGXTDARXEXTGGDAAXHQETXENRKXXSKPTKKXRADXHDTEGPEPQXENKSETPNTPEEKGT

SEQ ID NO: 278670 - protein, 149 aa, Zea mays
  Clone ID: MRT4577_185720C.1.pep
MRHAHWQQDDRTMSRMARFLATTKWHDIFPHADLQAIGSVTSDHCPLLMQGLSTFSFYRGFRFEVFWTKIDGFNEVVQQAWTSSVRSSDAILRLHVKMIRTAKALLIWRRKTVGNFKDQLAIIQTVLTLLEKAQESRQLSGDELEFRRS

SEQ ID NO: 278671 - protein, 77 aa, Zea mays
  unsure (1)..(77): unsure at all Xaa locations
  Clone ID: MRT4577_185721C.1.pep
EGRKQNTQPINPQTQKLSAQQNKKQKKDKKKTKKKKQKKKTKKNKKTKQKKKHKTKTYKQKXKKKKTQTPKKQKHYI

SEQ ID NO: 278672 - protein, 68 aa, Zea mays
  Clone ID: MRT4577_185722C.1.pep
NTLTLRSLMLLSSESMASIIFFNPLLFISPLIIYYASFLLSPFPIYIKPTIFHFHLLVFCCVLSILIR

SEQ ID NO: 278673 - protein, 162 aa, Zea mays
  unsure (1)..(162): unsure at all Xaa locations
  Clone ID: MRT4577_185723C.1.pep
RRRGGHXXPPGPPXPPXGGTXAARXPAAAGTGGXGPHXPRPPRPPXPXTGAAAAPTPPPRPPTPXAXGPAXPAXRADEGPXXPRGSAAPGPATPAAPAPTAPXPRRPPPGGXXGEQDRQDGRRKTAATPGARAPAPPERTKRATTGPTPGSPEGREGRRSGK

SEQ ID NO: 278674 - protein, 91 aa, Zea mays
  Clone ID: MRT4577_185724C.1.pep
SFVVWQVGWGPVIMQRCFPWWKCLINNEWGLGFFFHLSKLLGIFERYMRTLDMNKFPALIRAGVTHPFAPLGNGGIWELLAQKAAQTKKRK

SEQ ID NO: 278675 - protein, 122 aa, Zea mays
  Clone ID: MRT4577_185725C.1.pep
YDICVNRPRIPIGMNHLIRSFIERQCCSVCLAHALSDLWLRGMSSSQAAAVNSAVAYGECNYELQEQTGVNHGSVFARLPRVTQRDSQPRHLGRRGEGPILTRLLAASGSAMARRVVPDHNP

SEQ ID NO: 278676 - protein, 52 aa, Zea mays
  Clone ID: MRT4577_185726C.1.pep
VMEPCILKCRPQNDTSSPLSISKICFVHFSCSAFNRNIRPREDLLAYKLPSI

SEQ ID NO: 278677 - protein, 47 aa, Zea mays
  Clone ID: MRT4577_185728C.1.pep
CTTNRARFILLPYRVMLHFARSNILNRSGLCLSRIGTGKIPSFTPLK

SEQ ID NO: 278678 - protein, 88 aa, Zea mays
  Clone ID: MRT4577_185729C.1.pep
WTVVVSLIVILRSSFMFHLYAIKGRGWGSRIQQNPLNWCVLMHPFFSRVFFDKSLNHEVMRRLVIQKKQKKKRKKKKKKKKKKKKKTR

SEQ ID NO: 278679 - protein, 271 aa, Zea mays
  Clone ID: MRT4577_18572C.1.pep
MSKAPDDHLQATEQEGSVHSSQQAGQIHVNTADQFSKTELTEGSKIEQPVQVEQQSSHLQQAYPEIQLQQAETDSFQLAEKETGYFGQQSFAGAKVDVAQPPVVQQNAKQTVGQQASSGTQDTRKGPSIPFNMLIPILQAHLDRDKDMQLQTVWAKLRRNEVNKDDFLRVIRNIVGDQMLKQAAHKVFVQMQAQAQRNSQANSSQQSLFSQLSAQQMASSGSAQLHDQKIRPPGPPNQGQKNQVSSSPQAFAPPSGTQPQNSVHYLAHDNP

SEQ ID NO: 278680 - protein, 375 aa, Zea mays
  unsure (1)..(375): unsure at all Xaa locations
  Clone ID: MRT4577_185730C.1.pep
MATLRSPSPRGDVLLDSAPLLGGVGRRRAGALRRPSLRGAARLLRRGGRRAMREPSLLVREAAAEQLEERQADWAYSRPVVALDFLWNLAFILVSAVVLVLSHHESPSMPLRFWIAGYTAQCVVHMVCVAIEYRLRXASSAGRQFLSTRXSGSGSASSSSSDDDREHGSHSRSGDCLSIAKHLESANTMFSFVWWIIGFYWVSAGGEVLTRDAPQLYWLCIVFLAFDVFFVVFCVALACIIGIAVCCCLPCIIAILYAVSDQEGASEDDIRQIPKYKFRKMEEPEKQSVGVPGSSGGIMIECGTNQPIEKVLAAEDAECCICLSAYDDGAELRELPCGHHFHCVCIDKWLHINATCPLCKYNVRKNSSSSGSEEV

SEQ ID NO: 278681 - protein, 123 aa, Zea mays
  Clone ID: MRT4577_185731C.1.pep
METRKEEQAAVGWMTVPAFGEWDVKNGAVPDYSMDFSKIREMRKQNRRELSRASLGGGDDDDVLLQKQQQQQQQQEEEEGSKAQPRNKPSAAVADDGHRRALHDDSPTGRKNFLSYFQCCTRA

SEQ ID NO: 278682 - protein, 38 aa, Zea mays
  Clone ID: MRT4577_185732C.1.pep
LWLFEALMYDHSTLFTFVDKLVIFYYDTNLHMNQFNHP

SEQ ID NO: 278683 - protein, 121 aa, Zea mays
  Clone ID: MRT4577_185733C.1.pep
MESRKEEQAAVGWMTVPAFGEWDVKNGAVPDYSMDFSKIREMRKQNRRELSRSRASVGGGDDDDDLLQKKQQQQEEEGSKAQPRNKPSAAVADDGHRRALHDDSPTGRKKCLSYFQCCTRA

SEQ ID NO: 278684 - protein, 88 aa, Zea mays
  Clone ID: MRT4577_185734C.1.pep
ILPIYLTYSPRLQELNPAISNPPMSHTIPVTQEVRQWASFAWFIFFWGEMGASEIEVYLVSGASLSGPARPGAPKGRFPATLAARLLS

SEQ ID NO: 278685 - protein, 120 aa, Zea mays
  Clone ID: MRT4577_185735C.1.pep
MESRKEEQAAVGWMTVPAFGEWDVKNGAVPDYSMDFSKIREMRKQNRRELSRASLGGGDDDDDDLLQKKQQQQQEEGSKAQPRNKPSAAVADDAHRRALHDDSPTGRKKFLSYFQCCTRA

SEQ ID NO: 278686 - protein, 83 aa, Zea mays
  Clone ID: MRT4577_185736C.1.pep
DRLSTSRLSARPPLPRLSLVWSQVPISRSLLPSSTAQAKNQKPWRRRRRRRRRGRKWRWTAWCKCSCASTSRTWAAAASFVCL

SEQ ID NO: 278687 - protein, 62 aa, Zea mays
  unsure (1)..(62): unsure at all Xaa locations
  Clone ID: MRT4577_185737C.1.pep
FFNPSSTGGKRRMHHSLANHPTNRISLHTMTTETTVCKFSHRIMXHLLNIYVSCPTTQDFKI

SEQ ID NO: 278688 - protein, 259 aa, Zea mays
  Clone ID: MRT4577_185738C.1.pep
MASDPNKDSKSEGLSEAKKGASPTAGAGLPSPFDFSNMSSLLNDPSIREMAEQIASDPVFNQMAEQLQKSAQGAGEQGVPNLDPQAYMETMTQVMQNPQFMSMAERLGNTLMQDPAMSSMLENLTSPAHKEQLEERMARIKDDPSLKPILDEIERGGPSAMVKYWNDPEILQKIGQAMSLNFPVDAATSTVLSGPQETDEEGEDDDESIVHNTASVGDAQGLKKALDGGANKDEEDAEGRRALHFACGYGEVSESVKLC

SEQ ID NO: 278689 - protein, 176 aa, Zea mays
  unsure (1)..(176): unsure at all Xaa locations
  Clone ID: MRT4577_185739C.1.pep
LGTSRPAGXSLRVEKAAAPPRGRLERQNPSRYRPTAPSLCLTAARGVGRHARRAPRMVAATHPPSWRRERPDPRGRELVAGAWSWCSWRCRALAWALQVEARWRWCNGPLTACTWKLTVSTKLGVRSATPTRSITGRESNRLPPAGRPRPRSLPSSRCTVGGCTVLPAGARAGADR

SEQ ID NO: 278690 - protein, 150 aa, Zea mays
  unsure (1)..(150): unsure at all Xaa locations
  Clone ID: MRT4577_18573C.1.pep
MSKAPGDHLQATEQEGSVHSSQQAGQQHVNTADQFSKTELTEGSKIEQPVQVEQQSSHLQQAYPEIQLQQAETDSFQLAEKETGYXGQQSFAGAKVDVAQPPVVQQNVKXTVGQQASSGTXDTRXKGPSIPFNMLIPILQAHLDRDKDMQ

SEQ ID NO: 278691 - protein, 48 aa, Zea mays
  Clone ID: MRT4577_185740C.1.pep
PARFSYHSTPDCTNKLVLMILSSSTETSVLEMSSYMHIDWAPSCHCCA

SEQ ID NO: 278692 - protein, 144 aa, Zea mays
  unsure (1)..(144): unsure at all Xaa locations
  Clone ID: MRT4577_185741C.1.pep
RFLTWXPLNGRPVLVFFFFFFFFSFFIYIGSNHIIVGPLIFGSRGPNRVNPHSCGPPSLCPKAGAQPAXGEIANWRTLFFSLFHTPHISFVWQPARPRFLLVNPPPRLGRWSSFPWSSFGVVRRCWGRPCGCSPFRRRGRPRRP

SEQ ID NO: 278693 - protein, 83 aa, Zea mays
  Clone ID: MRT4577_185742C.1.pep
KAVLQVVERVHLPLKAQLEVSYARLKNAGLMMWAQPIVIVWFGNKQYICFFMPRRVRWRQTMQHCVLKRVVPNSVWPCHAFDK

SEQ ID NO: 278694 - protein, 178 aa, Zea mays
  unsure (1)..(178): unsure at all Xaa locations
  Clone ID: MRT4577_185743C.1.pep
GVVAKSKKYRLASEASPCRVGHIRGKKSVAVAILFAAAGLGCFVSGSFADQGTATYYTVXTPWGGYGNQDKGTLIGGARDGLXNGXPGGGTMYTVTCVGGTNETPNPCNPGASVTAKIVDRCPSPGCXTTFDLSQXAFATIGNSRAXKMVFDYSQGKNNTCMLWEASTNYVHTCKSFI

SEQ ID NO: 278695 - protein, 75 aa, Zea mays
  Clone ID: MRT4577_185744C.1.pep
GSQAPLLAQPPDCRLRDTLDVVAETLTVAFTRRPCPAPCRPFRAQTSPPSWRKTVVCYKKLVGFDLAAVMKSGPA

SEQ ID NO: 278696 - protein, 71 aa, Zea mays
  Clone ID: MRT4577_185745C.1.pep
SDHQPYSSIPTVAPRSSSYSHTKPTKCSTSITRTTSSTWSDSQPSTQHRLPTANRQPLTLISQYIRIKHSQ

SEQ ID NO: 278697 - protein, 333 aa, Zea mays
  Clone ID: MRT4577_185746C.1.pep
MFDEMQQSDTSVAIAHTAFNTFFNTEELDRWLESCDEQGESIGVNKIHVKPQFFDVGKDYNWARGIRSTEIQLADGKNCELHRCWADILDAISKAQHSTDITGWLTILVRDDSNSVDLLTKEGLLTTHDVEIAKGEQEIMNEVFPAESRSSGFGVAMDLPDIWPCYESKPSDAQGYAVKGIPNLRNTCYRSAVLQCLFMLGKLLERILTSTWLAIQGCSQIGVGGVLQLPYLLEFSPVLEELFVEASAWDVLYNFEQGDTWNVQLVGSIDGAAAFGFPETPEQAARARLVSGIKQPWPPPMAFECLDLCMASDNSTIMVSGLGASRISSGGKC

SEQ ID NO: 278698 - protein, 64 aa, Zea mays
  unsure (1)..(64): unsure at all Xaa locations
  Clone ID: MRT4577_185747C.1.pep
KEVFFETKDMESNHLFPSWVFXKTXSCNVVVASTIAXSLVKVFQGRHFPXXILMYMXVSIQGAG

SEQ ID NO: 278699 - protein, 111 aa, Zea mays
  Clone ID: MRT4577_185748C.1.pep
NHQFLIGFLVKKPGLYYSVARGKTPLPGGLNLPGAPTWLKPTFFDKKPFNKIRTAPNRVFFKRKGGLAVLSHFLGEPTTPWFGYGKREINLLTKQFVLTNFLTPNWIYPPF

SEQ ID NO: 278700 - protein, 63 aa, Zea mays
  Clone ID: MRT4577_185749C.1.pep
MDMDHRCHGEYDGDGDGDEEEEETSSVDGDDASVDSEGGGSAEKSTVGRLVRFIGEKVWGAWN

SEQ ID NO: 278701 - protein, 58 aa, Zea mays
  Clone ID: MRT4577_18574C.1.pep
TIVPPLSPKIFCCGGLLGLSARALTPTTFPHSAQAPISFFFSPYLSQQVCLVCENTIF

SEQ ID NO: 278702 - protein, 67 aa, Zea mays
  Clone ID: MRT4577_185750C.1.pep
KGGTQAAQSRENPRPGTNRPKGTPPPLSRRQKWRTPDSPSGTPRKIFFFFLKKKLSFFFLAKARSHR

SEQ ID NO: 278703 - protein, 141 aa, Zea mays
  unsure (1)..(141): unsure at all Xaa locations
  Clone ID: MRT4577_185751C.1.pep
TPPVAXVVFAGHVRTXPRGLDTRNSAXALPLREDLRRKCYCNWRQSPRKVFPRYALXYENDAVKKEIQLQLEKMNKYASAIRVIAHTQIRKMXGLKQKKAHLMEIQVNGGTIADKVDYGYKFFXEKEVPXDAVFHNDEMID

SEQ ID NO: 278704 - protein, 266 aa, Zea mays
  Clone ID: MRT4577_185752C.1.pep
HWVPRGRPSLGPPTVSRGIYCLCTLLLLPSIHVPRARSLSFDLSFSKPQSPGLSQLVNCTGDAYITPDTLELTRNRRDQSSTYSLGRATYMHPVPLWDARTGETASFTTTFSFLISPDPSTFPGDGMAFFLGHFGTSIPTNSSGGMLGLMPAFTNGTGDGTVVAVEFDTFLNHANDDISGSHVGIDVNSLNSTAATDTSSTSRANRNLTSGYEMVATVSYENVTRFLAVQLTIYDTSYNVTRPSISKHLPKRVAVGFPPRLEKGRA

SEQ ID NO: 278705 - protein, 124 aa, Zea mays
  unsure (1)..(124): unsure at all Xaa locations
  Clone ID: MRT4577_185753C.1.pep
MAPSMSLAAKGLLPFGALPSSGVAQRPVSVTASLEHKPNDSKRKLLKLALGGVGLPALLTANKALADDQGVSSSRMSYSRFLEYLDKDRVKKVDLFENGTIAIAEALSPELXNRVQRXRVQLPG

SEQ ID NO: 278706 - protein, 134 aa, Zea mays
  unsure (1)..(134): unsure at all Xaa locations
  Clone ID: MRT4577_185755C.1.pep
DPDKGKHDAGGALQDNSAASDGDLHQTEQAWTRDSVRDXKSDRVPKRVPCKYAALTGDQDGMRDGINDGVDIDLTDQLGNTPGLEALNQGHEPMAPHTLHKGANLNLNNAGSHLCTAIVKRWLNFTAHRDGDPS

SEQ ID NO: 278707 - protein, 86 aa, Zea mays
  Clone ID: MRT4577_185756C.1.pep
NHEIGKKRLQLGSARTGSAPQLGETRGNRTSNYPSVDIGPSGTTKVNAHLCRCFSRPEPSSAFGVAGLQPHARSSNFSYPPSLRAG

SEQ ID NO: 278708 - protein, 219 aa, Zea mays
  unsure (1)..(219): unsure at all Xaa locations
  Clone ID: MRT4577_185757C.1.pep
NPLTYCPWSPDGHTERRWPPRRCTRPPSSGRPSPPPRRRRITMRRTVKSLPHNIXYGPYRXKYXGXFSXQTPSYLTREFPXDYXXDXXGLSADPETFGXXPQXEXIHSRWAKLGXXGCXFXXILAKNGVKFGEAVLFKAGAQIFSEGXLDYLGNPTLVHXQSILANXXFQXVLXXLXXGYRFXXRRPLGKGSTKXYXGXXFYPLGLADDPHXPAELKVK

SEQ ID NO: 278709 - protein, 120 aa, Zea mays
  unsure (1)..(120): unsure at all Xaa locations
  Clone ID: MRT4577_185758C.1.pep
LPIQEMXXRESKIKNFWGIHTLRHHAHVAMLLRAARSLQSRKDDLNGTEKPVYQPAEAGHAGPYHALKEGNLDNLHAIFGMHVDTAYTVGLVGSRPRPPLARSARSTATITAKGGHATDP

SEQ ID NO: 278710 - protein, 79 aa, Zea mays
  unsure (1)..(79): unsure at all Xaa locations
  Clone ID: MRT4577_185759C.1.pep
YYARTASSCHHEELTRPLAESLXDCTTALISHIKRCKSLRSLTEEVRVLSHLLSVCAELTPKNSFSSDGDMLVMWYRNH

SEQ ID NO: 278711 - protein, 105 aa, Zea mays
  Clone ID: MRT4577_18575C.1.pep
GKSVCLCSFIRHYHPVIRSMLSNLTDTAVLAGVLDQEDVELPHLACRGPWSCRSRAACSCRRRRRRRRQRPPASGCTCGGSASCGTCAAVTIVRDLMLCAQYGDS

SEQ ID NO: 278712 - protein, 68 aa, Zea mays
  Clone ID: MRT4577_185760C.1.pep
FSPWAPQKFLVGRPLFGPVENLEPPRFCFFSNPVLSCGCAKNQKRAAPRSAKAMAVVNAKCRGKIRGV

SEQ ID NO: 278713 - protein, 92 aa, Zea mays
  Clone ID: MRT4577_185761C.1.pep
YFFFFFFLFFSGFFFFLRGHETLGKHVKLHTPVWGANYNLKLYRLQPFLDRNIHNVIFCWNNMGIALMSKSKPYACGKGTPAGAIFPEEELL

SEQ ID NO: 278714 - protein, 68 aa, Zea mays
  Clone ID: MRT4577_185762C.1.pep
GRQELYISLVNSMWRSANLDRCSLFYTKCVCALRVFVVVIVADLCNVRLMGWFLIKYMMFPICHKSLY

SEQ ID NO: 278715 - protein, 173 aa, Zea mays
  unsure (1)..(173): unsure at all Xaa locations
  Clone ID: MRT4577_185763C.1.pep
RPLLKNPWRTSFXISHGGISIGGKRLDVPEAILALRPDGTGGTVLDSATTLDSLGAIAFKEAGRAVMEGMKLPAANRSIDDYPVCFELPRGMSMEGVQVPPLVLHFAGDAEMSLPRDSYFQEPSPGMMCLAVMQAPFEGAPNVIGNVQQQNMHVLYDLGNRKFSYAPTKCDSI

SEQ ID NO: 278716 - protein, 58 aa, Zea mays
  Clone ID: MRT4577_185764C.1.pep
AASCISLIWSYQQWRPDEAAWRPGRRRQRPQHPPRAGPPPVVRLPGEGVRRDADRLPP

SEQ ID NO: 278717 - protein, 27 aa, Zea mays
  Clone ID: MRT4577_185765C.1.pep
VNIIQCRWEVFLKTSFYSNYGFMFKGD

SEQ ID NO: 278718 - protein, 227 aa, Zea mays
  unsure (1)..(227): unsure at all Xaa locations
  Clone ID: MRT4577_185766C.1.pep
GPSRPARVLPAPFRLRDGAGAAARSFSASFVFAIVSNYTVLSDNGMALVVAPSTRLSAFNAGQYLGVLNVTDNGRDGNRVFFVELDTMLNPEFQDMNSNHVGVNVNSMRSLRNHSAGYYDDATGAFTNLSLISRRPMQVWVDYDGSAARLDVAMAPAGVPRPRKPLISTPLNLSAVGADDGTAYVGFSAXTGVIYTRHYVLGWSFATGAAAPPLDISRLSALPGFGP

SEQ ID NO: 278719 - protein, 35 aa, Zea mays
  Clone ID: MRT4577_185767C.1.pep
THGKQLCTMTYAKPLMRLTYSGIAGYALRGHRSVN

SEQ ID NO: 278720 - protein, 164 aa, Zea mays
  unsure (1)..(164): unsure at all Xaa locations
  Clone ID: MRT4577_185768C.1.pep
LRSLRGSASLPVGGLRASSVRPPCGRLLRSAGALLFFFAFLVWGLFAFFPARFPSPGPRFSPPPPCGXPPVLPGLLPFPPXSPFPPPPPPPPPPPPPPPPPPPPPXXXGPPRPPPPPPSSRPPPXPPPPPXPPPPPPPPPPPPPPPPPPPPXPPPLPPPPPPPP

SEQ ID NO: 278721 - protein, 202 aa, Zea mays
  Clone ID: MRT4577_185769C.1.pep
MTSRDRPRLLFDTVCALTDMQYVVFHATVGSQGPLAIQEYYIRHKDGRTVDNSAERQKVSRCLVAAVERRATHGVRVEVRAADRSGLLSDFTRVLREHGLSLLRVELKRHKDEAFGIFYLVTDTGGEVRAESLRAVQARVAEMDISLDVVKEAPGWLPVRKTSVPTPPAAGSQPLERPRPSLGSLLWSHLGKLSNNFNNIRS

SEQ ID NO: 278722 - protein, 122 aa, Zea mays
  unsure (1)..(122): unsure at all Xaa locations
  Clone ID: MRT4577_18576C.1.pep
SLATILTLSGSGSDALILTQCSLFYSSIIPQFLPHSWVAFKHPPVXAYRLQQAIAVSYLHQPIVQWQQLSLAHIAIPTIAPNLKQQVLTPLTQLAIMNPSPYLKHLLISCNPLTVTDALPFQ

SEQ ID NO: 278723 - protein, 303 aa, Zea mays
  unsure (1)..(303): unsure at all Xaa locations
  Clone ID: MRT4577_185770C.1.pep
RNVLLKINAKLGGMNSKLALEHRQMIPVVTQIPTLILGMDVSHGSPGRADIPSIAAVVGSRCWPLISRYRASVRTQSPKVEMIDSLFKPLDDGKDDGIMRELLLDFYQTSQQRKPKQIIIFRDGVSESQFSQVLNVEHNQIIKAYQSMGQGDLPKFTVIIAQKNXHTKLFQADSPENVPPGTVVDSGIVHPRQYDFYMCAHAGPIGTSRPTHYHVLLDEIGFSADNLQKLVLSLSYVYQRSTTAISVVAPICYAHLAAAQMGQFMKFEEFADTSSGSVNSSSPPSIPELPRLHADVCSSMFFC

SEQ ID NO: 278724 - protein, 94 aa, Zea mays
  Clone ID: MRT4577_185771C.1.pep
TLQGVRVEVRAADRSGLLSDFTRVLREHGLSLLRVELKRHKDEAFGIFYLVTDTGGEVRAESLRAVQARVAEMDISLDVVKEAPGWPAVRKTSV

SEQ ID NO: 278725 - protein, 239 aa, Zea mays
  Clone ID: MRT4577_185772C.1.pep
VVMVGSHSKKLKEGDEVYGMVSENPLQGPKQSGSLAEYTAVEEKLLALKPKGLDFAQAASLPLAVETANEGLERAGISAGKSVLILGGAGGVGSLAIQLAKHVYGASKVAATASTKKIELLKSLGADVAIDYTKENLEELPDKYDIVFDGVGQGDKAVKVVKEGGSVVVLTGAVSPPGFRFVVTSNGSVLEKLNPYLESGKLKPLIDPEGPFSFSQVVEAFSYLETGRATGKVVISPIP

SEQ ID NO: 278726 - protein, 593 aa, Zea mays
  unsure (1)..(593): unsure at all Xaa locations
  Clone ID: MRT4577_185773C.1.pep
MAPHLLTPPALTVTGAAAPGRLGSAGSADPRTPRPRAPWPTFCSSPSRGRRELRKRKGLSVAAAAEVAEPGGPAGAMRLNEYMVAVDRPLGVRFALGVDGRVFVHSLRKGGNAEKSRIIMVGDTLKKAGADGEGLVTIKDLGXALRDKSGPCSLVLERPFAPFPIHQLHQNEDYHILFNRGRAAVASWNSAVWSTKMNESSTGDGKLGFAVFSPRLLSSQGWALLSNEKGGLNQSSTNLANRVSEIVGLYSDEDDDNAEWAHGSFPLEEYIKALDRAKGELYYNHSLGMQYSKITEQIFVGSCIQTEKDVKMLSETMGITAVLNFQSESERINWGINSEIINSSCRENNILMVNYPIREVDSLDLRKKLPFCVGLLLRLIRKNYRIYVTCTTGYDRSPACVISYLHWVQDTPLHIAHKFITGLHSCRPDRAAIVWATWDLIALVENGRHDGSPTHSVCFIWNSGREGEDVELVGDFTSNWKDKIRCSHKGGSRYEAEVRLRHGKYYYKFIVGGQWRHSTSLPTETDEHGNVNNVIRVGDIARIRPAPSQLHIKDPSVVKVIERALTEDERFLLAFAARRMAFAICPIRLSPKQ

SEQ ID NO: 278727 - protein, 74 aa, Zea mays
  unsure (1)..(74): unsure at all Xaa locations
  Clone ID: MRT4577_185774C.1.pep
FPQLSPCXNEEGKTVDLYVPRKCSATNRIITXKDHASVQINIXHLDANGLYDGHXFTTFALSXVVRAXGDADTP

SEQ ID NO: 278728 - protein, 66 aa, Zea mays
  Clone ID: MRT4577_185775C.1.pep
LCLIPKHDNDEGLHAELVNPEALLSGPLKKFSGEITPAGVDKEPHWCLGFSLGLNLEYHLCCPTFF

SEQ ID NO: 278729 - protein, 53 aa, Zea mays
  Clone ID: MRT4577_185776C.1.pep
MSLPTSSDQMWDRSRLVRSSLATIPAGHQGQSPECLITGEADQMDQWLPELSL

SEQ ID NO: 278730 - protein, 168 aa, Zea mays
  Clone ID: MRT4577_185777C.1.pep
MAIARTGVYVDDYLEYSSTLAGDLQRILSTMHELDERAHGILGQTKGQIKFLLGVPSHGFDRPNVVHDENASENMTRDIENSQDNALSLCTEKVLLARQAYDLIESHIKRLDEDLGQFAEDLKQEGKIPPDEPHILPPMPVGGRDERRRSSFSTPQAARKFVREKEWE

SEQ ID NO: 278731 - protein, 87 aa, Zea mays
  Clone ID: MRT4577_185778C.1.pep
YEYSFILLEYGSSFNSRADSLTNRARMSAQLEKKFKRADLSRTELTMNRASQRATSISSGTIVSFSNCIFICKSNGCDACADSFVHV

SEQ ID NO: 278732 - protein, 42 aa, Zea mays
  Clone ID: MRT4577_185779C.1.pep
RPRRHLLLYLTQTKIRFQRLTGLLFKFADPWVGPGDNGYILN

SEQ ID NO: 278733 - protein, 73 aa, Zea mays
  unsure (1)..(73): unsure at all Xaa locations
  Clone ID: MRT4577_18577C.1.pep
PLXHALCAPGRYLAELGVLPNPLHGLAGICWSGTLTCLMVEVLYLFLVHRLLFFLVHSSAFPGGGCGPTAPDA

SEQ ID NO: 278734 - protein, 39 aa, Zea mays
  unsure (1)..(39): unsure at all Xaa locations
  Clone ID: MRT4577_185780C.1.pep
FWDCVSESGTFGLGVGRXVVSVVWLGYERSGVKNGPPFC

SEQ ID NO: 278735 - protein, 97 aa, Zea mays
  Clone ID: MRT4577_185781C.1.pep
RRPRAVFFSSRCRMVCAGSFGFLTPSLAIADPAFVYGVELIKQSSSSLESRYVLLSSHLQAVRLVRHRCLLFELSVAFAARTSILRLSQDRRPRPGP

SEQ ID NO: 278736 - protein, 141 aa, Zea mays
  Clone ID: MRT4577_185783C.1.pep
MAGASAVAVLPVATPAAPRRGGAGPCSCLAPRGSSFYRRMNCRRDSPSAAAPTRRRVVARLSGRDPGEAGTDAGVGQILKGDDSGYLWTLVLGSLGGAAVIKYGSILLPDITRPNIVVALLMVSLPVVAAVLALLKASSVD

SEQ ID NO: 278737 - protein, 31 aa, Zea mays
  Clone ID: MRT4577_185784C.1.pep
QLLMVRHYYVKNLDTRTETYPKIIYGPIFGV

SEQ ID NO: 278738 - protein, 41 aa, Zea mays
  Clone ID: MRT4577_185785C.1.pep
SSQEAEDTSHYIFFLIAHLEEFTRVLLGHVTLLIYHLTTFR

SEQ ID NO: 278739 - protein, 63 aa, Zea mays
  Clone ID: MRT4577_185786C.1.pep
MLAPLLAAFAVVFLLLLSRPCARDMRLFLASLCQQLVLSLLGFLAGLRLLSGVAAALEEDRSK

SEQ ID NO: 278740 - protein, 186 aa, Zea mays
  unsure (1)..(186): unsure at all Xaa locations
  Clone ID: MRT4577_185787C.1.pep
PRSGLNPVPAADDHADLITTASDSWRVLLYCIHHTDPSFLWEFFVEHALVXPGANGPQEYKYYRDSLIPKLQEQTYLHIRLTDAREGRLTVRRHAQIRRXFDFHEEXGLINYCALPSETNQAKDNREEVAQQASLSSVAIAPNKLCTDXRTVCALAYYACDKADISLCARCYVNNNYRPDLSPANF

SEQ ID NO: 278741 - protein, 125 aa, Zea mays
  Clone ID: MRT4577_185788C.1.pep
DLSSSTGPSREAKSRSATKKTTLCAIADHSRPRCRSSRRTQRRDRFCAHVADHPRLRREHHQVVRSSVWYLYLFCISPMASLGRPSSCIDFLLQDTSKLLVILTSNKMSKTIKMDRKCSSKDGLA

SEQ ID NO: 278742 - protein, 40 aa, Zea mays
  Clone ID: MRT4577_185789C.1.pep
HSSQRSSPPMLAPTSNKRLRVSAGCSCKTARLPTSLMEVT

SEQ ID NO: 278743 - protein, 136 aa, Zea mays; identical to SEQ ID NO: 199630
  Clone ID: MRT4577_18578C.1.pep

SEQ ID NO: 278744 - protein, 55 aa, Zea mays
  Clone ID: MRT4577_185790C.1.pep
SGTWSATLASSPATPTPSGGAPVRSRLMPTCMSSSALGSYPSWLGTSSDDDNEHI

SEQ ID NO: 278745 - protein, 120 aa, Zea mays
  unsure (1)..(120): unsure at all Xaa locations
  Clone ID: MRT4577_185791C.1.pep
LLMLLGRSVSAVTATIFPQCSQDAIDSLLLPYLSPTLHSXCENQVLQPYRIQKGITDGILPISYLYLQRXIRPITAVTLGELMXQKIRERQRQQLGLVKPADYSRQQQSLTFNQIDVLNS

SEQ ID NO: 278746 - protein, 79 aa, Zea mays
  Clone ID: MRT4577_185792C.1.pep
FFHFSDTKLFQNTPVRVGVLLEYLVRAKVVGVINACFKVVPFRINLKNRSRSFLKKLEPFFLNQRCGWDSLQVLLIKNI

SEQ ID NO: 278747 - protein, 91 aa, Zea mays
  Clone ID: MRT4577_185793C.1.pep
GLHRHGEFGPPFMAPVCIVKPRFCPPCKVCSGEVSGKPLSSLARGCLSPFLPVFFGLLEYTMGGRFLRAGYITAYSWGGLPGAPPNLVGCP

SEQ ID NO: 278748 - protein, 72 aa, Zea mays
  Clone ID: MRT4577_185794C.1.pep
GRRSGGDSAVDCVGGFLLNTWCGNNNKIKPLSLSSHRECLRGIRLVDSKILWRAHRPSSMNMVCIRPQEHAL

SEQ ID NO: 278749 - protein, 100 aa, Zea mays
  Clone ID: MRT4577_185795C.1.pep
MASLFPVAPRHRRARVLSVEVVAPLSLWLPCPRTGFGGRVHIRLRGINVRIPGIVIVSAALSHLAFTPEDEREAPVPRSSSIGDMRKSDNVVDFVVSSRI

SEQ ID NO: 278750 - protein, 71 aa, Zea mays
  unsure (1)..(71): unsure at all Xaa locations
  Clone ID: MRT4577_185796C.1.pep
GGVAWLKRRFRRYPFCPQICVFYKIVPSIPNVQFQSWQKSTWARFFVLSLPSVVGYFFFCXFGENSNICFR

SEQ ID NO: 278751 - protein, 67 aa, Zea mays
  Clone ID: MRT4577_185797C.1.pep
KQCSTWSITVTMFGHTSSSSNGRKQCVYQITKTNIGYRLKSLHDNVMYSCSSCYFYLLMRKCMVQSK

SEQ ID NO: 278752 - protein, 48 aa, Zea mays
  Clone ID: MRT4577_185798C.1.pep
LYILNTMRELACHIFCFFKRDLLKLFYLPQLLQHLICLFVLLLIIKDS

SEQ ID NO: 278753 - protein, 75 aa, Zea mays
  Clone ID: MRT4577_185799C.1.pep
ECNTTTQLHNKYCSTKHSLMVHITTNTKKGMLLLKNKEWNVEHNLRETSEATPTSAADHFHTKPRQRPSALVGCP

SEQ ID NO: 278754 - protein, 167 aa, Zea mays
  unsure (1)..(167): unsure at all Xaa locations
  Clone ID: MRT4577_18579C.1.pep
MARTKQTARKSTGGKAPRKQLATKXSVCPSLPVSDPLFCSLGFPSETRRRLCCGXAARKSAPTTGGVKKPHRYRPGTVALREIRKYQKSTELLIRKLPFQRLVREIAQDFKTDLRFQSHAVLALQEAAEAYLVGLFEDTNLCAIHAKRVTIMPKDIQLARRIRGERA

SEQ ID NO: 278755 - protein, 130 aa, Zea mays
  unsure (1)..(130): unsure at all Xaa locations
  Clone ID: MRT4577_1857C.1.pep
SLSISYLCGLYQKLSSIIDSCAEIANELKTDTPVNIRIADSAPVCDDRGVTIFNTFMDTNTIXDAEDDDCPAQDALFKDHDRLVSDDALANHDGADXHLQATVRLLVPSDQIACIIASGEHIIQRIRSES

SEQ ID NO: 278756 - protein, 95 aa, Zea mays
  unsure (1)..(95): unsure at all Xaa locations
  Clone ID: MRT4577_185800C.1.pep
LCSRHANRAYLLSSLFFHLGWXSISIGPWLYXXAFPLKKTKRLRPXGXLTFTLXNYLERVIFLTAXPYPPLIPIYPAQDKCGTSMHRPHSTRERA

SEQ ID NO: 278757 - protein, 39 aa, Zea mays
  unsure (1)..(39): unsure at all Xaa locations
  Clone ID: MRT4577_185801C.1.pep
ALTAELSDDRLSHQDDLVXYRDLEEMIGRYEMEMSSCLW

SEQ ID NO: 278758 - protein, 84 aa, Zea mays
  Clone ID: MRT4577_185802C.1.pep
TEDIHAYVRALAYYPYRHPGVMARNARIPVSCYQHLTHRLQLACEESRQRRRTIYMPPSFYLPHDICHHRGMSTRRVTSLWLSR

SEQ ID NO: 278759 - protein, 108 aa, Zea mays
  unsure (1)..(108): unsure at all Xaa locations
  Clone ID: MRT4577_185803C.1.pep
MAMTTTYATPLSAPLKEAAAAFPTRRPPSVPARLDLTHASLNALTYAAGARLPPTPESCRDTWHHLSLPTTGALPIMFLSVIPTRGATAPVNPAYTQEEFXFYLSDSD

SEQ ID NO: 278760 - protein, 60 aa, Zea mays
  Clone ID: MRT4577_185804C.1.pep
LGAVEYGYELVDGAYVLSWVKICVRWLAAGRGCEYWLVSNGPVPQGKATCEASLCNGRRG

SEQ ID NO: 278761 - protein, 96 aa, Zea mays
  Clone ID: MRT4577_185805C.1.pep
STVYAESVRWAQGLRVRQAGLIHGVSAVAFHVHVPAHAGGTLSSCSSPGTRHSTMMAQFRQMTPWLHLTARPAAIESPSPARMACSVQLEPNSELT

SEQ ID NO: 278762 - protein, 126 aa, Zea mays
  unsure (1)..(126): unsure at all Xaa locations
  Clone ID: MRT4577_185806C.1.pep
MAARSSSQQLIATAVLAAPLLLLAKGTKTASEKMSCGEKTSPVAPSLGYTMASATSPSTACCTAMRSLNRRASSSANRQTTCNCLKSMTARLGGXVSMTKTANIPGKXGVSISASISPTANCTKIN

SEQ ID NO: 278763 - protein, 217 aa, Zea mays
  unsure (1)..(217): unsure at all Xaa locations
  Clone ID: MRT4577_185807C.1.pep
AALRRLAGTQRKKNLSLHPDRKETERKHDRVTQQLNTPVSLCEGLSLHTASACARQMPCPCHLLQALYVAAPGLMTMMGVCDLHPYWQYLRQLGTARRMGRAPYXYSGVHHTTTMNHPLRHTASSSKHMNMMDEKPIPHHVQXMMIXFERATAPIMSLYDPFLMHQHKQMLTAYXLNPMAMMMAQXMPAXMSGLYHDQLPQYHTTFCGASDAIPPYY

SEQ ID NO: 278764 - protein, 55 aa, Zea mays
  Clone ID: MRT4577_185808C.1.pep
TNSHFSYQKYIYKWPEYGSHLPFSHQAFSSPFNNPITCPSWLHASRSRGIMSRSD

SEQ ID NO: 278765 - protein, 56 aa, Zea mays
  Clone ID: MRT4577_185809C.1.pep
QSHLLHQRLLLRHGRVQHLTSKQAKVVRRIRKRRKARPGFSNGADCYYAVMFPVIF

SEQ ID NO: 278766 - protein, 136 aa, Zea mays; identical to SEQ ID NO: 199630
  Clone ID: MRT4577_18580C.1.pep

SEQ ID NO: 278767 - protein, 351 aa, Zea mays
  unsure (1)..(351): unsure at all Xaa locations
  Clone ID: MRT4577_185810C.1.pep
MFNIVSSWNKRRRSRSLDQLNPWVYKPAELWQAKEQEHHHPPPKKRSCTMVFTLKEMEEATNLFSDRNLIGKGGFGRVYRGVLKDGQIVAVKKMELPTCKQADGEREFRVEIDILSRLDHPNLVTLIGYCADGKHRFVVYEYMPRGNLQDILNGIGEVRMDWPLRLRIALGAARALAYLHSSTAVGVPVVHRDFKSSNILPTXRYEAKISDFGLAKLLQQDQDLHTTTRVLGTFGYFDPEYALTGKLTLQSDVYAFGVVLLELLTGRRAIDLSQGPQEQNLIVGIHQVVGDRKKLRKVVDRDMPRGSYTLESVSMFAALAARCVCFDSAGRPPMQDCVKELQFIMYANMKI

SEQ ID NO: 278768 - protein, 59 aa, Zea mays
  unsure (1)..(59): unsure at all Xaa locations
  Clone ID: MRT4577_185811C.1.pep
LYILFFFFVVFLFFILYIXTCLFIXQCSFXRSKVPTALVSXLPNDTSGDHAHRLRVPAG

SEQ ID NO: 278769 - protein, 125 aa, Zea mays
  Clone ID: MRT4577_185812C.1.pep
RPGPCPETAATLASPASQARDSLPAAGSQIWFEGLEPEVPYHQVLGPTACLASPISPRSLPISAGYCNESGSSINQSTFPLVIGMLKQDRDSERRRCSSLSPWRRSSSPPDPDAASESSVGLLDS

SEQ ID NO: 278770 - protein, 105 aa, Zea mays
  Clone ID: MRT4577_185813C.1.pep
LRACCDQLRGLIRLATQVVLWLLGQGSIIVWGLIVISGGLSPVITGEKREERGRTQAREADRDTSVISTQSFKQVKHSYALKIRKEYINHLGIKKAPSWFICPDC

SEQ ID NO: 278771 - protein, 81 aa, Zea mays
  Clone ID: MRT4577_185814C.1.pep
ERNRLRASADSSKSIFLEAQHHMVSCGSNVDIELAHRYALLKSSPYRLIHECIKVLPLIATTCNCRNCPCCPIWHPSLTRL

SEQ ID NO: 278772 - protein, 88 aa, Zea mays
  Clone ID: MRT4577_185815C.1.pep
PLPRKDGGQRMAPKIPRGKYWLPVGGHPSNPWQSIFFWAGLLPPPPLLILARKGGPPYRPPLLPMNGGPLGFEGVPIFYNSQAPEGGT

SEQ ID NO: 278773 - protein, 160 aa, Zea mays
  Clone ID: MRT4577_185816C.1.pep
GRFRIVERAATVTHRIRPRSLCPKARRKRALSPLTSPPSAWTSPPVVHGVPFHFHLHDESSPLTCTTALVPSFPFWTPVSVAVPRLYLCAFQKNSTCPRCRADNCHPRAPRYKKAHLADFSVKPKHSRKPEQLQKPKCLISTTTHPCYCSSPSSSTYRHA

SEQ ID NO: 278774 - protein, 400 aa, Zea mays
  Clone ID: MRT4577_185817C.1.pep
MGAREAGAGSSSAHCRLSTMAFAASPSLSALASSSSSTAAAPTPSSNPLHEPRPLHLSLKPVLPLPKPHALSCSAPHIPRAAAGDGSGVGNGGKDGGGGGGGEDEDDCDDADFGPLLGFNEVLHLAAARGVALPGDMLEAAKDAGIREVLLLRYFDLQAAPWPLGVLIRAFSMLRNRMLADPSFLFKVSTEIVIDSCCATFAEVQKRGKDFWAEFELYAADLLVGVAVDIALVGLLAPYVRIGKPSASTGLFGRFSRMAGSLPSSVFEAERPGCRFTAQQRIGTYFYKGVLYGSVGFVCGIIGQGIANMIMTAKRSVKKSDEDIPVPPLVKSAALWGVFLAVSSNTRYQIINGLERVVEASPVARRVPPVAMAFTVGVRFANNIYGGMQFVDWARWSGVQ

SEQ ID NO: 278775 - protein, 104 aa, Zea mays
  Clone ID: MRT4577_185818C.1.pep
SLFFPCYLDLYTDVCSLFRSVKKSDEDIPVPPLVKSAALWGVFLAVSSNTRYQIINGLERVVEASPVARRVPPVAMAFTVGVRFANNIYGGMQFVDWARWSGVQ

SEQ ID NO: 278776 - protein, 95 aa, Zea mays
  Clone ID: MRT4577_185819C.1.pep
SLAGGRSVRGPPRAAVELITQRCSTQRRAEPHCPLRIAGTGPGATSPVPCSQLPTPYRVPAPAATATMPGPRPRPACWEEERAASYSMYHSAQRS

SEQ ID NO: 278777 - protein, 136 aa, Zea mays; identical to SEQ ID NO: 199630
  Clone ID: MRT4577_18581C.1.pep

SEQ ID NO: 278778 - protein, 95 aa, Zea mays
  Clone ID: MRT4577_185820C.1.pep
EYPRAIASIPDFVPVKVLISAGISLSYCTRSLERSCCDSVPWFLIFNSRLGEMCSSCSSQLEEAGISSAVKLMCLSYRILSLKSFRYSLGAAPDR

SEQ ID NO: 278779 - protein, 98 aa, Zea mays
  Clone ID: MRT4577_185821C.1.pep
MHRRIVNLAAHRHAGARLPAEGQLTPTKAHPPRSHGRLTSSLMMLARDDGKKEMDEPHRSGILCEIYSRGSLMPIPYGSPSRDHQQRSSRGCHPKCLP

SEQ ID NO: 278780 - protein, 196 aa, Zea mays
  unsure (1)..(196): unsure at all Xaa locations
  Clone ID: MRT4577_185822C.1.pep
INEVPEVHVDSRMDPSYESAEEPDYKKAVDXDHASEWARSXFPGRKGTELNYVENHTQKSLDTSSLPTEDVDHRSGAGSNINLNNMAPEPASLGILSNDTEPEKVWHYKDPNGNVQGPFTLLQLSKWASFFPRDLRVWLTFESEENSLLLTEVLPKQQKDFIQLSTVTTSDKSMWAGSGQDRANANNSSSPMGYNM

SEQ ID NO: 278781 - protein, 104 aa, Zea mays
  unsure (1)..(104): unsure at all Xaa locations
  Clone ID: MRT4577_185823C.1.pep
MISATPAAAMKRNPRVTSSRRKCRKADFTGPXSVSRDLMYAGLSTELRHKYNVRSIPIRKDDEVQVVRGTYKDREEKVEHVLKIACRMLDPIKDQLTVLSYTEF

SEQ ID NO: 278782 - protein, 90 aa, Zea mays
  Clone ID: MRT4577_185824C.1.pep
FSGYGIMTTLIIKSQVRSSAKRIPTDETGLSCHYCCCCLNELLIFFYILKRRKWMRLNLGKEDGCVRLGESTLNLVILIVMESERNSLWR

SEQ ID NO: 278783 - protein, 131 aa, Zea mays
  Clone ID: MRT4577_185825C.1.pep
MCEISKIRCAELVFLKSYHHLPHCSFQIIHYCRAIISRRMHNALRDFTPPLTMSKLLLDVKILTLQKILPGRQLHLCFPLLHQFRQKGLTVWCPKLQLVLLFILKKLGRGEKDHHKLACYDQLETQRISGS

SEQ ID NO: 278784 - protein, 133 aa, Zea mays
  unsure (1)..(133): unsure at all Xaa locations
  Clone ID: MRT4577_185826C.1.pep
RGPPGPXGGGGPPGPVRXPPGGPNGRAGQTGGRPGXPPPSSSPKSPSAKPPRSRSPXDPTPPPPVLAPALPWPREKARPMGEGGGGTPKLLPRXLFPPPVGPPXPPHSGXWAPPPPPFVRGRFPCNPPGLLGP

SEQ ID NO: 278785 - protein, 68 aa, Zea mays
  Clone ID: MRT4577_185828C.1.pep
QNNTIHCQVEDLILQKQIKSRENNINPTILMMLQKYVIDFQVRYCRTHGYKTILSNLPCLFHHWRTGT

SEQ ID NO: 278786 - protein, 47 aa, Zea mays
  Clone ID: MRT4577_185829C.1.pep
LYFLVAIDGTFGYLTLSVKQVFYHMYDTLTVFSSPFYHVLYINTMIF

SEQ ID NO: 278787 - protein, 132 aa, Zea mays
  Clone ID: MRT4577_18582C.1.pep
AGVVASSGIGHLVGLIRRVKEMVPDLLSTPGSRAEADHCQGQHAPPPSFWYETFTVTDWRNLGLDAVDFGGGPPERVLLRHDRRAMVPSCVVCPRSTAKRHECDGVVVSSKFVKPQHVDALLAELAALLASG

SEQ ID NO: 278788 - protein, 78 aa, Zea mays
  Clone ID: MRT4577_185830C.1.pep
PGALGILLERHLSVYRSQARNIGGCATTAVGKFQVVCGAGECHRQERCRLRCPRRHRHHLFCDQAPFVHVPVLNRTCS

SEQ ID NO: 278789 - protein, 85 aa, Zea mays
  Clone ID: MRT4577_185831C.1.pep
MAHEIMKKSEKDIHDAREAPKAAEKAAELERRIVELSPPPEPFDPLADPETKKAIEIINMAEAIVDEVVTKLLTEAAEKVLKEED

SEQ ID NO: 278790 - protein, 212 aa, Zea mays
  unsure (1)..(212): unsure at all Xaa locations
  Clone ID: MRT4577_185832C.1.pep
ESLPEXVVLXFPEMTSSTRRNTWLALIREVLSIHRFISAYSIVSXVHRWEVHSRTILGVVRLHAAREMLRMSPPPASSFLVFSLYGDMPKGDFVLEQLASNLKRTSTITRLSASYVFKGLSRSSSVPPLSAEVAAEGRGADDDASGREHERPLASLEDKIGRVRDEAREVTAANAAVEGMKDEGISDSLLVLVGLVGPVGKLRPAIQRITSW

SEQ ID NO: 278791 - protein, 80 aa, Zea mays
  Clone ID: MRT4577_185833C.1.pep
MPVHPAEETASGSITDKVAKESKDSNASDHPLHDEENQATSGGSVAANAHKANPGPVHADNLPEPASKEELKKRAEELNK

SEQ ID NO: 278792 - protein, 90 aa, Zea mays
  Clone ID: MRT4577_185834C.1.pep
KHSTSAYQWCQLPSCGRARGGRCGRHWGVATLTLATTHTAARRPGAGTGGEGTRRLPYTDAANEWARDRRESEHGSLSFARLILCFRYLR

SEQ ID NO: 278793 - protein, 184 aa, Zea mays
  unsure (1)..(184): unsure at all Xaa locations
  Clone ID: MRT4577_185836C.1.pep
PPPPPWGSSLSCAVCSSPSSPVAIPLPDISRDAYLLPARSFFLLSSLPRRRRVPCPLLFQLPVVEALCAQGLPSHGSARLPAPSAAPSCLSLSLSAPPLHRALPAPSSPSKLPCRAARAAPRARPNQTVPSLLLPVSFLYLQLLSHGVQCFSLLASPSSTLCSSLQPHPPAPXSQRXRXSSPAE

SEQ ID NO: 278794 - protein, 94 aa, Zea mays
  Clone ID: MRT4577_185837C.1.pep
PQCPPPSPRTPPPPSSLRSAPSWTLSLTRHAPSRDDEHDVRLGSLMSSMSSLLLLPSYRALPDGLHVSPSSLLDLRRSRRSEAPRRRRLHSCVD

SEQ ID NO: 278795 - protein, 61 aa, Zea mays
  unsure (1)..(61): unsure at all Xaa locations
  Clone ID: MRT4577_185838C.1.pep
LXXGXAELASGEATXRYGSLRGLTAARLLAAAFLLSVAVTAARAQDRTEHEEEFSYVVGDE

SEQ ID NO: 278796 - protein, 55 aa, Zea mays
  Clone ID: MRT4577_185839C.1.pep
FMAWDKPPLTHPVNLTTEHFDAMANNGAPFAHSFANDNSVLDMIDAKLLGRAPSW

SEQ ID NO: 278797 - protein, 52 aa, Zea mays
  Clone ID: MRT4577_18583C.1.pep
TWDNFFFFGPHQFNTEGRHGQHLPRNAKYPNTGQFTAEFSMTRRINGHMRGK

SEQ ID NO: 278798 - protein, 36 aa, Zea mays
  Clone ID: MRT4577_185840C.1.pep
KCGSIGEARAVFESITCKDLVSWNYLIFGYSQHGLA

SEQ ID NO: 278799 - protein, 77 aa, Zea mays
  Clone ID: MRT4577_185841C.1.pep
APRDILLVKVTLLVLGFSARTVRSHSIACARAESRRLTVCDRPPSTSAVWTSLLRNGRRSAWLDPRNLARPRAGGPP

SEQ ID NO: 278800 - protein, 134 aa, Zea mays
  Clone ID: MRT4577_185842C.1.pep
AGSCRARASSGAAWRVGAPRSSPSSASPRTPKAEEFRASFERGVFPVPLPKAEVPPRGVPSVQISGWGRHGGGVNGRVAFASRYRVLGLRLWPPWGWSCGCCAPVCLVRTCAVQCFVVILFSMSRTGEAPRTQV

SEQ ID NO: 278801 - protein, 144 aa, Zea mays
  Clone ID: MRT4577_185843C.1.pep
HIAGSTLGVLSTDSFTHMGGAKAQLNHIGPARSFLAPPKINQTWGKKKGGITSPPVNNPPGRGGLSFWKARGKACFSFKRGGLWCLLTHPQNKRPITGRARACPPRRRRPFEVGQPPPNKLGEQGGGGLVVVIGVGARPGHQKP

SEQ ID NO: 278802 - protein, 159 aa, Zea mays
  unsure (1)..(159): unsure at all Xaa locations
  Clone ID: MRT4577_185844C.1.pep
THYXSAMLPITSDVPGGCVIIREHIPITNLFTCVWFNEVDRFTSRDQISFSTVRDKIRARVGWMPEMFMDCERRNFVVQVYHRELLEQMIASGRMPPLAAAVTHANVRVGSRKAPPTKKPSVKRKREKKSSSRRRLPKPIAQGLDANVTQVFFSVAESG

SEQ ID NO: 278803 - protein, 93 aa, Zea mays
  Clone ID: MRT4577_185845C.1.pep
MCIIGLNLKTMQVGLIATPDVHSFELTKKDHFIILGCDGLWGVFGPGDAVEFVQNQLKETSSATLAVRRLVKEAVRERRCKDNCTAVLIVFRH

SEQ ID NO: 278804 - protein, 53 aa, Zea mays
  Clone ID: MRT4577_185847C.1.pep
QHYISSKHKLLIFHLQYENLPSNCYLTIKKNHILLIHPEDHSLVSFTSVYDWL

SEQ ID NO: 278805 - protein, 67 aa, Zea mays
  Clone ID: MRT4577_185848C.1.pep
CPTSLGGWPLVSPVWFVLVLPRFASGCPPPGFRFPRVLLSRCFPARVPFSFCAGKAGYPPPPKTPPP

SEQ ID NO: 278806 - protein, 118 aa, Zea mays
  unsure (1)..(118): unsure at all Xaa locations
  Clone ID: MRT4577_185849C.1.pep
MCFTNFTAIAPWIXHMDGRVVPKENSRADEKLLSGFLEGVKYGAGLGPGVXNTHSPRIPSAKEIPARIDKMLAGXAPNILWVNPEWGLKTPKYTEVKPALTNMVSADKLICAQIPSAK

SEQ ID NO: 278807 - protein, 136 aa, Zea mays; identical to SEQ ID NO: 199630
  Clone ID: MRT4577_18584C.1.pep

SEQ ID NO: 278808 - protein, 84 aa, Zea mays
  Clone ID: MRT4577_185850C.1.pep
SSIAVALYFFISNKRVIKRSLICLCPARCDTQRLFLLVQHPPLPIVHLAWLGGACRFDSALPEDIVNTRPLLLGPSQARPEREL

SEQ ID NO: 278809 - protein, 57 aa, Zea mays
  Clone ID: MRT4577_185851C.1.pep
SAHICLKGFLFYSSDGLTDISCLPVAVYSISVFCGDLGQPLYFLGNSIRIFAFKGLH

SEQ ID NO: 278810 - protein, 98 aa, Zea mays
  Clone ID: MRT4577_185852C.1.pep
RDEPSNEKSDVYSFGVILWELMTLQQPWCNLNPAQVVAAVGFKGRRLEIPKDLNPLVAVLIESCWANEPWRRPSFANIMDTLKPLINKVPAQLIRSDS

SEQ ID NO: 278811 - protein, 134 aa, Zea mays
  unsure (1)..(134): unsure at all Xaa locations
  Clone ID: MRT4577_185853C.1.pep
RWSCSSDGAALLARAAGAGAQHAAWSIITPPMFQRMMSHRGDSGRQGASHTYDPYIEGASQFPGFRTTGDDQTRRRELVAFFGHTAHDTTVGRATAPDRPFVWRYCRXRQHKHTDPPYYGRXPYSYLTTTTTGS

SEQ ID NO: 278812 - protein, 446 aa, Zea mays
  Clone ID: MRT4577_185854C.1.pep
ITFIRRSPPIVHRDLKSPNRDPGQLTDPDSFVNGPYSLSVSSPLHPPKFRSLEITSNFGSVAKQYFSDCHSLNLLFSDSSTGVANSTVISLDHPYSKKHVAGDDVINSWVPGKGQGIMKPDIMVPEAPRVVLPLVTSSNIKLELDKKKELVTTQLRNTVSDLSLAADDLIIPWNELILKEKIGAGSFGTVHRADWHGSDVAVKILMEQDFHPERFREFMREVAIMKSLRHPNIVLFMGAVTEPPNLSIVTEYLSRGSLYKLLHRSGAKEVLDERRRLNMAFDVAKGMNYLHRRSPPIVHRDLKSPNLLVDKKYTVKVCDFGLSRLKANTFLSSKSLAGTPEWMAPEVLRDEPSNEKSDVYSFGVILWELMTLQQPWCNLNPAQVVAAVGFKGRRLEIPKDLNPLVAVLIESCWANEPWRRPSFANIMDTLKPLINKVPAQLIRSDS

SEQ ID NO: 278813 - protein, 53 aa, Zea mays
  Clone ID: MRT4577_185855C.1.pep
KKVELVTLSFQRHIFRGGLNMALFYQRGAFKLDKNLSGLSVTISQGLSSIVWP

SEQ ID NO: 278814 - protein, 156 aa, Zea mays
  unsure (1)..(156): unsure at all Xaa locations
  Clone ID: MRT4577_185856C.1.pep
MSCAPVLVASIATTRAAWWSGSGLGLGGQGKPAPDKCRYTFAYXDRPMXFPVPCAPYYXMYGWLVXDYGFDLSLSXPVEYLQFELGSXLDLNLANNEAGGIIGSLFYCSELKYTPVQPYTEVLLLQPLRXCNLIHCRWAMLGTLGALSVEWLTGVF

SEQ ID NO: 278815 - protein, 61 aa, Zea mays
  unsure (1)..(61): unsure at all Xaa locations
  Clone ID: MRT4577_185857C.1.pep
RAPPADGRDWRAGRWWEHGFVRRVELPEDAXVRKVEACFDDSEGSLEIRVPKTADARQATA

SEQ ID NO: 278816 - protein, 84 aa, Zea mays
  unsure (1)..(84): unsure at all Xaa locations
  Clone ID: MRT4577_185858C.1.pep
LCSMNVIKFARMRWRSTIRWISPPPHLMPLXRVGDLSAGGVIMCICRGTVHARRNQVRGSFNGRVPVRKRFMVLPITRGPRAEL

SEQ ID NO: 278817 - protein, 115 aa, Zea mays
  unsure (1)..(115): unsure at all Xaa locations
  Clone ID: MRT4577_185859C.1.pep
IFKPNPPLAYNXXSLFSMKNPLPTITXXNNSIIKLPNQLRKVLHRTKEPKIPGPNASLKTHNPPFCGPCPRFKKAXLCTPPPKTFVCCTFTRNLLPALECFCPSCTNFPLFXQLL

SEQ ID NO: 278818 - protein, 117 aa, Zea mays
  Clone ID: MRT4577_18585C.1.pep
SSGGGWRLRIWGFKHTKVLGGPAAAAAAAGAGARGPDHEPLSRANPRPPSQRTLGAQPCAAEQAPTRRRGGHTHRASDPRATRGARERYDGGANGPRRAHGSPEGALSAGLPAEPRR

SEQ ID NO: 278819 - protein, 99 aa, Zea mays
  Clone ID: MRT4577_185860C.1.pep
QNGSFFNSPGTTAEAASHGNNDRALRYLDSLVNMFGSSVPTVYPRSTYSRLHMVDTLQKMGLSRSFVSEINEMLDMTYRSWLANDDEEMMLDMSTCAMA

SEQ ID NO: 278820 - protein, 137 aa, Zea mays
  unsure (1)..(137): unsure at all Xaa locations
  Clone ID: MRT4577_185861C.1.pep
PIMQHCKPXVSRSNAPTDAPNNDDKTXNTARHAGPQIDTIEXSITESNNAAYNGTSINTYLLNNHTENLTHDLVPNHLKKNLMQTMLHKKLTQXLLAELINEKTHVIPEFKSGYELRNPLIINKLIRALETNLRTKK

SEQ ID NO: 278821 - protein, 639 aa, Zea mays
  Clone ID: MRT4577_185862C.1.pep
MAGSMVDRATSDMLISPDWAKNMEICDICNRDPGQSKDVVKALKKRIGHKNPKVQLLALTLLETVIKNCGDILHMHVAERDILHDMVKIVKKKSDPRVKEKVLVLIDTWQDVFGGSHARYPQYYAAYHELVRAGAEFPKRPEKPAPLFNGQSQAARNMRSPDQQEAESSAANDFPALSMSEIHNARGIMDVLAEMLNALDPGNREGLRQEVIVELVDQCRTYKQRVVQLVNSTTDEELMSQGLTLNDDLQRVLAKHDAIAAGIAVRVEKKSKSLQALVETEDSTNQDSKKEQGLIDIEDPTSQDAAKDPNQSTSDQSPFEQLALPAPPVSNGAAPSATQSDLGIDLLSWDDTPATAQNPLALVPVTDPLADSTSSNQNALAIVDTFSQNSTVNSNTQAADPFGLNPSSAIPGSQAYNTPTQQPFQSQQATLYPNGGAGTSYDQASQFNNVNSGWNDQAASLPAEQALNYDDQSGNLPPPPWEAQPAASNEMPNGELGGVQPLPGTAGQFGGMQQALQPQVNHMGVPQRQPMYSNQSGVGVAPTQMQAGLGNQQLGSTSMMGMPPQMYGGGSQAAMMYPQQMPVAPAAADVWWWWSSGRVHAASCCGRCTLLQQPGDGGNVWVPRRERAVPEHVWPLGAG

SEQ ID NO: 278822 - protein, 84 aa, Zea mays
  Clone ID: MRT4577_185863C.1.pep
KHPLIPAVGHRAGLKSQWGEVTVCGVVQPASKKESELAAAASARRPPRPTLGRSRPKGPCHWLSPPGRGAAAGRLEAPFPPGGA

SEQ ID NO: 278823 - protein, 457 aa, Zea mays
  Clone ID: MRT4577_185864C.1.pep
MSQGLTLNDDLQRVLAKHDAIAAGIAVRVEKKSKSLQALVETKDSTNQDSKKEQGLIDIEDPTSQDAAKDPNQSTSDQSPFEQLALPAPPVSNGAATSAPQSDLGIDLLSWDDTPATTQNPLALVPVTDPLADSSSSNQSALAIVDSFSEDSRTNHNAQPADPFGLNPSSAIPGSQLYNTPTQQPFQSQQPPQQAALYANGGAVDPGTSYDQASQFKNVSSGWNDQAANPVVPLPEQALNYDDQSGNLPPPPWEAQPASNNELPNGQLGSLQPLPGSAGQIGGMQQPLQPQVNHMGVPQSQPMYSNQPMQPGQVAATTQMQPGFGNQQFGSLPPTSMLGMQFGGMQPPQMYGGSQPVMMYPQQMAVAQYGAMPAAAADVWWSIGGLHAASCCGCRTLLQQPGDVWLPRCERAVTEHVWPLGAGQLVHGDEVVLPDYDGATLHGATYEADEARRQAFR

SEQ ID NO: 278824 - protein, 87 aa, Zea mays
  Clone ID: MRT4577_185865C.1.pep
RKRSFSRSIRFRGDFHDLLGGELMGSPTEKLPYGNGSSPLRVAPFLFLYPLSRSSVSDCADPEARRQRTSTIHEKKRLYTEIHCVRQ

SEQ ID NO: 278825 - protein, 119 aa, Zea mays
  Clone ID: MRT4577_185866C.1.pep
SSSSFGQGVAYASLLVVLSCCLVGLRPGTWCTAVLGLVAGSASTYLYKHDRCTRMKYLWVITFGLLLLKTIPIYPMDGDFISYPYSWEQFLSHIRILIGNSPQVGGYRVPIDISTVVHS

SEQ ID NO: 278826 - protein, 125 aa, Zea mays
  Clone ID: MRT4577_185867C.1.pep
ASRVRSSRAGLVSRVPRLGSARSSRCGLGGVACFRRHRRLLGFFPGHGEVEEEAHEEAQEEAQKDEAEIQVGRSRWIVDLMTCVGTYISSDALVCLWRDVNLPWCHGLPSVERLACTSVGHFSWF

SEQ ID NO: 278827 - protein, 65 aa, Zea mays
  Clone ID: MRT4577_185868C.1.pep
KGILGYVKEALVSPHFQGATRFSIFYVKGGIPFNGKFLKLVSWYPNKWGNSTRGVALIPPMNSPH

SEQ ID NO: 278828 - protein, 76 aa, Zea mays
  Clone ID: MRT4577_185869C.1.pep
VNTRFLCPCAHLSGTFCEPLLCVSPPMLLGESHYDRPALCPAHYRCLFEPIMVDSELLLRTFTPIGHLCGLPDVIL

SEQ ID NO: 278829 - protein, 78 aa, Zea mays
  unsure (1)..(78): unsure at all Xaa locations
  Clone ID: MRT4577_18586C.1.pep
KKFKAPTTTPLRLPIPXPSRTPYQPCLPISAPTLAPTPSLHGSRRPTTTPAICPTSTRTPLPTSSPPSPTPRIPTSCL

SEQ ID NO: 278830 - protein, 394 aa, Zea mays
  Clone ID: MRT4577_185870C.1.pep
TKLHGAALPAGTPTHGPKPPGHANDPRRDRNPAHKRRRAPKHHGKQGKQSGGRGRNKRKEKKERRKKKKRGGRRKGGGEGRKRRRGGRESKREEKFFFLRVGGRVGEAFAGRAKIVHIDIDPAEIGKNKQPHVSICADVKLALQGMNTLLEGSTSKKSFDFGSWHDELDQQKREFPLGYKIFNEEIQPQYAIQVLDELTKGKAIIATGVGQHQMWAAQYYTYKRPRQWLSSAGLGAMGFGLPAAAGAAVANPGVTVVDIDGDGSFLMNIQELAMIRIENLPVKVFVLNNQHLGMVVQWEDRFYKANRAHTFLGNPENESEIYPDFVAIAKGFNIPAVRVTKKSEVHAAIKKMLEAPGPYLLDIIVPHQEHVLPMIPSGGAFKDMILDGDGRTVY

SEQ ID NO: 278831 - protein, 119 aa, Zea mays
  Clone ID: MRT4577_185871C.1.pep
GRDLLYRQPPPSSQSPPHIGNRRRRRRRRRIEVSTRRSDHEGQVEEEAHEEAQEEAQKDEAEIQVGRSRWIVDLMTCVGTYISSDALVCLWRDVNLPWCHGPPSVERLACTSVGHFSWF

SEQ ID NO: 278832 - protein, 51 aa, Zea mays
  Clone ID: MRT4577_185872C.1.pep
FHLTYPSIQFITLSIISPNINLLPLFLQPLHWKNPFFPHLNSLHLHTFFSY

SEQ ID NO: 278833 - protein, 114 aa, Zea mays
  Clone ID: MRT4577_185873C.1.pep
WVPRGRPGIPSPIGNRRRRRRRRRIEESKRGSDHEGQVEEEAHEEAQEEAQKDEAEIQVGSRSRWIVDVMTCVGTYISSDALVCLWRDVNLPWCHGPPSVERLACTSVGHFSWF

SEQ ID NO: 278834 - protein, 658 aa, Zea mays
  Clone ID: MRT4577_185874C.1.pep
MRLLLRRRRRFPASETAAATMATAAAASTALTGATTAAPKARRRAHLLATRRALAAPIRCSAASPAMPMAPPATPLRPWGPTEPRKGADILVESLERCGVRDVFAYPGGASMEIHQALTRSPVIANHLFRHEQGEAFAASGYARSSGRVGVCIATSGPGATNLVSALADALLDSVPMVAITGQVPRRMIGTDAFQETPIVEVTRSITKHNYLVLDVDDIPRVVQEAFFLASSGRPGPVLVDIPKDIQQQMAVPVWDKPMSLPGYIARLPKPPATELLEQVLRLVGESRRPVLYVGGGCAASGEELRRFVELTGIPVTTTLMGLGNFPSDDPLSLRMLGMHGTVYANYAVDKADLLLAFGVRFDDRVTGKIEAFASRAKIVHIDIDPAEIGKNKQPHVSICADVKLALQGMNALLEGSTSKKSFDFGSWNDELDQQKREFPLGYKTSNEEIQPQYAIQVLDELTKGEAIIGTGVGQHQMWAAQYYTYKRPRQWLSSAGLGAMGFGLPAAAGASVANPGVTVVDIDGDGSFLMNVQELAMIRIENLPVKVFVLNNQHLGMVVQWEDRFYKANRAHTYLGNPENESEIYPDFVTIAKGFNIPAVRVTKKNEVRAAIKKMLETPGPYLLDIIVPHQEHVLPMIPSGGAFKDMILDGDGRTVY

SEQ ID NO: 278835 - protein, 128 aa, Zea mays
  Clone ID: MRT4577_185875C.1.pep
MRARPRRRSFLKATRPPKMAVSHAPPRQNVLPLLLLHALAAALPATCSAASIKKSHTDIFSFGDSLYDTGNLIINHTPNALTTRRPPYRMTFLHKPTDRCSNGRLFDDFLFEHFRLTLPPPSQAKGND

SEQ ID NO: 278836 - protein, 133 aa, Zea mays
  Clone ID: MRT4577_185877C.1.pep
LEAGRDIVFSPVESVLRLTSSRNGRGGDGHSSVSSCERREPRYTRACQQHRWASWRHASSSRHLPVAIQSMPGLAVASGQRECSSQGAHAARLNGAPLRTCVRWTHQRCPGNRRLGGSLRCRYPCCLWSPLQT

SEQ ID NO: 278837 - protein, 161 aa, Zea mays
  unsure (1)..(161): unsure at all Xaa locations
  Clone ID: MRT4577_185878C.1.pep
SGFTTLLHMLKDERLVQHQPTQHPTSEELSIGKIKFKAFDLGGHQIARRVWKEYYAEVDAAVYLVDAYDTERLAXSTXELDALLSDESLAXAPSTMLGGTEAIPDAGSEEELRYHLSLSHFTSGKGKVNLGDSNVRALEDFMCRGEGMMRYCNGYKRVYQY

SEQ ID NO: 278838 - protein, 140 aa, Zea mays
  unsure (1)..(140): unsure at all Xaa locations
  Clone ID: MRT4577_185879C.1.pep
FGKLADLGYKRSAKKCKEKFENVHKYYKRTKEGRTGRQDGKSYRFFDELEALHAAAPQPQPPLQKQQQQLPPASTTAPPLHAFAAPVSAPPPISSMPPSTGPMQPAPISSAAPAVQVQXSWSLPXHQPLNLLQGFSFSSM

SEQ ID NO: 278839 - protein, 75 aa, Zea mays
  unsure (1)..(75): unsure at all Xaa locations
  Clone ID: MRT4577_18587C.1.pep
MPAGHGLRSRTRDLFVRPFRKKGYIPLTTYLRTYKIGDHVNDKVNGAVHKGMPYKTYHGRTAXVWNATKRAIGGE

SEQ ID NO: 278840 - protein, 122 aa, Zea mays
  Clone ID: MRT4577_185880C.1.pep
MAAARPGSPAPRRLPPSTLLLLAAVLLAASPPARALRFDLESGHTKCISDEIKVDSMAVGKYSVVAPDPSYPDAQLPESHRVSLRVTSPYGNSMHYSENVQSGHFAFTAVEAGDYLACFWAP

SEQ ID NO: 278841 - protein, 92 aa, Zea mays
  Clone ID: MRT4577_185881C.1.pep
VRLSLRFSCLPSERRRAIRVTFVKDSLHKETMWPEGPYFPHCSDTNSLRGGHNINGAYLIIGKPPPRSAVVNQIFWLPAKAFIALRWGFRFL

SEQ ID NO: 278842 - protein, 74 aa, Zea mays
  Clone ID: MRT4577_185882C.1.pep
CVVLSKDHPKEPYRPDSQLRQVPNSLRKGNRQRGWIVHGLCAESAFLLQSYKSGELYVGVGLSEWLLMSMCPGR

SEQ ID NO: 278843 - protein, 170 aa, Zea mays
  Clone ID: MRT4577_185883C.1.pep
MEGVEEIVIAGAGLAGLATALGLHRKGVRSVVLESSATLRASGYAFTTWTNAFRALDALGVGDKIREHHLLYERLVAFSASTGEAAAKLSLKMQGKSGPHEIRCVKRNFLLETLENELPEGTIRYSSKIVAIEEEGNVKLLHMADGSTIRANVLVGCDGVNSVVARWLGL

SEQ ID NO: 278844 - protein, 45 aa, Zea mays
  Clone ID: MRT4577_185884C.1.pep
QPTFHNDPSTIMSKGVLKQLHLHYDLDFLKTCCGLINFPINSRTV

SEQ ID NO: 278845 - protein, 125 aa, Zea mays
  unsure (1)..(125): unsure at all Xaa locations
  Clone ID: MRT4577_185885C.1.pep
RSASSINRAIVYQQCPSKLFCLLMLLELWVNTDTATIFPQCSQATITSLLHPYLLPTFYCLYXHQLFKXYMIQLATPTXGILXLSPSFATTIXVISQHLPLLHLLAHNITIQHLQQLVLANLADY

SEQ ID NO: 278846 - protein, 61 aa, Zea mays
  Clone ID: MRT4577_185886C.1.pep
TCAQTVLPNLVSKCTAEALSTLIANDRIFVTARGARVVIPTPLMQLCMHVAYLQAMHRTDC

SEQ ID NO: 278847 - protein, 151 aa, Zea mays
  unsure (1)..(151): unsure at all Xaa locations
  Clone ID: MRT4577_185887C.1.pep
AADGTAADHDLPDYVIHCRDYCDTCRAGVSTNVTEHIAAAKXVMLEGKHFGTDELERSIDAVTDINDTYTIXXLNDSHQEDICDATFVGXPRKDCNQVQAHSERAGVLLTSNVGISDKLAXADPLGYXXTVALPICASMIIQXDSEXDDDQ

SEQ ID NO: 278848 - protein, 430 aa, Zea mays
  unsure (1)..(430): unsure at all Xaa locations
  Clone ID: MRT4577_185888C.1.pep
MAYAAGRKKRVGRYEVGRTIGQGTFAXVKFAVDADTGAPVAMKVLDKETIFAHRMLHQIKREISIMKIVRHPNIVRLNEVLAGKTKIYIILELVNGGELFDKIARYGKLRENEARKYFQQLIDAIDYCHSKGVYHRDLKPENLLLDSRGNLKLSDFGLSTLSQNGVGLLHTTCGTPNYVAPEVLSSNGYDGSAADIWSCGVILYVLMAGYLPFEENDLPHLYEKITAAQYSCPYWFSPGAKSLIQRILDPNPRTRITIEEIREDPWFKKNYVTIRCGEDENVSLDDVQAIFDNIEDKYVSDEVTHKDGGPLMMNAFEMIALSQGLDLSALFDRQQEFVKRQTRFVSRKPAKTVVATIEVVAESMGLKVHSRNYKVFEVAPSLFMVDVRKVAGDTPEYHRFYENLCSKLCSIIWRPTEVSAKSTPLRTTTC

SEQ ID NO: 278849 - protein, 141 aa, Zea mays
  unsure (1)..(141): unsure at all Xaa locations
  Clone ID: MRT4577_185889C.1.pep
GGGGRPPRGPPKGGGAPPPGGGPPPPPPRGAPGGGPAXRRHGAPPPPLFPSXLNGVFSRXGGRPPPVFEIPPRWGAPPGFFXSPPAMGLGVLTPGPGNSNGPGPGFSGFFCFFGGNPRQPRLPFGVGTRGGFGPGFFCYLN

SEQ ID NO: 278850 - protein, 158 aa, Zea mays
  unsure (1)..(158): unsure at all Xaa locations
  Clone ID: MRT4577_18588C.1.pep
MEIFEETLTVXTITLQVESADYCDNTKAEMXEKDGVPPEQQRFIFTGXQVEDGSTLADYNIRKESTLHLAIRLRGGMRMIVKCLTVIFITLDGESSGNIDXDKAEIQDKEGIPPLXQRVIFAGKQLEDGRTLADYNIQKESTLPLVLRLRGGMQIFVK

SEQ ID NO: 278851 - protein, 486 aa, Zea mays
  unsure (1)..(486): unsure at all Xaa locations
  Clone ID: MRT4577_185890C.1.pep
MAYAARRKKRLGRYEVGRTIGQGTFAKVKFAVDSDTGAPVAMNVLDKETIFAHRMLHLIKREISTIIDXEEASLEHHKGLELPYTKSQRSERRSKIKREISIMKIVRHPNIVRLNEVLAGRTKIYIVLELVTGGELFDRIVRHGKLRENEARKYFQQLIDAIDYCHSKGVYHRDLKPQNLLLDSRGNLKLSDFGLSTLSQNGVGLVHTTCGTPNYVAPEVLSSNGYDGSAADIWSCGVILYVLMAGYLPFEENDLPHLYEKITAAQYSCPYWFSPGAKSLIQRILDPNPRTRITIEEIREDPWFKKNYVTIRCGEDENVSLDDVQAIFDNIEDKYVSDEVTHKDGGPLMMNAFEMIALSQGLDLSALFDRQQEFVKRQTRFVSRKPAKTVVATIEVVAESMGLKVHSRNYKVRLEGPASNRASQFAVVLEVFEVAPSLFMVDVRKVAGDTPEYHRFYENLCSKLCSIIWRPTEVSAKSTPLRTTTC

SEQ ID NO: 278852 - protein, 94 aa, Zea mays
  Clone ID: MRT4577_185891C.1.pep
VARARMKALRVMKTWFFWGTGGRSRIPWDWQVAQFVYFVSGEVKVIPPGVVPGEDYMHFVAGVLVRYPRWFKAALFFDGPYKERYRFFASGGAN

SEQ ID NO: 278853 - protein, 136 aa, Zea mays
  unsure (1)..(136): unsure at all Xaa locations
  Clone ID: MRT4577_185892C.1.pep
KESAGCLIPSPSPRGAIQTKKKPGGGPGEPKKKKKRPTRGATGEGPPPGETPKKPPPRGGGXPPPKKTNGARPRPPRGGPKTGAAGGGPPEGGGTPTENPFPKRLARGTRTKTPAGDKSTPGFWGGGNNHQRNSGE

SEQ ID NO: 278854 - protein, 48 aa, Zea mays
  unsure (1)..(48): unsure at all Xaa locations
  Clone ID: MRT4577_185893C.1.pep
LEPPXISSSSVFLGVRGHSPDPNRRPCEPRRSPTVLRSLQDGHLWADP

SEQ ID NO: 278855 - protein, 73 aa, Zea mays
  Clone ID: MRT4577_185894C.1.pep
QNSTCSSFGSIFPHYSSSRRYYQKRRGERRNSKRSAKSRHRHRHGHGALSSSKITSRTTNKRRCSRLQRSPST

SEQ ID NO: 278856 - protein, 55 aa, Zea mays
  Clone ID: MRT4577_185895C.1.pep
FNPNARNLMESNPQMREIFQNPEFLRQLTSPETLQQLLLFQQSLLGQLGQHQPNQ

SEQ ID NO: 278857 - protein, 35 aa, Zea mays
  Clone ID: MRT4577_185896C.1.pep
KFFHTWSLKEPERLQISWVRQNRKMITFIFISHSD

SEQ ID NO: 278858 - protein, 142 aa, Zea mays
  Clone ID: MRT4577_185897C.1.pep
DCVDEMKLAYCSREPSQSTESLTSPSPSEQHHEVRITTEREHGRERNVIHAAGSFNLPLPLLPDGKHNPPLHNPPLDNRLLPPPWIQTSSAPRRQQPRPLDRSPSETNPPTRANEERPLDSFSIGMTGHVIHSCEEGTGLYL

SEQ ID NO: 278859 - protein, 487 aa, Zea mays
  unsure (1)..(487): unsure at all Xaa locations
  Clone ID: MRT4577_185898C.1.pep
MVRELRVDSFYARLRAAAGSSSSSPLLILPSAADADSLCAVRVLAHVLSADSIRFSIYPVSSAASARALLASFAAPAPPCLVLVNWGAHRDLRALLPAASTAFVVDSHRPVHLHNLCARNDRVVVLFTADDERTADLSYDFDLSALADASDLAADAGDDDHLRGGPGSDASDSEDSDDDDDDAGGGRRKRRRLSDEEXTTPPPTPTPGRLFCRLRREYYRLGTFHGKPSGCLMYDLAHAMRKNTNELLWLACVALTDQFVHDRITNERYQAGVMELEQHINGSGNLDPSGAGSVVTLKEPAQIPRAEASRIAYEDEPRLMLLREWSLFDSMLCSSYVATKLKTWSDNGLKKLKLLLARMGFPLADCQKNFQYMSMEVKRKMRDEFDRFLPEYGLTEFYYRSFLRVHGYRSKVSAADVVYGVTALLESLDSQSKDTKESSAAEQFWVAYSALSLSNADQLRKGMLSAIEIQRAILRQGSSAITKTGFI

SEQ ID NO: 278860 - protein, 127 aa, Zea mays
  Clone ID: MRT4577_185899C.1.pep
GTGGPKATATPPPTTRHPNTQQATRNTGPDTPPPNNHQNARKAAPPRRGKTPTKKPPHEQQSSPTATKTNGGHHKNRTPPKRGNKPNSRRNRPLRPARPGTQAPQNPGPPTKTRSPTPQPRTRRTPK

SEQ ID NO: 278861 - protein, 236 aa, Zea mays
  unsure (1)..(236): unsure at all Xaa locations
  Clone ID: MRT4577_18589C.1.pep
MYRAAASLASKARQAGSSARQVGSRLAWSRNYAAKDIRFGVEARAMMLKGVEDLADAVKLTMGPKGRTVIIEQSFGAPKVTKDGVTVAKSIEFSDRVKNVGASLVKQVANATNDTAGDGTTCATVLTKAIFTEGCKSVAAGMNAMDLRRGISMAVDSVVTNLKGMARMINTSEEIAQVGTISANGEREIGELIAKAMEKGGKEGVITIXADGNTLYNELEVVEGMKLDRXYISPYF

SEQ ID NO: 278862 - protein, 53 aa, Zea mays
  Clone ID: MRT4577_1858C.1.pep
FFPDPLQYTGSYPRTLNLTRGQKEAWHKSYTSSSTCTQCIRISLLGSQLLEAL

SEQ ID NO: 278863 - protein, 148 aa, Zea mays
  unsure (1)..(148): unsure at all Xaa locations
  Clone ID: MRT4577_185900C.1.pep
NQHPSTSAADRRRPGGGDAPPQKPQSTASAKPRHTADPRRAGKQPHTARSKEKTHNNTEDTGHDDXGRGATTGHQSNKRRGSDKRARERXEKEAAEKNKPAXKQARXRDKRKAERERGTTTEXATXKPETTKDDSTDKEAPGHRDDNK

SEQ ID NO: 278864 - protein, 41 aa, Zea mays
  unsure (1)..(41): unsure at all Xaa locations
  Clone ID: MRT4577_185901C.1.pep
GWDTGEXLRCNLFIGVGNKLRVRPFNGYMLLTMKKKLIGQA

SEQ ID NO: 278865 - protein, 366 aa, Zea mays
  Clone ID: MRT4577_185902C.1.pep
FTEDAIKFKMDDNAELYDFDDEKDENKVDFKKLVSDNWIEPPRRERKRNYSESDYFKQALRQGAPTKPREPRIPRMPHLHDFQFFNNQRLNELYEKEVRYLMQANQKKDTIDGEDEDQLEPLTAEEQEEKEQLLEEGFASWTRRDFNTFIRACEKYGRNDIKSISSEMEGKTEEEVQRYAKVFKERYKELSDYDRIIKNIERGEARISRKDEIMKAIGKKLDRYKNPWLELKIQYGQNKGKFYNEECDRFMLCMVHKLGYGNWDELKAAFRMSPLFRFDWFVKSRTTQELARRCDTLIRLVEKENQEYDEQERQARKEKRLAKNTTPTKRAALRNSEGESAPLSSFKRRRQSLMDDYVGSGRRKRG

SEQ ID NO: 278866 - protein, 199 aa, Zea mays
  Clone ID: MRT4577_185903C.1.pep
TVCSHSRPIRSDEDTRQRSCDTNESCGALPSSSNPTVEPLPSNSLGNAIVDGMSQGSAEMDCSDDDVNTVSRIPTTNKPHDESLGNVPISKDGINTNNNLSIELKKEHDSDMHQDCSSMTNKVTIDAIDGDKCIKTKVGVFSLAGQQGFRNEVSASENSKDKRSLNSEKNTPVNNTDNSMQDAKTAAGSSTTDLQKSSA

SEQ ID NO: 278867 - protein, 1106 aa, Zea mays
  Clone ID: MRT4577_185904C.1.pep
MAKPVKYDDEEEISSSSAEEEDDQSAAAASGSGEEGDDDEEDAAALPTEEEEAEGEGQQEEEVDEEEIEAVTTGAGAEDGEDASAATAAEGEEESQSTEDDESVAKDKAIGAETDAVVGKREKTRLKEIQKLTQHKIREKLDTQKAAIDADMNYKGNGRLKYLLQHKEELAHFASASRTNYVYPPSWIKGKTHDSEEEEDEEYLKEEEDALAGAGGTRLVSQPSCIKGKMRDYQLAGLNWLIRLYENGINGILADEMGLGKTLQTISLLGYLHEFRGIAGPHMVVAPKSTLGNWMKEIQRFCPILRAVKFLGNPEERNHIRDNLLQPGKFDVCVTSFEMAIKEKSALRRFSWRYIIIDEAHRIKNENSLLSKTMRIYNTNYRLLITGTPLQNNLHELWALLNFLLPEIFSSAETFDEWFQISGENDQQEVVQQLHKVLRPFLLRRLKSDVEKGLPPKKETILKVGMSQMQKQYYRALLQKDLEVINAGGERKRLLNIAMQLRKCCNHPYLFQGAEPGPPYTTGEHLIENAGKMVLLDKLLPKLKERDSRVLIFSQMTRLLDILEDYLMYRGYQYCRIDGNTGGEDRDASIEAFNSPGSEKFVFLLSTRAGGLGINLATADVVVLYDSDWNPQADLQAQDRAHRIGQKKEVQVFRFCTEYTIEEKVIERAYKKLALDALVIQQGRLAEQKTVNKDDLLQMVRFGAEMVFSSKDSTITDEDIDRIIAKGEETTAELDAKMKKFTEDAIKFKMDDNAELYDFDDEKDENKVDFKKLVSDNWIEPPRRERKRNYSESDYFKQALRQGAPAKPREPRIPRMPHLHDFQFFNNQRLNELYEKEVRYLMQANQKKDTIDGEDEDQLEPLTAEEQEEKEQLLEEGFASWTRRDFNTFIRACEKYGRNDIKSISSEMEGKTEEEVQRYARVFKERYKELSDYDRIIKNIERGEARISRKDEIMKAIGKKLDRYKNPWLELKIQYGQNKGKFYNEECDRFMLCMVHKLGYGNWDELKAAFRMSPLFRFDWFVKSRTTQELARRCDTLIRLVEKENQEYDEQERQARKEKRLAKNMTPTKRAALKNSEGENTPPSSFKRRRQSLMDDYVGSGKRKRG

SEQ ID NO: 278868 - protein, 137 aa, Zea mays
  unsure (1)..(137): unsure at all Xaa locations
  Clone ID: MRT4577_185905C.1.pep
VLPPPGAALPGVSPGVCSCLGWPVRVCGGLGFLRPVRRGRRSPGPXGRPALPAVSALGRPAVXGFPPLCXXRRLPRPLSXPGALPPRWSVRPVFFVAAAVSGFVRRLVPCGVPXSACRGLVFFWPPPPLXXXXQKRP

SEQ ID NO: 278869 - protein, 125 aa, Zea mays
  unsure (1)..(125): unsure at all Xaa locations
  Clone ID: MRT4577_185906C.1.pep
GGLSPLVFVFLCSSLRCASSFVFLVGCFLLLRLLFSVPRELLLPSRQLASRSGHLGCSSQSLWRRFLVLPPLFGSCVRPSHLCQAVGFLGSFFRHFFGFPSARRSRVRVCLPPRPACVCRLPVSX

SEQ ID NO: 278870 - protein, 130 aa, Zea mays
  Clone ID: MRT4577_185907C.1.pep
WLDFVTYLHHHGHNDKLPWYRGKEWTYLRGGLTTLDRDYGWINNIHHDIGTHVIHHLFPQIPHYHLIEATEAAKPVLGNYYREPQKSGPLPLHLLGDLVQSLRRDHYVSDTGDVVYYQTDPTISCSGPFT

SEQ ID NO: 278871 - protein, 78 aa, Zea mays
  Clone ID: MRT4577_185908C.1.pep
NKFPLIKKKKKKKKKKKKKKKKKKKKKKKKKKKKGEKKKKKVEPGGTTLRGNFANIHKTWGRFNLAFRGPNSPYRGAY

SEQ ID NO: 278872 - protein, 74 aa, Zea mays
  Clone ID: MRT4577_185909C.1.pep
VQSKTPYPYNSNLRVVGWIQGNIRQRDRHRIIEIHMYKEAGTSSSRFPGVVVRGCLQSEAERPPDSPRLNPPQT

SEQ ID NO: 278873 - protein, 61 aa, Zea mays
  Clone ID: MRT4577_185910C.1.pep
TEAAKPVLGNYYREPQKSGPLPLHLLGDLVQSLRRDHYVSDTGDVVYYQTDPTISCSGPFT

SEQ ID NO: 278874 - protein, 63 aa, Zea mays
  Clone ID: MRT4577_185911C.1.pep
NKFPLKKKKKKKKKKKKKKKKKKKKKKKKKKKKKKKKKKKKKKKKKKKKKQQKKKKKKTLPPG

SEQ ID NO: 278875 - protein, 138 aa, Zea mays
  unsure (1)..(138): unsure at all Xaa locations
  Clone ID: MRT4577_185912C.1.pep
HAIACGSLLTIKQVSSKKKKKKKKKKKKKKKNKKKKKKKKKKKGEKKKKINXGDPYRKKKKKKKKKNAPWGHLWEVPFPLFPPGAALLGPHLPDLASLKNLLASISKTLCTGKTLLGHTPISPKRKSPSPLPPFPPWG

SEQ ID NO: 278876 - protein, 58 aa, Zea mays
  Clone ID: MRT4577_185913C.1.pep
NIANMGFFILAPRPGFYSPPPRGEFFFLFGRVFFYIPVLKKNFFFFKIKKPHFFPMPF

SEQ ID NO: 278877 - protein, 63 aa, Zea mays
  Clone ID: MRT4577_185914C.1.pep
GGLLLADSGPEELPLGHDVGSRNVRLERLLPQIGNRAPGPSTPTETRSSLLPIPATYLVFMVK

SEQ ID NO: 278878 - protein, 80 aa, Zea mays
  Clone ID: MRT4577_185915C.1.pep
KKKKKRKKKKKKKKKKKKKKKKKNKKIGKKKKKKKKRSLGRNHLKGKFKNIGGRYLGIQPRNQVGGNNGKSCFLGKIVIR

SEQ ID NO: 278879 - protein, 147 aa, Zea mays
  unsure (1)..(147): unsure at all Xaa locations
  Clone ID: MRT4577_185916C.1.pep
SIQPPIIRLLSQEHLSRXRISSRXGYLSXFLHTPSFTTVSPQEVSCSSPAEVHNFVQXNWTASANSNYIVYPLNCDKFIKVAKVYGTKINPFLDSLSKCPKHVLHNPLKSPDRYLIYXNISSKAAHILTQPSILDYFTKLIQMVSPK

SEQ ID NO: 278880 - protein, 69 aa, Zea mays
  unsure (1)..(69): unsure at all Xaa locations
  Clone ID: MRT4577_185917C.1.pep
NKFPLKKKKKKKKKKKKKKKKKKKKKKKKKKKKKKKKXPKLGRQKKGEITKKMKGRNNRCPPARSQGWN

SEQ ID NO: 278881 - protein, 123 aa, Zea mays
  unsure (1)..(123): unsure at all Xaa locations
  Clone ID: MRT4577_185918C.1.pep
IQPPAAATANRGLKRRTPEHPPEKATXQAPDEGAGQPPADAKPETTEAEKKGGGDTTNPEKEPPAPEXDPQQKXDYRKDKGHGAPQRKRRATKRDDEEPKARSNAXEAEDQKAPQEGGTKHDG

SEQ ID NO: 278882 - protein, 116 aa, Zea mays
  unsure (1)..(116): unsure at all Xaa locations
  Clone ID: MRT4577_185919C.1.pep
RPPGPGHERRGNPDGPHNXXKNGNHXGXXDAXHKGAGKSRTAKAKSEEEXTXXQETGXGEKKDGXRXTEGNAHKDDTSKEPPERGARXXAANXRPPXPQKPRRQAPEGQGQAGARG

SEQ ID NO: 278883 - protein, 143 aa, Zea mays
  Clone ID: MRT4577_18591C.1.pep
MLGDHAKRENVTGDMPASSGRTLSRESGNKHKEESSSSTKSHRRGNKKKKMKKVVYYETDSSSPSTSGSDSSSTTSKCHERKKYSKMSLRYPCISKRAPLLSVPLGKPPYFDGEDYCMWSGKMRHHLTSLHKSIWDIVEYGAQ

SEQ ID NO: 278884 - protein, 80 aa, Zea mays
  unsure (1)..(80): unsure at all Xaa locations
  Clone ID: MRT4577_185920C.1.pep
FVREDLXCRHDIKNFPLAHXPLXLAXAKQLLLTINHNFXTLAFCLLYFDPLCETKYLIALKNLFDNVIFQPYPSLCHFRR

SEQ ID NO: 278885 - protein, 46 aa, Zea mays
  Clone ID: MRT4577_185921C.1.pep
QCNTMWEHFVQGSCQVPPRLQKKNHKCFRTRQSRITYQPDPRTDAV

SEQ ID NO: 278886 - protein, 44 aa, Zea mays
  Clone ID: MRT4577_185922C.1.pep
LQSNRSGFILSNLGMTSLSFSLSVSIWRDLSVSGTVYVFAGNHY

SEQ ID NO: 278887 - protein, 164 aa, Zea mays
  Clone ID: MRT4577_185923C.1.pep
RVVPRRPYKKKKKKKKGGEGRKKKKKKKKNIKKKKIKKKIQGNIIYRYIGLHKIKLPGLNFFFGGPGFNGGGGGFSRLAAVTPFGGCRFFRWAASLFSSLGFSPWGAPGSPFVPGLSFLGVGGFPGGGPLHLPAPWRPLLGVCCLPFWPGPPSLPVLLFFGGSV

SEQ ID NO: 278888 - protein, 77 aa, Zea mays
  Clone ID: MRT4577_185924C.1.pep
AYQQTSKKLAHDIIITLGAPAGRWRSSPRFLSTCEPLKKTYIRSNHSISGQCTWLAETWHRVQYDISIPVRKLKGIE

SEQ ID NO: 278889 - protein, 127 aa, Zea mays
  Clone ID: MRT4577_185925C.1.pep
KKKSPIPQGGNGKLDYGFLGGLDPTSFCSQGQGLPHQEHRGRYNFSGGEDHGGNWGHIFNGGWAPQFWPRYSTFAWGAPFGLKREGGGPFFFFKKIAPTFFFGGGGGGQKKGAPRGAPPPPPGSRVE

SEQ ID NO: 278890 - protein, 113 aa, Zea mays
  Clone ID: MRT4577_185926C.1.pep
QCRCGRLGRLVQDYFKHSLTDVNLVDQMANFFCKTLMLICAFVMLLVRKELEYLQNIKNSITRGLLSTTGSGSLPDKETQPRPPKNKFSKRRCKPTMLAICGSDMPHSSFSFC

SEQ ID NO: 278891 - protein, 137 aa, Zea mays
  unsure (1)..(137): unsure at all Xaa locations
  Clone ID: MRT4577_185927C.1.pep
MAIMAIHTRPKILIPEKVSADGLALLRDQFEVHEKKGLSADELEAIIGDYEALIVRSETKVTADLMNAAXKLKVVARAGVGVDNVDVQSATSHGIIVVNSPSGNINAAAEHTIALLMAVARNIGDASXSIXEGKWER

SEQ ID NO: 278892 - protein, 77 aa, Zea mays
  Clone ID: MRT4577_185928C.1.pep
APNKLGTLEIKPNMRATKRKKPYGSIPERAGKCQLCTTQITEETILRENSVKKNYTQIFLLGNVLKPKTGRTSHPFL

SEQ ID NO: 278893 - protein, 165 aa, Zea mays
  unsure (1)..(165): unsure at all Xaa locations
  Clone ID: MRT4577_185929C.1.pep
MHIFVRTLTGNXITLKVNPSDNIDNVTADIHYYEDIPPDQQRVIFAAKQLEDERTLADXDIHNESTLHLVLRLXDXMQIFEXTLTDKTITLWVXTSDTIXNALVTIQYKEDIAPDQHRLIFAVKPFDDARXTLSDYDMQNESILHLYAVLRKLMQIFMKTLIGQT

SEQ ID NO: 278894 - protein, 88 aa, Zea mays
  unsure (1)..(88): unsure at all Xaa locations
  Clone ID: MRT4577_18592C.1.pep
MYAYCGKCKDELIKNAAYIGTPGKGILXADEESTGTIGKRLSSINVKNVEENRRALRELLLCXPGALQDISGVILFEETLYHKTKDGK

SEQ ID NO: 278895 - protein, 112 aa, Zea mays
  Clone ID: MRT4577_185930C.1.pep
VLLLHGGTVAADVYKGELTPLQRHVAFFDRNKDGVIYPAETYQGFRAIGAGVTLSAFSSVFINGLLGPKTIPVYMHGIGISPPSTGNTLSDILKCFYCLSVDRHPRCSFRII

SEQ ID NO: 278896 - protein, 64 aa, Zea mays
  unsure (1)..(64): unsure at all Xaa locations
  Clone ID: MRT4577_185931C.1.pep
GRRWWQARAQPLPDQRATEDNGARREKGRSRGGXLLADSRRLGVVLMALVFQGFFARAELRAPH

SEQ ID NO: 278897 - protein, 52 aa, Zea mays
  Clone ID: MRT4577_185932C.1.pep
SFSITRGFQAWEPSPPAWCPPFLPFPTPTLSAPPPLYLPPFIAYSCSSFSSP

SEQ ID NO: 278898 - protein, 232 aa, Zea mays
  unsure (1)..(232): unsure at all Xaa locations
  Clone ID: MRT4577_185933C.1.pep
KEEKKKKKIQKKKKKKKKKKDPGGGEIARALCRLFVPRARHQEPPHTSQSREGKQQGSAAAXXXXXKFPTPLPIAIQDVVQPQKPDHMPKHMVFYCSDSRECPSXVTLELHPDKAFTDRNIDSMVTPYHKIKYNETGSAIEYDVCALKVNVIVVIVHNCXGGIKKLLSLKDGTTRNFHFEEXWSKIGSPAKNNVNKDYPSVSIHDQSSILKKEDRNKAIKNLKXYPFHQEKD

SEQ ID NO: 278899 - protein, 64 aa, Zea mays
  Clone ID: MRT4577_185934C.1.pep
MDDTAGAVPAPRRKLRAGADDAEVQRRRLVVYKTYGVEGKVRESVRRGVSWIKGKCSGAAYGWW

SEQ ID NO: 278900 - protein, 100 aa, Zea mays
  unsure (1)..(100): unsure at all Xaa locations
  Clone ID: MRT4577_185935C.1.pep
TSGATAPPTSDRRQRRRPRCSAXSVSSWSTPPAPPPVQRAGXPRAAPPPPPVAGPPXAEPXRPTAPPTRPPTGPPWPIPXQXSAPAASPTGPPPTAAPST

SEQ ID NO: 278901 - protein, 53 aa, Zea mays
  Clone ID: MRT4577_185936C.1.pep
LSRQSIRTHMVRQRLLCSWTNFDFLRSSSVKLAVTLVMMMPLIPNPVSKGEFR

SEQ ID NO: 278902 - protein, 147 aa, Zea mays
  Clone ID: MRT4577_185937C.1.pep
MAVAALKVQLNALLSNMFATGMVDEQFQQLQSLEEGGTASGFVAEVATLFIEDADRIIADIAALLDQPVVDFDKVDAHVHQLKGSSSSVGAQKVKLACMHFRQFYEAKSKEGCLMALAFVRSEFCDVRNKFQTMMQLEQQIEACSPK

SEQ ID NO: 278903 - protein, 67 aa, Zea mays
  unsure (1)..(67): unsure at all Xaa locations
  Clone ID: MRT4577_185938C.1.pep
EKSDSAGLNENKNTAVNVKERLKNMGSMKKKRSSKETDNGAKIAAVXASARRARLVAANKKDKSYYK

SEQ ID NO: 278904 - protein, 137 aa, Zea mays
  unsure (1)..(137): unsure at all Xaa locations
  Clone ID: MRT4577_185939C.1.pep
MDFASPDPRAQTQPRLRXTTNSASPDPRAQTQPRLRKTTNSASPDPRARTQPRLWKTTNSASPDPRARTQPRLRKTTNSASPDPRARTQPRLRKTMDSASPDPRARTQPRPRRNRHLAQTRVRTGHVARGAIITLPL

SEQ ID NO: 278905 - protein, 48 aa, Zea mays
  Clone ID: MRT4577_18593C.1.pep
VIDKGLLHEDKRIPEPIDYDQEIQTNVHFLCQHGSMNTPQDSSSPCGR

SEQ ID NO: 278906 - protein, 73 aa, Zea mays
  Clone ID: MRT4577_185940C.1.pep
FTCVNCILLTLLLVAASFIWVPPHSIRLFSIGNVKIKWLLLRSEPVFLFGKKRGRASNERLYVQGWDQYVFLP

SEQ ID NO: 278907 - protein, 100 aa, Zea mays
  Clone ID: MRT4577_185941C.1.pep
DTWPSSQTVFFLSRITLGNSWVFSLAFLLKLCVSIRSSSTSSRPLLVFFAQYTWFCCLTPPPVATRKKFIRIQGISGAVVRDGPRRVRARGSSVTSFGMS

SEQ ID NO: 278908 - protein, 137 aa, Zea mays
  unsure (1)..(137): unsure at all Xaa locations
  Clone ID: MRT4577_185942C.1.pep
MDFTLPDPRARTQPXTRKTTNSASPDPRARTRLRLWKTTNSASPDPRARTQLRLQKTTNSASPDPRARTRLRLWKTTNSASPDPRARTQLRLRKTTNSASPDPRARTQPRPRRNRHLAQTRVRTGHVARGATITLPL

SEQ ID NO: 278909 - protein, 397 aa, Zea mays
  unsure (1)..(397): unsure at all Xaa locations
  Clone ID: MRT4577_185943C.1.pep
MAGDRGRGAAERVDAAVGAVGSGGWEFRNAYRRQLLALSRRIRLLGPFAEELREARRGSAEQEEQERALAPLADALEEALDLLQLGRDGSRMLLVLDRDEVMKKFHESIAQLEQALCDFPYDKLDISDEAREQVELVHAQLKRAKERVDMPDDEFYNELCSLYNKSHDPSAELDILGRLSEKLHLTTIADLTQESLALHEMVASGGGNDPGEHIEKMSMLLKKIKDFVQTQNXNGPAGDCQANGXSNGKPRPVNVPDEFRCPISLELMKDPVIVATGQTYERALIEKWLASGHHTCPSTQQRMPNTTLTPNYVLRSLITQWCEANGIDPPKRPTQQPDRPTSSCSSSERASIDALLSKLCSADPEEQRSAAAELRLLAKRNANNRIGRXEAGAIPLL

SEQ ID NO: 278910 - protein, 62 aa, Zea mays
  Clone ID: MRT4577_185944C.1.pep
VLKKTRHTSCRIMVNQTGHHYINLHPNSYPNTNPLKKLQEASQHIAWGLPLLMVFPKATLGT

SEQ ID NO: 278911 - protein, 68 aa, Zea mays
  Clone ID: MRT4577_185945C.1.pep
IQQLSANRYMYSGACSNTHLLTEAQRICYIDIFSSFQGVKGSDNLGQKIITHIAYLIPHLAMSISTSF

SEQ ID NO: 278912 - protein, 100 aa, Zea mays
  Clone ID: MRT4577_185946C.1.pep
TNHVNNLHHRRLNLTPRSSKRRTGTTTTKKKNGRSLGQRRRAGAVPVNGAGVGSKPGPFLFEAAAVIHARPFFFYLLLLARAGSKLQKGPVGPGCGKKGG

SEQ ID NO: 278913 - protein, 83 aa, Zea mays
  Clone ID: MRT4577_185947C.1.pep
APPPAGVPWFKFFNCCWGKKGFYVSPQPRRSIGNEMLLSQVKLQCLPQLADGMAKTVVAVKKRKRAKKKNKEKKKSLVPVPGG

SEQ ID NO: 278914 - protein, 123 aa, Zea mays
  unsure (1)..(123): unsure at all Xaa locations
  Clone ID: MRT4577_185948C.1.pep
AEIQGSEGEKEPLPLDGGYYRGRDQGYSGGYYRGGGIGTPGDPSGGPVGMSQVXIKGTGCGRALPAESTPKVCXRANPNYGMSVQXGRGCWKPANPPDECQHWIXDMRGRSSINDHEXYPAFR

SEQ ID NO: 278915 - protein, 97 aa, Zea mays
  unsure (1)..(97): unsure at all Xaa locations
  Clone ID: MRT4577_185949C.1.pep
TVGDIXQAXLAFAPTGWAILQISQASKPVIKAFGLWGSVKALSRGYEYLMGIVIFVPVAVLAWFPFVSEFQTRLLFNQAFSRGLQISRILAGGKKQR

SEQ ID NO: 278916 - protein, 93 aa, Zea mays
  unsure (1)..(93): unsure at all Xaa locations
  Clone ID: MRT4577_18594C.1.pep
QCDIDIRNDSYANNVVSGGTTMYPGIADRMQKEITALAPSTMKIKIIAPPERKYSVWIGGSIXLASLSTFQQMWISKPEYDEAGPSIVHRICF

SEQ ID NO: 278917 - protein, 46 aa, Zea mays
  Clone ID: MRT4577_185950C.1.pep
YIWCFIQEISLSYVHVQSGSVGGRRSQSNAGACFACGLTRLMYALG

SEQ ID NO: 278918 - protein, 120 aa, Zea mays
  Clone ID: MRT4577_185951C.1.pep
SLIVYPGGSAEIFTTDPKSTDTTLVVRKGFIKLAIQQGADVVPVFVFGEKWFYHRRLLPPVIHNFFMNALRTPLILFWGIWGTWLPRRLPLSMVFGKPISCPKNADPTHEEIDAVWDEYR

SEQ ID NO: 278919 - protein, 144 aa, Zea mays
  Clone ID: MRT4577_185952C.1.pep
MQSLRGAQRECAGPRGRRVAGDTEELEEGEACSDADGEAFVDPDVAFSYIDEKLQHVLGHFQKEFEGEVSAENLGSKFGGYGSFLPTYQRSPLLPQSESPHIALNISMSGSPYQPSAERMDQNPSTVAVEPISRITVLGHLQLV

SEQ ID NO: 278920 - protein, 61 aa, Zea mays
  Clone ID: MRT4577_185953C.1.pep
GNGDPPVPVGTPGGSTGAGEALTPKSAWRPAEQLAKVAIMRKFINRVTDLHGFENARFLSF

SEQ ID NO: 278921 - protein, 100 aa, Zea mays
  Clone ID: MRT4577_185954C.1.pep
RVHRVGFDLHPHSAEGVLIVGVPFPREVSAQKGVKSSFNKMSHHAWKVEKSYPTPKFEKVQFLKKVKNHCEFCFRGGRSFVINRSHSLKFCFLYQKKFVL

SEQ ID NO: 278922 - protein, 162 aa, Zea mays
  unsure (1)..(162): unsure at all Xaa locations
  Clone ID: MRT4577_185955C.1.pep
MSDSEEHHFXSKADSAGCNTYPHDAGTVRKNGFISIKKRPCKDVEVSTSQTGKHDHARCHFGAVDIFNGKXKLEDIVPSSHKCVIPHVKRTEHLLIDISXEDGFVSLLTSHGNTKDDLRLPTDETLVAQINERFESGKDLGVTGQSAKGXEHICAVKDAGPK

SEQ ID NO: 278923 - protein, 108 aa, Zea mays
  unsure (1)..(108): unsure at all Xaa locations
  Clone ID: MRT4577_185956C.1.pep
ARAGGGRGRGPRARPXQRARAPPPGGRGATRRPRHGGQPXNXGDEXGGGGEKNXHGXATAREKPXRXEXGPPXRGPGRXNAPXNDEXARAXAGKTTXXKXNTADRPNA

SEQ ID NO: 278924 - protein, 88 aa, Zea mays
  Clone ID: MRT4577_185957C.1.pep
CARTFLMLKSKQFQTVISLKSQGSYKRHRQKTLTLNPKPQTILNTKTTCTPGHKRDDTCRSSSLFVLIIFIFFCSFYFYSFLIYDSFR

SEQ ID NO: 278925 - protein, 35 aa, Zea mays
  Clone ID: MRT4577_185958C.1.pep
LNFPRVYHDESSLNNLITNTGTNTLNCSGMVVLTS

SEQ ID NO: 278926 - protein, 70 aa, Zea mays
  Clone ID: MRT4577_185959C.1.pep
DAQFCTLARNSGEASRSVLRSSARAARVGNEKRGLRWIGRDVTTTLLERATPLALRVGRRGRKRWSGAVG

SEQ ID NO: 278927 - protein, 72 aa, Zea mays
  Clone ID: MRT4577_185960C.1.pep
QHTDTTPPPHRANAAPPPHAPGARTTKDMRAEPPHSLLVPSKLDRPGIKTETPPPTPQIKDQSQDKCPHALI

SEQ ID NO: 278928 - protein, 77 aa, Zea mays
  unsure (1)..(77): unsure at all Xaa locations
  Clone ID: MRT4577_185961C.1.pep
SMTCPNHLAPGNGIIPTRGHFFCXDGRIKAASQIIMAPTLDLRQQALDRFLPNKRSDFKGIFRPLDGLPVTIQLLNL

SEQ ID NO: 278929 - protein, 41 aa, Zea mays
  Clone ID: MRT4577_185962C.1.pep
VTTRGYPRSSHGGCNLVPIHSKVFLVIINSFASTRMVHNSA

SEQ ID NO: 278930 - protein, 93 aa, Zea mays
  Clone ID: MRT4577_185963C.1.pep
QQQEQEGAAETELGYVTCRAVQGALQTTGERDVHGCIEPCMVDGPKSVAGWFVWKFGTVHMLLRRRTWTGEEYGHQDIYTVTENSERHTLCLV

SEQ ID NO: 278931 - protein, 59 aa, Zea mays
  Clone ID: MRT4577_185964C.1.pep
VAAMTVNNPTLHTCMSTIEDTLLPCWYSLDVVLLPSYYSIPGVSQLNLLALHPLFAVLL

SEQ ID NO: 278932 - protein, 71 aa, Zea mays
  Clone ID: MRT4577_185965C.1.pep
FRGPTPTGWGGVIKRAMGSSTPTTLSAGPTAKLRLASPCSESSPRTPNYSDCATRRRNALVLKQPAYISNT

SEQ ID NO: 278933 - protein, 138 aa, Zea mays
  unsure (1)..(138): unsure at all Xaa locations
  Clone ID: MRT4577_185966C.1.pep
SNHFYMLNAPNHFILYKLGLSGGANPSWGXHNSTDCLPLILIIKNRLKYALNYREVISILMQRHVLFYGKGRTDKTYPAGFMDVIFIPKTMENYRLLYDTNDRFRLHPIIDXDAKFKLCKVKSVHFGQNGIPXYLNTY

SEQ ID NO: 278934 - protein, 268 aa, Zea mays
  Clone ID: MRT4577_185967C.1.pep
RTTHVNPLPSPPPLSDPLLRASVATGSVEGNPGPVHVRFALLPTATTKVRKKPSRESAVAMTSVADGPPASPITDLALGGEEGWYALYRLSPRSPSSIHRPPPSSPRPAVQKMVAPNHRSPLVSKLLCAGCGNPPARRLAPVSMLAPVSMLAPISLRPDSLFSPSSHSVGLANHCSPVAPCLPLVDSPNMSSNVCSNAFGDHGSSSRRMRRTREILLDPRMRGGMLMTSCSLNQCLVQNPSTAPNLNPRFATLARKPQSLALISQTQI

SEQ ID NO: 278935 - protein, 74 aa, Zea mays
  unsure (1)..(74): unsure at all Xaa locations
  Clone ID: MRT4577_185968C.1.pep
SLIRWVLLFCLKKNVVYHHSQTCSFIQREHDYPKSATQLERRGXEXERXXRHYGIGFLAAGVSTRWRMPPGNDL

SEQ ID NO: 278936 - protein, 96 aa, Zea mays
  Clone ID: MRT4577_185969C.1.pep
TLSSVLRFVLSRTLHVVFLHVVTNPPSCSSHRGRGVSRSYVPRVTPPRSGAVDSFTTNSSYRVFSERFHTGTVSQVRPLSFLYLELELYCVYASGS

SEQ ID NO: 278937 - protein, 95 aa, Zea mays
  unsure (1)..(95): unsure at all Xaa locations
  Clone ID: MRT4577_18596C.1.pep
ITQNMNLLTSTKTSSSTXGRTMINRPRPHITLSRITNHLHKRLTIITKLITSMIRRMTPELPTPHNNHPNRTNRNIHGRRPHRREGRLRQSVSLT

SEQ ID NO: 278938 - protein, 235 aa, Zea mays
  Clone ID: MRT4577_185970C.1.pep
MPRYDDRYGNARLYVGRLSSRTRSRDLEYLFSKYGRIREVELKRDYAFIEYSDPRDADEARYNLDGRDVDGSRIIVEFAKGVPRGSGGSREREYVGRGPPPGTGRCFNCGIDGHWARDCKAGDWKNKCYRCGERGHIERNCQNSPRSLRRERSYSRSPSPRRGRARSRSYSRSRSYSRSRSRSYSESPRGRRTERDERRSRSISYSRSPRRSLSPEAKDMDRSPTPDRSRSPRRS

SEQ ID NO: 278939 - protein, 65 aa, Zea mays
  Clone ID: MRT4577_185971C.1.pep
LNLQFQALRLHIDDSDSSNEVTQPLPELASSPHGSQSMHVHYGLMACAIALTGVAVMVYMRHSKA

SEQ ID NO: 278940 - protein, 90 aa, Zea mays
  unsure (1)..(90): unsure at all Xaa locations
  Clone ID: MRT4577_185972C.1.pep
IGSTLVRLLLGRGYNVHAGVLIDAQKQLIVPAVVSTLNVLRAAKEAXSVRRVVVNSSSSAIMPSXQWXXGELRDERCWTDIDYCKKNGVW

SEQ ID NO: 278941 - protein, 35 aa, Zea mays
  Clone ID: MRT4577_185973C.1.pep
PTSHPSAQLSSIELLTRVHEFSRTHWLVVVVSTSY

SEQ ID NO: 278942 - protein, 120 aa, Zea mays
  unsure (1)..(120): unsure at all Xaa locations
  Clone ID: MRT4577_185974C.1.pep
GLLDPVHHKHLGALVGYSXLEAXRLLVYESGPSTTSELHLHAKERPAIEWPARXKITLGAPQGAADLYEDCQPKIIHPDIKASNILSDYQYEAKAAXDFGLAKLTTDNITYVSTRVMGIF

SEQ ID NO: 278943 - protein, 241 aa, Zea mays
  Clone ID: MRT4577_185975C.1.pep
LGPSRPAGVSISRDEILLSHLCCCILILGIYAPTSATSDSPPLQDVCPMAPQGERRELSMNGFLCKHPSTILASDFKTLLLNHAGDLDSIARSSVSMVTAAEFPGLNTLGLSMARTDIAPYGVVLPHSHPRASEMMFVHGGSVVAGFLDTEGRLFQKRLGEGEVFVFPRGLLHYVMNYGFGLATAFSVLNSQNPGVVGVAHAMFFASESDVVEGLMARMLKFGEMEVTSDNNITAGFPWAF

SEQ ID NO: 278944 - protein, 1282 aa, Zea mays
  Clone ID: MRT4577_185976C.1.pep
MNTLLSHLCCCILILCIYAPTSATSDNPPLQDVCPMAPQGERRELSMNGFLCKHPSTILASDFKTLLLNHAGDLDSIARSSVSMVTAAEFPGLNTLGLSMARTDIAPYGVVLPHSHPRASEMMFVHGGSVVVGFLDTEGRLFQKRLGEGEVFVFPRGLLHYVMNYGFGLATAFSVLNSQNPGVVVVAHAMFFASDSDVVEGLMARMLKFGEMEVTGDNNITAVLLHITSQSYGNGDSQVTSRNCSFSIGKFDEYSLDDTVFCLLLYPVDLYTFCCLALSPGSTSISLTVRDLLLFRAFSFTLKAPAPDQGRLPAPGQINTIILTLFLRDALVTGVVNGDPQSNWIACWGTDRKRRMRRKKKKGRSPAPTAYSSCASSARIVAPVVLGPPPSQFPCIGRSSEESASLGPERRVDASACGGGLSSGKRLGFPPDFVGSHSFPHFASRLSRLWSLPCSSRSSFCGGWFSSPFRPPAIVEEWPLPGLSAAPLRMDPKNRNPNWDRWGPKEAPQGSQSWGKNRSLSWRLKPGSGKPENKDDIPISSSGDGGQTGILKTPPPPILKLENEMVRRVFCQKCGMDGHHARECFKSLWHEICRKETHNTARCVLPKQNKPSMPIVGMAADGLGFYSSHFSKPLSNKPKRSFIGLVKIVEGLILAEDLEKDFGFHFPWGRTWKAIKCHSGFLMQFSSQERLDEMINFPELKMKLSGAKIFVSSWSSQAKPKPKLHSVWIVAENVSEIVAENVPEELQNYQAICELGSTIGAVEEVDILSLNSKEIVRFKVHVKSVAMIPPIIEVGVKPFLYDTFFKFDNITDEGWNDESINLGKRASVDRQGFGDLSFEKSGKKAKSGDEESGRDVKGKSPLKVSSVHVNVAGSLSEHSDNLEEFIKDDELVPSPPQEKKKMNTNASVSEDVGKNVGVKKGGSMEGELVEGVRRSSRLESTEEMKIADKAAARAMAKDAFINKGVELGSSFNDAVKNLNLIKSLELSRKKLVVQSVKFNVDNSKVDILDSNVDNNSHNESVDNALSDLDDVMVLRKGRKIRHRKKLNFAWVWSPPNGRSGGLLIGFDADIFDVREKELGEFMIRILDFYVGNLNIERLNYGMVTLLPKVDNAVDMKNFRPICLLNVCYKIISKVLNNRLASCITKVISDSQYGFIKNRYIMDGVISLNEILHEVKRKNQSGVVLKIDFEKAYDKFPVLFDLAYDKDITVNDVLVSNFEVLTFRRRIVGNLRVLLDELVSCCNQVILSDQEDIIVWSLGRKGFLLILFTKRKWQIKFSMGILI

SEQ ID NO: 278945 - protein, 130 aa, Zea mays
  Clone ID: MRT4577_185977C.1.pep
MSAASFVLALPRDVLTEFYRYWCLKEAFVKAIGAGVGFGLRRLEFHHEGWTNISIRTNGEVSKKWRFWLFKLDETHLASIAKGDPEDAINTFKKTLSNVIIAENQLSSALHSPEEAFTLQTVEELTQSQG

SEQ ID NO: 278946 - protein, 89 aa, Zea mays
  Clone ID: MRT4577_185978C.1.pep
CTKKEDRRVSERLKKDAGIRIEEKNRRIAAKRNLEGKFYATRQKVDFSSLNDIADLAFKAGIKIRDDNLESIDLVKEMEIANECLAQKK

SEQ ID NO: 278947 - protein, 60 aa, Zea mays
  unsure (1)..(60): unsure at all Xaa locations
  Clone ID: MRT4577_185979C.1.pep
NTGSSNYYLLXHLCTQAGTYIKGFVHGDLGRTHPSIGAIIGCRAEILQLDVTDVKMDFLP

SEQ ID NO: 278948 - protein, 105 aa, Zea mays
  Clone ID: MRT4577_18597C.1.pep
FCRVPDWHPLSQERAVRAHWALWVPCACKVQDFSCVFPSLRVFCACIPPGSPSVIGSRYFQGLVNQLCSFVPFLCYGAFRARFKVRVNNNFPRAFPRFRFFPSAI

SEQ ID NO: 278949 - protein, 64 aa, Zea mays
  Clone ID: MRT4577_185980C.1.pep
INGVKKKGEKKPGSLSYGPKNAGGLVPSNMVFFDRKGEETYKLLCQYNIKLGRNVRAHFTRFIM

SEQ ID NO: 278950 - protein, 75 aa, Zea mays
  Clone ID: MRT4577_185981C.1.pep
KHAIPMCCTYIGLCCKVHTSSALIGFPFEEIATFRTLAVHRLHKNVAHYPMRLNPRGWKVVHLVGGALDYQVLVA

SEQ ID NO: 278951 - protein, 216 aa, Zea mays
  unsure (1)..(216): unsure at all Xaa locations
  Clone ID: MRT4577_185982C.1.pep
EDRSHSRGLSLISKSADXPSKLSISRSFGRNEDDLDLLMYSDSELEDQPCILDETEKATSPIRDRFWEEYASKEFTMVLSKTMKNGLKVMLEAKVKISMEYPLTSPLFRLRLLSEKSEILKWHNDLRAMEAEVNLHILRSIPLSYEDYILTHQVMCLAMLFDMHFDEENEKRKVTSVIDVGLCKPVSGTMLTRSVRGRDRRQTIYWRGADCSSSYL

SEQ ID NO: 278952 - protein, 202 aa, Zea mays
  unsure (1)..(202): unsure at all Xaa locations
  Clone ID: MRT4577_185983C.1.pep
HKYAEAGARTWDLVTYGRLYRYTKPTLLYSINNETAFCFVCYFFRNKKDKGKGTFTSGGWRNXNRDDTLQKRKGDVRSIHNAVQKRYNLYMNPTARIDKQMRKMNSEELKLYKIRWTYSVRCLKFLLHQGLSFRDNDKSERYSNRENFLELLKXLASNSQDVDKHVVLNNASGNCTSICLDIQKQIIQCCAIETKNKIIKDP

SEQ ID NO: 278953 - protein, 59 aa, Zea mays
  Clone ID: MRT4577_185984C.1.pep
ITVYLFTQLSEAGLGLHSLRAGKTCIRRKDRAVTHIPTRHSTLYTQSDGTYITHSIYIS

SEQ ID NO: 278954 - protein, 75 aa, Zea mays
  Clone ID: MRT4577_185985C.1.pep
KSGFAPPFWFPYRVFFVFPGQNQQNPFFPSFYFPLPKKKKKKKKKKKKKKKKKKKKKKKKKKKKKKKKKKKKKGK

SEQ ID NO: 278955 - protein, 250 aa, Zea mays
  Clone ID: MRT4577_185986C.1.pep
IRHEVLAELFLEGQPLFELSQLLAYRRGQYDPIHTLEKIQDTGIRDMILHMIQLDPKKRVPCRSYLQKYESVVFPFYFSKFLHKFFSDIVPLDSDARVEKTQENFGKIQEIMMGSSTIEQIERSTSCEHSEPSGRKGMEGEILNSPGNYRNSTSVFKKNTPVDHQHIIGDINFLLKEVEGRSNNTSAKVTKDTYHFVAPSITCANGVQSSQLVNPAGRQIGTGLMGHKHVSHVKISRVTYAPWWLLMMIN

SEQ ID NO: 278956 - protein, 64 aa, Zea mays
  Clone ID: MRT4577_185987C.1.pep
TWFVFFKEKRPAMTDPPPTELIQPHASLNSWMLLQAQCSSSVKGRILLTILDTCIGNKECMFSA

SEQ ID NO: 278957 - protein, 85 aa, Zea mays
  Clone ID: MRT4577_185988C.1.pep
ALRCSIIIRWGCFDNHAVLCSFVGVWWCCIVSVFKSCSCFPMPLSLYLCCGLLASPGSWPVCFYIAGAYFLLFFRRFVWLPGLSP

SEQ ID NO: 278958 - protein, 86 aa, Zea mays
  Clone ID: MRT4577_185989C.1.pep
LVLLLSTFVFYTKSQWPARPSPFWCFLLNSSIFPALWCGVKLKFFIRGLSVFRLVGQDMFGSVAVLVCLAFLHQSISLVEHPWYQK

SEQ ID NO: 278959 - protein, 174 aa, Zea mays
  unsure (1)..(174): unsure at all Xaa locations
  Clone ID: MRT4577_18598C.1.pep
IRAFPTPARSAPPLSPXPRPPRSSPXPSLLSAPPPPPXPLPXPPSAPRRSLAPPFALPPXSSPRPPPRSAPXKPRPPRVRIPRLQPRRALVLRAGPPREPPPDRDPTSPPDEAGSRILPAQPRDAGPRRGRRAQRRDKGGAGRSDRLFREASTDGEQALRGLDVPSRAATVDGL

SEQ ID NO: 278960 - protein, 62 aa, Zea mays
  unsure (1)..(62): unsure at all Xaa locations
  Clone ID: MRT4577_185990C.1.pep
MAQENRHTNIERIDHVDSGKTTTTGHLIYKLERIDXRVIERTDMEAAYMNKRSFMYARELDK

SEQ ID NO: 278961 - protein, 84 aa, Zea mays
  unsure (1)..(84): unsure at all Xaa locations
  Clone ID: MRT4577_185991C.1.pep
RGGTLLILCLXLSTASASAMQMPCPCAGLQGLYGAGARLTTMMGAGGLYPYAEYLRQPQCNPLSAAPYYSYCGQTSARYQPFLQ

SEQ ID NO: 278962 - protein, 52 aa, Zea mays
  Clone ID: MRT4577_185992C.1.pep
FGFFNIVNLEKIMSNVLPQFPFMSQRTTECGESMFSPSWCMVLCPAPFKKKH

SEQ ID NO: 278963 - protein, 61 aa, Zea mays
  unsure (1)..(61): unsure at all Xaa locations
  Clone ID: MRT4577_185993C.1.pep
MDRMEDAVSGTAAXGDLAXGVWAAQVQWAPRRVTTTTGGHPLPDRSRAHRVWCKGHRQITD

SEQ ID NO: 278964 - protein, 95 aa, Zea mays
  unsure (1)..(95): unsure at all Xaa locations
  Clone ID: MRT4577_185994C.1.pep
MSCDHPRLNRTRRRIFXAVLDVDNPHLYINLDRVVEINQKIIAEAEXPDTPYGVTLKRXIPLDTSLLCEIIDAYLVPSIKPGSVVLDEFEPRVVY

SEQ ID NO: 278965 - protein, 64 aa, Zea mays
  Clone ID: MRT4577_185995C.1.pep
HMLGPYHVHMDLVALRVGFKKALCSVSWHPQKEICTPSPSACQDAGQGCLKGPCDHSTAESVVT

SEQ ID NO: 278966 - protein, 77 aa, Zea mays
  Clone ID: MRT4577_185996C.1.pep
IGYLEAGRDSIISLNTLLLSLITAQLLRECNGGGMEGKEEDERLGDNKRSELPGHLHGITRARTYKDYKKTPAVTLI

SEQ ID NO: 278967 - protein, 742 aa, Zea mays
  Clone ID: MRT4577_185997C.1.pep
MGQQPSEESRNKRKVGPMLPPSKRPTTRGRCQSAKAIQEADEDEEEINRIDMNDDLSVSMPSCDSLEGAGKDGDEVSKSQKDAIAPATKRGRRASCWKYFKEIEVASSKERGVMVTKAKCRFCHTTYAYTPGGPTSQLNRHIGKCTPLLNKLAKLKAQGTLNFAPDKVGSLVVNPNEYNHDHTHLLIAKMIIAHEYPFRMVEHTWFNVLMNWLNPHYQYIGRKGIRKECMKVYESEKEILKKALKDVDSISLTCDLWTSNQNIGYMCLVAHYIDPNWVMQCRVLNFVDLDPPHTGLVIAQAIFDCLVEWKIEDKIMTITLDNANNNDTAVNSLVAKFVARKNSRFNPTYFHVRCSSHIVNLVVQDGLHEVDSLIDKLRNTVKYFKKSPSRLHKFMAVCNEYDITIGKGLCLDCKTRWNSTYKMLDSCIAYRHAFSYYADKDTKYAWQPSPSEWIMYEKLQPILKAFAEITTAFSGSTYPTANMFYPYIVNVKLSLVAAQKSQDRQLKCMADAMMLKFSKYWEKKNNLMVIATVLDPRFKMRYIKWCFGQMYDSLRAAREMEEITEELEGLYKVFESDYRQKKMSNVDSSSSSKVTTSSSVASFVPSGFQDYLEESSTECSKSELLIYLDEANVRCNDKEFNLVNFWKVNSHRFPVVSKMAKNFLAVPASSVSSECTFSTGGRILDDYRSSLNPEMVQALVCSSSWIRGAANEMNPPIHMEEENDDSVEFGFIEFPKCIVASN

SEQ ID NO: 278968 - protein, 124 aa, Zea mays
  Clone ID: MRT4577_185998C.1.pep
NLTGMSDFGNLVSAANDTLRFLALAGRSSRAFGCSSSGASSTASSSSSILSDKRSSMRASIEPSMTTSESVRLRLAMRSSVSSASGWEGFSSVSADSSVVGAFGGLPRFFAEAATGAKVRGKGL

SEQ ID NO: 278969 - protein, 127 aa, Zea mays
  unsure (1)..(127): unsure at all Xaa locations
  Clone ID: MRT4577_185999C.1.pep
RATSQQPQRHQGPRPRTRPRPTXRPRKRPXRRGGGRPXXPRRXPPPRPRPRPTXRQQHPQNPRSXPRPNSRQTPSPRPXHPXAPRSPRHKTPXPQKEKAKKNKKNKKNKTPQTNETTRPARKKRKKT

SEQ ID NO: 278970 - protein, 49 aa, Zea mays
  Clone ID: MRT4577_18599C.1.pep
WRFVRKSGARSLFDELLPPPEGYVGSSWPGGHGGSGWPDGHGSSWLWRC

SEQ ID NO: 278971 - protein, 40 aa, Zea mays
  Clone ID: MRT4577_1859C.1.pep
ILPLFFKKKKKKKKKKKKKKKKKKKKKKKKKKKKKKKHHP

SEQ ID NO: 278972 - protein, 193 aa, Zea mays
  unsure (1)..(193): unsure at all Xaa locations
  Clone ID: MRT4577_185C.1.pep
MRECISIHIGQAGLQVGNACWKLYCXLEHGIHADGQMPDDNTIGXGGDRCASTPFFSETGAGKHVPRAVFGDLEPTVIHEERTGTYRQLFXHPEQLISAKDDATNNFLRGHYTIGKEIVDLXLDRIMKLADNSTGLQGFLVFNSCGGGTDYELDSLLLERLSXDYGKKSNLSWTAYPSFQVSTCEVEPYNRVL

SEQ ID NO: 278973 - protein, 48 aa, Zea mays
  Clone ID: MRT4577_186000C.1.pep
FSFIPYNFPIRGASVPAWWGNGRHRLYSILYSVTATALYTHSRGTLDP

SEQ ID NO: 278974 - protein, 109 aa, Zea mays
  Clone ID: MRT4577_186001C.1.pep
HFLTSTANRKANPTTHTTLPSFMSCSNTSTSDRDDYIKAIGVGLPWFANFTAKHVTKSSTCIRSIDGSKIVGLKITCESLYALNEFLLHRQELLVGGEGELDVTMATTM

SEQ ID NO: 278975 - protein, 137 aa, Zea mays
  unsure (1)..(137): unsure at all Xaa locations
  Clone ID: MRT4577_186002C.1.pep
LAHISDKNILAAYFLFYAESPGMLNHSSGERTEYSGLKARMTSMDRHIFLRVTRSLMVLRKKERRFRQLTSVDQNRFTFPADDNEXFRXKVIKRAFCDIAHYKTLRYHAPLTSCQNYNIFLCRSSIRYWRGKSDDDK

SEQ ID NO: 278976 - protein, 51 aa, Zea mays
  Clone ID: MRT4577_186003C.1.pep
ISMKVVVSLLAMVSDYPLPPVAVGVATRVVWCVCRGVGVSGRSWRKQFFPA

SEQ ID NO: 278977 - protein, 71 aa, Zea mays
  Clone ID: MRT4577_186004C.1.pep
GSSGTPGPRRTTPPGSPTAVAASTRFPASARRRTGTARAPAAAGAPTSTARTPSRRRWRRSRARRARRGSA

SEQ ID NO: 278978 - protein, 57 aa, Zea mays
  Clone ID: MRT4577_186006C.1.pep
QCVHKEKLSRWRVQPGGAPAQGLLQKPLLVHGSFKLLRGASLIWFNGPQGHKKPTFF

SEQ ID NO: 278979 - protein, 66 aa, Zea mays
  unsure (1)..(66): unsure at all Xaa locations
  Clone ID: MRT4577_186007C.1.pep
VSWRQQHLLPILPTSCGNINAFLQQQXLLPFYPQKWHNIVAVLQQQQLLPFIQYAFIIPTTLLQPP

SEQ ID NO: 278980 - protein, 70 aa, Zea mays
  Clone ID: MRT4577_186008C.1.pep
SSSPFRTERHILSSEPSMGIVEHFQGVNAALCVLLPLPSTTDEKVYRRAEPLPKRPNVNCKEIITAHPIY

SEQ ID NO: 278981 - protein, 113 aa, Zea mays
  Clone ID: MRT4577_186009C.1.pep
SGPVVPLPRGHRRVHRHAALPLHHRDSHVPVLAPLPIGFAVFMVHLATIPITGTGINPARSLGAAVIYNKDKAWDDQWIFWVGPLIGAAIAAAYHQYVLRASATKLGSYRSNA

SEQ ID NO: 278982 - protein, 102 aa, Zea mays
  Clone ID: MRT4577_18600C.1.pep
PQSVMNSGRSSQWSIYGLGPKPKRVFFGGCVKFLHLPPQRQKVSPEPFFCGVSQGRFLRFPMGQFKGRIEPLCLFPWNGTEHIKEWPKQSRFSLLRPPFFLF

SEQ ID NO: 278983 - protein, 264 aa, Zea mays
  Clone ID: MRT4577_186010C.1.pep
ASSGPHGMLSTTYRFTRAFHRTPAKRQRCGAAGEVAEQRRCAGRQPWQEQFGGRRCCCWAPWSWTSPRPAQGAPAQWRKGRGRHPLERGFHAERSQSPCLLPWGEQRGGQLGNGGQGERWTTAGMGKRRHGAPPSRASFPSAQDASGSARPSSPWRLFPMPAVVHLSPWPPFPSCPPLCSPHGSRHGDWLLSAWKPRSNGWRPLPFLHCAGAPWAGLGEVHDHGAQQQHLLPPNCSCHGWRPAQRLCSATSPAAPQRWRFAGVR

SEQ ID NO: 278984 - protein, 57 aa, Zea mays
  unsure (1)..(57): unsure at all Xaa locations
  Clone ID: MRT4577_186011C.1.pep
SSSIELHVRHSCVLSDRLEAAMLLAGASVCASESXRRVREARCWQRRSGDSXYMLAE

SEQ ID NO: 278985 - protein, 155 aa, Zea mays
  Clone ID: MRT4577_186012C.1.pep
MYLYRRALSTTPSSCRTASQIASVSSELNSVLLRSLMECYLDVCKMTAPTKVDPTIAFTVDECALYHTATAVVNREYRDDGEEISISVVSVAKIVTDGDVSDSDDIVEGEGMSASIIHLLLYVIVSETGILRPVQILCVVYPCAVVIHSLCLRSE

SEQ ID NO: 278986 - protein, 85 aa, Zea mays
  Clone ID: MRT4577_186013C.1.pep
RMRGRASRRQETRQASPGPQPGYPPPPCPTNPLDGRRAIPAMIPAGAMPMPALSSFTRPYVLPAPVLRPPHARREFRRCNDHAWP

SEQ ID NO: 278987 - protein, 94 aa, Zea mays
  Clone ID: MRT4577_186014C.1.pep
VIVVLLPLSIVTLWLVWRFFCLVSTPRSVPCLGEVSRSYKRMGCGLGEPRFFGWLILSPQFNHGFGIRVGGDGINLGWFDLDPFFFLLLIYAHE

SEQ ID NO: 278988 - protein, 92 aa, Zea mays
  Clone ID: MRT4577_186015C.1.pep
VDEYFDLVGYSSYCDNHINSNTKQYGMQEQQLLLHKEFGDKEGSEYVVPSQVGQQQSGYHRVIGTEQAASMTSRVSAYTDSISNSISFSSSM

SEQ ID NO: 278989 - protein, 114 aa, Zea mays
  Clone ID: MRT4577_186016C.1.pep
VGCFSGIFRFLTPSKGTSSRGGPGFFRPWALWGETPAQRHPPLKWVIGSFYALLVGVLNEKGAVAPPRGAPNYKPPPGVGGIYYYHNPLFPIKIKLWVIRSPGGRRGLHQKFPI

SEQ ID NO: 278990 - protein, 63 aa, Zea mays
  Clone ID: MRT4577_186017C.1.pep
RDHEYIHLLPNQHLYHILPLTQLHRLRFLTQHTGKTTCLPTLTSLSDYSTFPTSPYTYNSLTH

SEQ ID NO: 278991 - protein, 96 aa, Zea mays
  Clone ID: MRT4577_186018C.1.pep
RHKINTVIRKQPCLSATPGVIISRNKCWHVQETSEQSNRQTWRHNCCFRGKSRAELFLSFASASSPDAVVVYPRVRPRVRPRVRPRVRPRVRPRVR

SEQ ID NO: 278992 - protein, 82 aa, Zea mays
  Clone ID: MRT4577_186019C.1.pep
GGADVWYLFLFWAHAVPWLACPFQVGSGRWRLGRRPWASLDLEWQERREAVFTEQRSLLAINGGRITGHCSMGSLKAQTHTK

SEQ ID NO: 278993 - protein, 73 aa, Zea mays
  Clone ID: MRT4577_18601C.1.pep
SARGSGALNLLMHLLTWKIDYHSLNPLYKKDCSDANTCFRKTKCVALKTKGDAPYWMGIFTKKRLKMVDPSLA

SEQ ID NO: 278994 - protein, 65 aa, Zea mays
  Clone ID: MRT4577_186020C.1.pep
MDSRRFPEYHDSVLRRNGSGNSAGVGTAPGRLVLALVESSQGRHVLRPASWAIVMKARAAASVNK

SEQ ID NO: 278995 - protein, 552 aa, Zea mays
  Clone ID: MRT4577_186021C.1.pep
MPPTATPTDEHVREFVLSPRWAPECQGNNNLKSEKVVKSYADIVKKNTFVEVGTRDVDVEHAGSGDESSGGFDELDCQYTPTEREDYALSDRVVQVQQQYPDKQAEVLSFDRVLQGRITFPGQQWHSDFYANTTQTEDNDAYSCEYAQEVKYAILDGSSNLPETLDSEVDKLSLGHSDLLVQLLDSESCTEAKLIDAVKQLSGRIEVMEKKQAWSNKEVKHLQGMNERLLKRIVELKGTVMTLNSKIDPLTLDDSLNQFVEQCLGSEDVIYLVGGFDGFSSLPSLDSFSPSLDILTPLKPMAVGKSYSSTVALEGKIFVLGGGDGACWFDTVDCYDRSRDDWSTCPSLTCDKGSLAGVSVNGRIYAFGGGDGTKCFSDVEMFDPVHGKWIKNQPMLEKRFALAGVALNGAIYAVGGFNGVQYLSCAERLDPREPNWKMLPKMSAGRGCHTLTVLNEKIFSIGGYDTRAKAMVSTVEVYEPRMPSWVMVEPMNYTRGYHSSAVLGGSIFTFGGVKGEADTILDVVEHYKEGCGWMTTGLKSIGRRCYCSAIVL

SEQ ID NO: 278996 - protein, 210 aa, Zea mays
  Clone ID: MRT4577_186022C.1.pep
CIAQRPAGKRPTVPVPQPGVPVPRSGLRGRRRAGRTRLAALLHGGRGVGRHRLDLVVDEERRGHLRAHLPLHRFSSPPGSPHSASATATAHLFDESTQTRSNEPTSARSNRGTRAAPQQGRGQHRAVEEKDSVPVTTHASLRRQSQPSRHLAASPSRPPEIGPEQKISLFPGRVMSSADSAAERARRIEVEWSSERSGLPALVAWCGAGA

SEQ ID NO: 278997 - protein, 75 aa, Zea mays
  Clone ID: MRT4577_186023C.1.pep
SSPRFYSHILKGGPKGAPVFQTLFGGEKGAPLLVIRGEIFGSNIYIWGGGFFFWEFGLVKKEFKRVGPFVAPNRP

SEQ ID NO: 278998 - protein, 134 aa, Zea mays
  Clone ID: MRT4577_186024C.1.pep
YNKWKLFHQSRFVSSSPSSTFSLGEDEEGWGSELCHVLTLATMPSLPERRKALSTTKGSRSDRCLRAAGSVHGREQHEATTTDGREPGVGRSRSPGLPPDGERGREHHVVAGIHGIEPVCGGLFCTREPGRPRG

SEQ ID NO: 278999 - protein, 93 aa, Zea mays
  unsure (1)..(93): unsure at all Xaa locations
  Clone ID: MRT4577_186025C.1.pep
IYAILIIGLLQGVLLSCCGLFPDVFFILSVAFCYMFFVPFERVCRDSIWLSNAPQDMQGWIIGLQKMIQQLALPTASXLAGPLADHIFEPAMA

SEQ ID NO: 279000 - protein, 52 aa, Zea mays
  Clone ID: MRT4577_186026C.1.pep
VPRFIPLCVWFEMQNELGAWLHFGAVCRCQLRLKKKKGALSHLLLLQHLLWY

SEQ ID NO: 279001 - protein, 99 aa, Zea mays
  unsure (1)..(99): unsure at all Xaa locations
  Clone ID: MRT4577_186027C.1.pep
XHGQGNRRNRKRXXEGPXXTXXXPTTGXQKGXKKTXGRRGADAAGGTGPRKPXAXGDARPGTXQXSGRRGRXNPPXXHGAXPEXXKGXPRQAGXPKXPR

SEQ ID NO: 279002 - protein, 92 aa, Zea mays
  Clone ID: MRT4577_186028C.1.pep
LFVNKLWTSFLRFKPPRWPHLSQGWGPLSTFLGILDLFGKRLIFWTPIFFKKTTGGNWFFLNHPGSKTGNRGLPGNLKGSYFRFFGRTRGEP

SEQ ID NO: 279003 - protein, 50 aa, Zea mays
  Clone ID: MRT4577_186029C.1.pep
AVDLKGGEGESFTVAHYTLLDLNQTANYLDINGLPNLRRHIIYTGYIGDL

SEQ ID NO: 279004 - protein, 83 aa, Zea mays
  Clone ID: MRT4577_18602C.1.pep
IIILHTLRSVDFSLSGPTPLSSSASPTLLCSVFSTMASAKISAAQQVENRSALSKRSRNHLSVMEGDWKLPQCGNVNFNFRNV

SEQ ID NO: 279005 - protein, 66 aa, Zea mays
  unsure (1)..(66): unsure at all Xaa locations
  Clone ID: MRT4577_186030C.1.pep
EGTHPPPPRQSXXHXTGERRXACXXXTXKXSXSXNEVNTHAQNEPTHKIPSTRCYDNMDLNCSFPR

SEQ ID NO: 279006 - protein, 76 aa, Zea mays
  Clone ID: MRT4577_186031C.1.pep
GAVLSLICMQDKMILFWSEAIPAMYWVLAVAKAVVSHHSTCKIIVGQGMVKEKNCILKGTTGRFPLDQIVWCECAN

SEQ ID NO: 279007 - protein, 63 aa, Zea mays
  unsure (1)..(63): unsure at all Xaa locations
  Clone ID: MRT4577_186032C.1.pep
KFAVVKKAGAVGGREGKSDRVVSGVGGGVEEEYEAEEVADAGREGYAADARKTACVGVAXHGC

SEQ ID NO: 279008 - protein, 87 aa, Zea mays
  Clone ID: MRT4577_186033C.1.pep
FFLSSLGGGLTKNKQGRAGSQKKVLFGVCVKKKKTKFFSLLSPSACLGPVFVLMNVCQHAFWLIQLGLLYPYINWPPIICFDPIYLS

SEQ ID NO: 279009 - protein, 127 aa, Zea mays
  unsure (1)..(127): unsure at all Xaa locations
  Clone ID: MRT4577_186034C.1.pep
QSNSNPPXFRFFITDDCPNEKRVSCFDALQPPTLVFSPSTETFYFQXYSLFWSFPFPRWLXLLIHICKRLQRLDMNRPLTLLKNCLYIGKNFHLMQHIPHVRIISFYFYIYXSYNRNRRIYYTYAQS

SEQ ID NO: 279010 - protein, 115 aa, Zea mays
  Clone ID: MRT4577_186035C.1.pep
LLFYRGQRHNSSLVLQTNRPAAGAGIAEHLLLHLGQVSLWSWSRSGGCWVARRTIPSDCESSAFFCNRFGACRSDGTGGRVVAVMDLRSMGIAVFSGEVIPLYRRLGSRVAALGA

SEQ ID NO: 279011 - protein, 57 aa, Zea mays
  Clone ID: MRT4577_186036C.1.pep
KTLILLNPSPTYIFYLFNFSSLFFFFFFFFFFFFFFFFGTRGRTRGRTRGRTLGGRW

SEQ ID NO: 279012 - protein, 93 aa, Zea mays
  unsure (1)..(93): unsure at all Xaa locations
  Clone ID: MRT4577_186037C.1.pep
FRSTLTRRGSAGLSLHRLKXISGACRYFVLRRSLGWYSLLDACHSRLSQASYHTPGHHFTAAVHQRLPLHFRPPFKLFQGPKDHRIFFFFIPV

SEQ ID NO: 279013 - protein, 75 aa, Zea mays
  unsure (1)..(75): unsure at all Xaa locations
  Clone ID: MRT4577_186038C.1.pep
DPVERTRLTTLREHSPPRTHQAKRTLGATKGHSARRKPPPRGKAPPPQEXSKGGFKKSPPPPTSLVKREGKLLFF

SEQ ID NO: 279014 - protein, 322 aa, Zea mays
  unsure (1)..(322): unsure at all Xaa locations
  Clone ID: MRT4577_186039C.1.pep
MAAAPMVVPRVKLGSQGLEVSAHGSQVEPPGPPAPRWSRDRESMAAAPTVVPRVKLGSQGLEVSAQGLGCMGMSAYYGPPKPEPDMIALIHHAVAAGVTLLDTSNVYGPHTNELLLGRALRAAGGVREKVQLATKFGIRADADDGAWEIRGDPAYVRAACEGSLQRLGVGCIDLYYQHRIDNRVPIEVTVGELKKLVAEGKIKYIGLSEASASTIRRAHAVXSPLGRGFLSSGPTMVDKLSAQDFRKELPRFQPENLEKNAVIFERVXRDGGEEGVHAVAAGVGLGTPPGSRRVPHTRDDEGRELQQQRGGAFGGAHASGHG

SEQ ID NO: 279015 - protein, 108 aa, Zea mays
  unsure (1)..(108): unsure at all Xaa locations
  Clone ID: MRT4577_18603C.1.pep
VLFAEPPFKAEISSIREYXDRLSDSTTGADSLLDISSEADQQDLLSLLQAKVASLALHNKELQDILQAKSPKEAEADLSCXXYHSTQTDLGPSLGEPSETXRPDSRSL

SEQ ID NO: 279016 - protein, 89 aa, Zea mays
  unsure (1)..(89): unsure at all Xaa locations
  Clone ID: MRT4577_186040C.1.pep
FPSLHLVAFGIVVLCLVFGHFQVNASRVVFCTLCCWFSSFVLSIPSGLLCRSHGPEVGIVSSFLIFHPXXLWFCCNIRXRVGXPXFRPV

SEQ ID NO: 279017 - protein, 350 aa, Zea mays
  Clone ID: MRT4577_186041C.1.pep
MAAAPMVVPRVKLGSQGLEVSAQGLGCMGMSAYYGPPKPEPDMIALIHHAVAAGVTLLDTSDVYGPHTNELLLGRALRAAGGVREKVQLATKFGIRADADDGAWEIRGDPAYVRAACEGSLQRLGVGCIDLYYQHRIDNRVPIEVTVGELKKLVAEGKIKYIGLSEASASTIRRAHAVHPISAVQLEWSLWSRDVEADIIPTCRELGIGIVAYSPLGRGFLSSGPTMVDKLSDQDFRKELPRFQPENLEKNAVIFERVNAMAARKGCTPSQLALAWVHHQGADVCPIPGTTKVENFNSNVAALSVELTPQDMAELESYASAGVQGDRYHDFLNTWKDSETPPLSSWKADE

SEQ ID NO: 279018 - protein, 52 aa, Zea mays
  Clone ID: MRT4577_186042C.1.pep
KRSTRVCCYPYVFLNEGHTVSVVSNVFILGSRRPMHQPAWNTDRWVLLPPSG

SEQ ID NO: 279019 - protein, 98 aa, Zea mays
  unsure (1)..(98): unsure at all Xaa locations
  Clone ID: MRT4577_186043C.1.pep
PXRAPTHSAIPHHAEAEXTNPDPTPPPATASSDSLPTPPHPTXPLTPAQPEXPQTSDCGHRRYAGGGGGAILLDIIRPWPQWCVKVGYFWAESKKMRW

SEQ ID NO: 279020 - protein, 79 aa, Zea mays
  Clone ID: MRT4577_186044C.1.pep
NPSQPKFTFIRRKREGADHQHTVDPDGNRPPPPSLRLRKPRMKHARVRMHSWRTEIDICSSSVKIVQIFIMKHLCEFRY

SEQ ID NO: 279021 - protein, 76 aa, Zea mays
  Clone ID: MRT4577_186045C.1.pep
CTLPCNFSGEATTNQFFSHSNSAVTSIKPSNVPSINAMGMLPHMSEVNSSRVEESTLCWGSSSPPKVLKAKTPSTK

SEQ ID NO: 279022 - protein, 312 aa, Zea mays
  Clone ID: MRT4577_186046C.1.pep
MYSPKPESSFGPNPNSGTHQQQMELTGANMGPGNGANNNTNMAGRQRLRWTNELHERFVEAVTQLGGPDRATPKGVLRIMGVQGLTIYHVKSHLQKYRLAKYIPDASTDGNKTDNKDPGDLLAGLEGSSGLQISEALKLQMEVQKRLHEQLEVQRQLQLRIEAQGKYLQKIIEEQQRLTGVKSETPAGGASVTVSSDQFPDSERTEPSTPAPASESPTQVGASNRDTGDRTEATKSTCHGDSLSRNEPLTPDSNCQNGSPVASPNHERAAKRQRGSGTEFLDSEAEFSLPRHIFESSSGSEFQQYSMSYSGQ

SEQ ID NO: 279023 - protein, 98 aa, Zea mays
  Clone ID: MRT4577_186047C.1.pep
MTSGFESPRYSKFCGLVSQARVSSIFMLYLTSAVREHASKVFKQRIDCNQCMWWRLWCNHAWWACKVSKCRGTYSLHTGLRGLGSKDHLIPVKAHWRG

SEQ ID NO: 279024 - protein, 96 aa, Zea mays
  unsure (1)..(96): unsure at all Xaa locations
  Clone ID: MRT4577_186048C.1.pep
MTAGHGVGSRKRDLFVCPFREKGYIXPITTXLRLYKMVDTTMLXANGAVHEDMPAKFYXHGRTXGARWNCTQRAIVVKANNHGIGRISMKSMHVRV

SEQ ID NO: 279025 - protein, 266 aa, Zea mays
  Clone ID: MRT4577_186049C.1.pep
MPWRRASLGVVTSSLLVRLPVALSRLAGRRRQTSSSSSTRRPGPGHAMPEKEAQAAAFCGEAVIAEFESLTRDAAAVQRDTLRRILADNACAEYLRCRGLAGRTDAASFRACVPLATHADIEPYIARIADGDTSPVLTAKPITSISLSSGTTQGKRKYLPFNQELAQSTMQIYRTSYAFRNRAFPVEDGKALQFIYGSRQFTTKGGLTATTATTNVYRSEEFMPTMRAIQSQVCSPEAGDLRADFAQSLYCHLLCGLLYADEVRIV

SEQ ID NO: 279026 - protein, 75 aa, Zea mays
  Clone ID: MRT4577_18604C.1.pep
AHESAGVHALLDPRLQIRTVPCHGQLHRTVLHLPGGDPLTVPLPPPPPPPSMSTWATPLLSSIPRRPKDSASTTS

SEQ ID NO: 279027 - protein, 55 aa, Zea mays
  Clone ID: MRT4577_186050C.1.pep
PQSYKHTNTSPRHYVNHIHHILLHTLLKHHHYDIKHKSASSYANKPFRDPLILDR

SEQ ID NO: 279028 - protein, 77 aa, Zea mays
  Clone ID: MRT4577_186051C.1.pep
KKKTDSWRNSLKIFHSKKGLIVFSPPPLLGPGLKFNPLSPFNPFPRFFQKNPQGSPFIYGGTGAPSLKNALPSFATN

SEQ ID NO: 279029 - protein, 48 aa, Zea mays
  Clone ID: MRT4577_186052C.1.pep
HLELTILCHWWITTIPSASGQPSDFPPHHHLYLSLTDYICTAIIICRV

SEQ ID NO: 279030 - protein, 87 aa, Zea mays
  Clone ID: MRT4577_186053C.1.pep
VPHKATMAIHFTELYVTYLCLVSISRTSTININYSCLRSYQICFLPRSSCQYLASTAKRCCAGQKTSFYAEILSTVCFINLDYDELV

SEQ ID NO: 279031 - protein, 65 aa, Zea mays
  Clone ID: MRT4577_186054C.1.pep
GRLRARRMAFHTSAVSEAGCLLTFYTCGSDPGLFIMSHFSRVITVKFFHCCASGSRKKLVLVLTT

SEQ ID NO: 279032 - protein, 78 aa, Zea mays
  Clone ID: MRT4577_186055C.1.pep
GGGLEGGVIIARGGGFKKLFSPYNSPQPTRKKHKLKILGGLMRGVTQIKGGGPTGGFSVRKTGWAPGLINPPTPGGGG

SEQ ID NO: 279033 - protein, 129 aa, Zea mays
  unsure (1)..(129): unsure at all Xaa locations
  Clone ID: MRT4577_186056C.1.pep
FLPCCGFPGSSVGPALVAPFVGPCSPALLAAVPWFRVARWSPSGLSSWRRGCAGRRPLSWAPXFSCFSLVSAGSLSLLLVSVPWFSSSSCASSGFLPPSCSALLFVSPSRRRGACARACLLRSFAGRGA

SEQ ID NO: 279034 - protein, 104 aa, Zea mays
  Clone ID: MRT4577_186058C.1.pep
MATELTGGQLVSNQRNDPVQPNYRCLPGKGYQITFRRGLLSPGGAYHGFTGREGKRALGMMSKDEGRTYGDLIGLTDKELGVPCDWENKVQAKYPGVDRLTGDA

SEQ ID NO: 279035 - protein, 153 aa, Zea mays
  unsure (1)..(153): unsure at all Xaa locations
  Clone ID: MRT4577_186059C.1.pep
GFQYMMLDKMTLSNVRIGRQSSSRRTFLRSALRSFLWSSDVAIVGRLHGVGSSGIRVLFTVGIDVLFRLVEVGLDADAEGEVVEGHAAQHRRPLGHGVLSHASFSHHHMPTRSSALGLSSGRPEKTDRWMGPISFLSLXWLGGMQSRPASRVP

SEQ ID NO: 279036 - protein, 46 aa, Zea mays
  Clone ID: MRT4577_18605C.1.pep
MMTWLTNAIPLIANKVGTQTQARKKLLHVRERDSLCEAGTSLHTVL

SEQ ID NO: 279037 - protein, 388 aa, Zea mays
  unsure (1)..(388): unsure at all Xaa locations
  Clone ID: MRT4577_186060C.1.pep
MAVKTLAELSLQDRDVTIQVQVNRKWEFKGNTDDGPILHVDMVLTDAMGNAIYAEMPSKLIEQKGSLLQLGKVYYIRRFRVANSKSQYKVLNAPLMIYLTLYSIIDLCRDPPSTFPLYVYNLTTYDDIDANGPKSKDFHASLYLNGGAACHWNPSITEAEPYYERXEGCKCTVTITRILDDQPWWYRACNACPNKPSMQSAVSSCRTCGSTDAILRYKLNFMASDGTAEMRMFCFDNIAKRIIGKPCASLLTSATSTSNIPPDLAAIVSLKFTFVVVYNEMSFQVSEKELFIKSVIASHGRDLTFPSPKLKIPVQPSTPTQLLGAAKQQVSPSSALSKLSTAISPENSPQTEDNLQNEDQNILAFESPPKRARRKSLKFDCDKNLHDE

SEQ ID NO: 279038 - protein, 382 aa, Zea mays
  Clone ID: MRT4577_186061C.1.pep
MGKAEARSRGRGGGGGGGGASGNPGKIFVGGLPRDTTDATFVRHFGQYGEIVDSVIMKDRHTSQPRGFGFITYSDPAVVDKVIEDNHVINGKQVEIKRTIPKGSVQSSSKDFKTKKIFVGGLPSTLTEDEFKSFFARYGTVVDHQIMFDHETKRSRGFGFIVFASEQVVDDLLANGNMVDLAGSKVEIKKAEPKKSSNAPPPVHVRNARSAYDSGSRDHPSADNYGGMASAYGNYRGGGFGPYRSDTGFGARLSSYGGVGDFGGAYGRYYAGLGGGYGAASSFGYPGRFGLYGGGFGGSYAGADLSGYRRGGGDESFGAPGGNPGFGGDAEESFGGPSSSGFSGTAYGGAYDPTLGGYGSASTPDMNRGSFTGGYGRYHPYG

SEQ ID NO: 279039 - protein, 141 aa, Zea mays
  unsure (1)..(141): unsure at all Xaa locations
  Clone ID: MRT4577_186062C.1.pep
PSEEENTPGRSVVTKVKVSTPQRAXVVLHIHVVKKVSDTTESLRLSVFRSHKHLYIQVXDDTNQGDLASDXPMLKSVSKKFEFSPGPGIEIPQNIGEQLPKSFLEKGITKFVYRTRGRFLSTNGRYKAXLLDFPRERGLEF

SEQ ID NO: 279040 - protein, 59 aa, Zea mays
  unsure (1)..(59): unsure at all Xaa locations
  Clone ID: MRT4577_186063C.1.pep
MLQKMSVFGMNVGGVPWTEQNKNPRNRDGFMNVMLIXTVILLLLLMCFLFPSLYSHGTT

SEQ ID NO: 279041 - protein, 202 aa, Zea mays
  unsure (1)..(202): unsure at all Xaa locations
  Clone ID: MRT4577_186064C.1.pep
MGLVVSATASCSDIFFSRRRSSSPPPPAAASTPPPTYTIPEPALVRVFRHFDADGDGRISADEMRELCGCTAVEADEMVAVADRDGDGFISLEELEALFEDGDRSDTLRAAFAEYDENGDGVITAEELRRALWRLGIVGEEMTAERCAEMIAVVDIDGDGVVCFDEFKAMMXGGGVMNHTRPALCTTRVRVRLILFVDMITP

SEQ ID NO: 279042 - protein, 33 aa, Zea mays
  Clone ID: MRT4577_186065C.1.pep
SINLTPFIQLTNINSFILHQPHINQTYIYPIQT

SEQ ID NO: 279043 - protein, 83 aa, Zea mays
  unsure (1)..(83): unsure at all Xaa locations
  Clone ID: MRT4577_186066C.1.pep
NIRATTVETHRQWTKDVEAYRRKAXSSRRPQKVTIPILADPLRDSILQLHMVDPKKNDMGEPKIDSRALHLKRPDRENQVVTK

SEQ ID NO: 279044 - protein, 150 aa, Zea mays
  Clone ID: MRT4577_186067C.1.pep
AVGAAGAGAERPRRKNVRISSDPQTVAARLRRERVSERLRVLQKLVPGGSKMDTASMLDEAASYLKFLKSQVQALETLGTTTATNANSSASATTSRSSAASRSPQYNYYGGGGNNNNPAGFLGFSNVISPAGYVNPGGSSSNTGSNKLLF

SEQ ID NO: 279045 - protein, 64 aa, Zea mays
  Clone ID: MRT4577_186068C.1.pep
PSGDTSAASGLEKQPGSPKLKAWCVKFTPPTLNPVMVPEGYKHLMPSSPLVLNALLKPVRGTKN

SEQ ID NO: 279046 - protein, 116 aa, Zea mays
  unsure (1)..(116): unsure at all Xaa locations
  Clone ID: MRT4577_186069C.1.pep
XXKLTYPFNPHKFLQSLVTQFYTNSCLQQGTTLDVAQLKRMVAKRGIIEXFTKQXDGKRYLLVLENMCTMGEWDAIRACLPHRNKGNWIIVSTEHHEIASLCVGHSYQVLELNSFS

SEQ ID NO: 279047 - protein, 67 aa, Zea mays
  Clone ID: MRT4577_18606C.1.pep
RSPPNGLLPTPPTYGYVASRPQLRKVKNPHKEEKKFEPKLKLRPHRKNRFVTPSPKPFRGHLTPVYM

SEQ ID NO: 279048 - protein, 60 aa, Zea mays
  Clone ID: MRT4577_186070C.1.pep
VLDLEEGIWACRCPSGHFLLTWTFSSSCERIAPYFSSMFFIIPRASCQWLYFGDKVVKVC

SEQ ID NO: 279049 - protein, 58 aa, Zea mays
  Clone ID: MRT4577_186071C.1.pep
QNSVVMRCFQPMHRLLSKDHLVLHVSYLLMPPRLQMFSRASLSSNLFSAHPPFKICIN

SEQ ID NO: 279050 - protein, 190 aa, Zea mays
  Clone ID: MRT4577_186072C.1.pep
PTRPQASRRSKHKFMTESISNTTATNEHLRHLAMDRRSTRDECMNAISNQLKDIESLEAESDAHGDKSLETALMWYDKFLGFQVVGGEGVKFVFNKIDVQNPDKKYSFCIKLAGERYILVWCVPSVDDAEELVKDLNCSNDLYKFVRAMREMFQAATISGNLLPSSFCPDVSSITSSSFSALSLDSRSEK

SEQ ID NO: 279051 - protein, 106 aa, Zea mays
  Clone ID: MRT4577_186073C.1.pep
TALMWYDKFLGFQVVGGEGVKFVFNKIDVQNPDKKYSFCIKLAGERYILVWCVPSVDDAEELVKDLNCSNDLYKFVRAMREMFQAATISGILCYIFSLRVLSSIMT

SEQ ID NO: 279052 - protein, 136 aa, Zea mays
  Clone ID: MRT4577_186074C.1.pep
MADNDSPVTLRTRKFIRNPLLGRKQMVVDILHPNRANISKEELREKLGSLYKAQKDQISVFGLRTQFGGGKTTGFALVYDSPEAMKKFEPQYRLVRVGLATKAERASRQQRKQRKNRQKTLRGTAKVKGAKAKKEK

SEQ ID NO: 279053 - protein, 82 aa, Zea mays
  Clone ID: MRT4577_186075C.1.pep
DNPTDRSCCCDGVPVRRVGRLQIRQLSLQRHDTSLEQSPHADQTELFLLVINTAYLMLENTYPPNLQALHSCALCSKPLTHH

SEQ ID NO: 279054 - protein, 78 aa, Zea mays
  Clone ID: MRT4577_186076C.1.pep
YRSVLPGWPHASNKSVPAAQARSPQHTPLLFIALATGHACRHACDVDELLAGAYELGLFILMGDRSLSLRMVSTASKA

SEQ ID NO: 279055 - protein, 47 aa, Zea mays
  Clone ID: MRT4577_186077C.1.pep
AVEEVTLEVYSGGASLCPSAEQNVSSFSLKFYNQLSICFSYAVRAFL

SEQ ID NO: 279056 - protein, 101 aa, Zea mays
  unsure (1)..(101): unsure at all Xaa locations
  Clone ID: MRT4577_186078C.1.pep
FEIARDLIRHQPQTPPPLLPPPPPPLLLPPPPPLLLPPPPLLHFSPPPXRRPSAWSLLPXRPSPAPASSTPPSPAPDALSSGEEGCGREGDQRMAMGEGAP

SEQ ID NO: 279057 - protein, 209 aa, Zea mays
  Clone ID: MRT4577_186079C.1.pep
MSGREVREYTNLSDPKDRKFGKGKDKIDDEDITFQRMVAKMQEVAGDRGGYLHGRGALDSDDLLYLKEQMEAEEDAERLLRHTEKRAFAAFKKAAILADSTPAVPVALRVEPKPKSDIRQQDLLKNIVGIKPKRPKVSSPSQPTDSNKPKHTEEDPVSELSSSRNPLGPSHGAVNPDHTAPRLDEPTEVKQQNRAGSLLGLAYESSDEE

SEQ ID NO: 279058 - protein, 187 aa, Zea mays
  Clone ID: MRT4577_18607C.1.pep
MGWRWHDDDGDSGRGLGGVPDLAGGGGDGAQCATRRVVQSRCHTEEVEPGRFVRKCEKTEQLLRDCVGRPSELVESKTENTEEDVTEEMKSGSLSLGFPRNEPFAFPGLRSDMEALEKDFFGSLGNVLDEAERMANSFVRSFGFPPAHDSGSSPFRRQPAERHIEEDTAKNKTESDYSEFRSKISDV

SEQ ID NO: 279059 - protein, 188 aa, Zea mays
  unsure (1)..(188): unsure at all Xaa locations
  Clone ID: MRT4577_186080C.1.pep
YQQMQEVAGDRGGYLHGRGGISCFFYRKTPVKFVAPLLTLFXALDSDDLLYLKEQMEAEEDAERLLRHTEKRAFAAFKKAAILADSTPAVPVALRVEPKPKSDIRQQDLLKNIVGIKPKRPKVSSPSQPPDSNKPKHTEEDPVGELSPSRNPLGPSHGTVNPDHTAPRLDEPTEVKQQNRAGSLLGLA

SEQ ID NO: 279060 - protein, 221 aa, Zea mays
  unsure (1)..(221): unsure at all Xaa locations
  Clone ID: MRT4577_186081C.1.pep
MSGREVREYTNLSDPKDRKFGKGKDKIDDEDITFQRMVAKGFWFSTRWLIPXMQEVAGDRGGYLHGRGALDSDDLLYLKEQMEAEEDAERLLRHTEKRAFAAFKKAAILADSTPAVPVALRVEPKPKSDIRQQDLLKNIVGIKPKRPKVSSPSQPPDSNKPKHTEEDPVGELSPSRNPLGPSHGTVNPDHTAPRLDEPTEVKQQNRAGSLLGLAYESSDEE

SEQ ID NO: 279061 - protein, 173 aa, Zea mays
  unsure (1)..(173): unsure at all Xaa locations
  Clone ID: MRT4577_186082C.1.pep
ILLVAIELKDGMSSYFREASQISASGILESLTTERCLERISLERLEVLGDAFLKYVVGRHNFISYEGLDEGQLTRRRSDIVSNSNLYELSIRRNLQVYIPDQHFDPILILAEGRPCKVVCNPDREATLHPKNIDPDRRENCNLRCTKSHHWLHXKTIADVVESLLGVFIVECG

SEQ ID NO: 279062 - protein, 69 aa, Zea mays
  Clone ID: MRT4577_186083C.1.pep
SVSAISVQARFAKPLGPSMRGIWLDGAGRRRRGLQNTQVSDERQTAPSMLCSVGSRWRSGDYIRFRLRV

SEQ ID NO: 279063 - protein, 73 aa, Zea mays
  Clone ID: MRT4577_186084C.1.pep
RAPTQNMWRSKTTPKTVCISTKKNRDTKRNPQPQGARGGGPRRTLTARTGGKKRHRKNGGFTNQTTQPTAPPL

SEQ ID NO: 279064 - protein, 44 aa, Zea mays
  Clone ID: MRT4577_186085C.1.pep
TFIYNGIQSGQQSSHSSPSPISHFMWFQFFAWCRIISIFLCNIM

SEQ ID NO: 279065 - protein, 144 aa, Zea mays
  Clone ID: MRT4577_186086C.1.pep
ANTNPIRTPVRGVGWPCPLPRPVRLRMLRRSHCHRHDERRLGVLACTRARARSMSLVRARAIAIMLTLSSLDHAHASGSITPPPVHLPPPTHLRTADPCAAADLICATTPCTLTLLEPGPGLRSHSPDHTPCPDAHTDRYPKPR

SEQ ID NO: 279066 - protein, 65 aa, Zea mays
  Clone ID: MRT4577_186087C.1.pep
MRGQRLYDSLKALSDVSTPLNPFLLHLAMVDMLVLFETPPDFALFKALDKGKLDKVEVSDCRCIF

SEQ ID NO: 279067 - protein, 104 aa, Zea mays
  Clone ID: MRT4577_186088C.1.pep
MVSLMDDVTAEIFLRLPPDEPEHLFRAALVCKPWLRVLRDPSFRRRYSVFHRAPPLLGLLHRLQVFEGDPAARLAPTTAAPLSPYPDLCRTRPLDCRHGRVLLH

SEQ ID NO: 279068 - protein, 174 aa, Zea mays
  unsure (1)..(174): unsure at all Xaa locations
  Clone ID: MRT4577_186089C.1.pep
FLGPPRRTETNLKHLKHNCVPTIGSSNISAWVWGVGLFANAGTATIFPQSSQAPIAYLFPPYLXQQRSRGCENHNFXPYRIQQAIGAGILPFXPLFLQQLXALIQQLPLVHLLAQNIRAHQLQQLVLANLVAYXLKQEFFSLNPTPALNFVXFIEQQQLPLSRLXCCLPQHFFL

SEQ ID NO: 279069 - protein, 97 aa, Zea mays
  Clone ID: MRT4577_18608C.1.pep
IFPGKPKGGPGAPKNPWSYAKNSKACKCWESPNKMIRPPMRLSPLVRPLGWALLVNGPFNKQGRQKNFFPHWIVRPVTIGLFMFGALSLRKGPPFLY

SEQ ID NO: 279070 - protein, 65 aa, Zea mays
  Clone ID: MRT4577_186090C.1.pep
MPKHFRARHNRKNQEEDERPINYLPLDEGHCIRIYLDGCLILGRFLFSLLIIFSFHLALMFGRKR

SEQ ID NO: 279071 - protein, 71 aa, Zea mays
  Clone ID: MRT4577_186091C.1.pep
DGKTQWVGTRCHLYSHIVNHWANKHTTDDQFTETAGQLHSQHNRTPYISDPNTRLASGLAELFVGPSSHIL

SEQ ID NO: 279072 - protein, 108 aa, Zea mays
  Clone ID: MRT4577_186092C.1.pep
YFPPFSFCCRVVVADEAITLPHVRLLRPSSLSPLPFLQASSGSATFPAQRKRPPRSRSSCFVPHLGYHRFRRSHGSCGGAADEGDLLLDEGREDPLEGHNEVASHVCD

SEQ ID NO: 279073 - protein, 75 aa, Zea mays
  Clone ID: MRT4577_186093C.1.pep
QCNLNFRHQNRLIDLGSQAGSTAKRQVMAVVRARFHLTLLVGDKDRVGLAPGMRELGTRRCDLQPGRHRAEDSAL

SEQ ID NO: 279074 - protein, 92 aa, Zea mays
  unsure (1)..(92): unsure at all Xaa locations
  Clone ID: MRT4577_186094C.1.pep
SLLEXTNKHTFRXLXLXLKEQFHXTLTLHXGDLFFXGLLEXGYCHAFFGPSIXLFPSXLFSXXXXGXTRGSXDGWNXSXXWAVXGGAALPRD

SEQ ID NO: 279075 - protein, 119 aa, Zea mays
  Clone ID: MRT4577_186095C.1.pep
LCWGFPWGVSGHLLQGGQYPEHGDALAPGYLDVEQAYAPGEVLQLAENSERDNMKTPIRPLHIQVGVRNDEEQTKLVGGATSASGGGMPTMHYELPTKNAGSTKATTCKGRLLAALPTA

SEQ ID NO: 279076 - protein, 279 aa, Zea mays
  unsure (1)..(279): unsure at all Xaa locations
  Clone ID: MRT4577_186096C.1.pep
MASLYHSSLPLSPPSSSCHGVLSLAPRTAAPFVCLCRAPPQDDHDAELLGALQSNGNGSLLREQHPASAKVLESASAELGDGGGGRRSSQAQLRARDCARRIMSLPMEERVKVLDLLQRDEAALTISDYNDIISALARGGDYDSAVALFRALEPNGVVAPDAHSFAIAVQCFCRKGAPDEAKETLDEMVARGYLPSVAAFSAVVGCLCKRGRVTRAMEVFDTMRTVGSEPTIRTYNSLIGGLCYVXRLEEARDLLKTAQDXAQQTADIYTFTIVLDGFC

SEQ ID NO: 279077 - protein, 100 aa, Zea mays
  unsure (1)..(100): unsure at all Xaa locations
  Clone ID: MRT4577_186097C.1.pep
NRTLPCTIDSLRQRQTHSGPXSSYLCGSPSCQIPPHNSSPSPSPLALARGEVRWSSDPEAAMATAEVVVANGSCGADTKTVFKEIYTKPKHEMLYDPAFE

SEQ ID NO: 279078 - protein, 186 aa, Zea mays
  Clone ID: MRT4577_186098C.1.pep
LGCACDVLAGNNVIYDHLLRSYSAKLFFGFQGSSVTNPAFLFGPSSSSICNVFFQLMSWSSLILTLPVCLGISDVLIFLSCCSASFSSYVSLLSICSTPPVWPVRASGDREFPPRCFVTSQTSLAHHTASVACKSLHVFVITPFHRPGCLWVAKSATLPSGRAYAAGWWAQIEPGAAEHQAALVPG

SEQ ID NO: 279079 - protein, 45 aa, Zea mays
  unsure (1)..(45): unsure at all Xaa locations
  Clone ID: MRT4577_186099C.1.pep
RCLRSCSSLTSSCASLFPSLLQACLALGMILTRCGXXWXXXPGXX

SEQ ID NO: 279080 - protein, 86 aa, Zea mays
  Clone ID: MRT4577_18609C.1.pep
LAGGQPLADAFQLLEHLLDRNVLQIKDSIIVHREPTHGGRQALERTVKAKPGGRQGHMPRERRLASLMVSQGKGKGQASTVVVVIK

SEQ ID NO: 279081 - protein, 52 aa, Zea mays
  Clone ID: MRT4577_1860C.1.pep
TYLFSITSCLSATNNQGHDPCSRRSHPRTRCSASCSTSPCYSTTVSFSTLPH

SEQ ID NO: 279082 - protein, 55 aa, Zea mays
  Clone ID: MRT4577_186100C.1.pep
LKSLMLALESLSSIRVSKTWLLLVRPGSVSFPACSHFSALCQVTWLERVGPTCSP

SEQ ID NO: 279083 - protein, 79 aa, Zea mays
  Clone ID: MRT4577_186101C.1.pep
LTLKTTCMLLCMCPAGSLFLHLYTLVSSLAGVLLSMNRLILFDRCFNALSFYGFKSCYFLVFSGCYFLVVLILTLLRGF

SEQ ID NO: 279084 - protein, 95 aa, Zea mays
  unsure (1)..(95): unsure at all Xaa locations
  Clone ID: MRT4577_186102C.1.pep
TLFGYLKPAGVYEXINPIVKAYRSQTSIATRXLPLSPLLLRQPADILQLVPWVHLVVQNIRAQQLQQLVLANLDGYSXEHNFLALNQLAVLKSAG

SEQ ID NO: 279085 - protein, 118 aa, Zea mays
  unsure (1)..(118): unsure at all Xaa locations
  Clone ID: MRT4577_186103C.1.pep
ACPGKRPSWRRHKETSTLGRERPRKAERHLRPPSLDRRPGDGEVGRSEATELLRRRRGLRPCRPAKDFAQHEGKRIRGSTWVLVPGEETIESLSTWLSASEXAHIERGGQSSRKNRRA

SEQ ID NO: 279086 - protein, 228 aa, Zea mays
  unsure (1)..(228): unsure at all Xaa locations
  Clone ID: MRT4577_186104C.1.pep
MPPSPHPRARLPPACGSPPELARAPISPSGIPPASPXQAPSPRQAPSPATRLPPRPRSPPHLSPHXHSPPPMLRXTRPRSSPLFAXWVPVPTISMDCASATTQSPPVLXKARPPPVILDSPRPRPRSTLLSPTIPTDSAPYHHPGSLERDPLSSLLQSPLPQPRSPPSLSILAHALHGRRGRDARVDLCRGCDALPGRLLPVLRAPCAALERHRAVHVLVVSPRLADS

SEQ ID NO: 279087 - protein, 337 aa, Zea mays
  Clone ID: MRT4577_186105C.1.pep
TGKNCFNGMSLHNISDNPNPYDEAISIIGKTLSAFDEDNLIPCFGFGDASTHDQDVFAFYPDERPCNGFQEALARYREIVPHLRLSGPTSFAPIIDMATTIVEQSGGQYHVLVIIADGQVTRSVDTEFGQLSTQEQMTVDAIVQASQFPLSIILVGVGDGPWDMMKEFDDNIPARSFDNFQFVNFTAIMSKKISQSKKETEFALSALMEIPLQYKATLELGILGRRIGESPERIPLPPPFASYSTVSRAEPSRANSYRSVPSHPREEPAVNSTITASVTSPSAAESRVLEPQMCPVCLSKPRDMAFGCGHQTCSECGPQVTDCPICRRPIDTRVKLY

SEQ ID NO: 279088 - protein, 82 aa, Zea mays
  Clone ID: MRT4577_186106C.1.pep
MAAEIFCLLMLLGLSESAATVTIFPQCSHASIASLITPFLSPAVSSVCEIPILQPYRIQHGNYTSIEPYSILQAITSGILPP

SEQ ID NO: 279089 - protein, 357 aa, Zea mays
  unsure (1)..(357): unsure at all Xaa locations
  Clone ID: MRT4577_186107C.1.pep
MKDTDQSDSSANVTSDAEESVEDDDSVCVSDDAQNDLKNTKCKLEDASKESSTAREAERSDSSANVIADAQNGSEPTTNELAVITISNDKENESMLFTCNSEVGFKESIIGQEADHDDSSAYISYDDQNECEVTACHSEGAQGESNVIQEGEDKTAGAENKLEFTACESVDASLKPAMPQEAAGDINTTDATKDIRVTEETNESFNAQMPAECTDAKEPSIDDICGAFSGMNLKGDVYFDPAESATCPRNKLIISRRRRTPEEEEYLRGFNPRAPNFLPLELDPDAEKVDLKHQMMGERKNAEEWMIDYALRRAVTNLAPARKKKVELLVQAFETVLPHDEDDKKNVSXSRPVQACN

SEQ ID NO: 279090 - protein, 129 aa, Zea mays
  unsure (1)..(129): unsure at all Xaa locations
  Clone ID: MRT4577_186108C.1.pep
MRVEMQTDSAMDKVAPPLLADASRTVIMAQEPPLRKGRAAVDLICSHVIMSQRARETVNVADGELKPEGKRKFIAKEDEAEQHWQTAXHRQRENPMMTHLPYIIIIWMYTPFVILAIASANGCIRGSVP

SEQ ID NO: 279091 - protein, 96 aa, Zea mays
  Clone ID: MRT4577_186109C.1.pep
PTRPDSFSDLVNGALEGLFHPVGMGGEGEATVIEENRLDRAGESSRALDDVQASEQCNDHRESHVPYSGNVSLRSESSTTSARSFAFPALQNEWNS

SEQ ID NO: 279092 - protein, 49 aa, Zea mays
  Clone ID: MRT4577_18610C.1.pep
VLGACRWTLLRDAPPYCPATQLACVVAPSPEVPQKASPGLRRRARARIT

SEQ ID NO: 279093 - protein, 61 aa, Zea mays
  Clone ID: MRT4577_186110C.1.pep
PNHFLKNLDRFCCPPRGMNPCLSCNECSRLFGLLTYLFLEVWLPMLGDDSVRGTFYIPELL

SEQ ID NO: 279094 - protein, 95 aa, Zea mays
  Clone ID: MRT4577_186111C.1.pep
AGQCRGSRQIQPSSESLLQPTMLATRVLRAAAGGPKPNITAFNMRAFQASTGQPRYDPWERNEAWRYQGPYSRWNRLKGGFPGLGIATVAFTAYC

SEQ ID NO: 279095 - protein, 80 aa, Zea mays
  Clone ID: MRT4577_186112C.1.pep
WPSKHRTKTSFLPSLFKLQNLHFLFLVQLQTVCHFYNILPFYSVQDIRYKLLILLASHQSSKGGIADAWADAGRTRGGRW

SEQ ID NO: 279096 - protein, 124 aa, Zea mays
  Clone ID: MRT4577_186113C.1.pep
FRGYFFSALLLEPWITNVCGINKAQDESLEAAQLLKPDNLINKAKVDPGHHVHDTGCAWGSLAIHMVNRTGCKCTRITLSDEQLKYGKREVKEFVLHDRITLLLCEYRQKPNGQKFYRIISCGM

SEQ ID NO: 279097 - protein, 74 aa, Zea mays
  unsure (1)..(74): unsure at all Xaa locations
  Clone ID: MRT4577_186114C.1.pep
HYIKTILCHLRIHWIDSSTTTTLLFFLVHDIHLYILLTNXHHGQNLELDKKKKIFCLPLPYPRLLLNLLSTRIS

SEQ ID NO: 279098 - protein, 116 aa, Zea mays
  unsure (1)..(116): unsure at all Xaa locations
  Clone ID: MRT4577_186115C.1.pep
LVPRAARFGAWARGAFGWWSLAVWGAALARFAWRRVACVALPRPRFRGLGCSLFAXRCCGCRFCFLFLWLLGCFRSPGCLLPALGFGPAVPCGCPWGSPLCFSAPRGFSSPAPFLV

SEQ ID NO: 279099 - protein, 76 aa, Zea mays
  Clone ID: MRT4577_186116C.1.pep
ISYYCFLQEVVEWLKDESSRVHFVNGDSNIFVFVYTLIVKGLLVFFCWWRSIRICTVRSPSHKLRLIIYPSDEIKR

SEQ ID NO: 279100 - protein, 57 aa, Zea mays
  Clone ID: MRT4577_186117C.1.pep
DYVSRPDKISAADITAICQEAGMHAVRKNRYVILPKDFEKGYRTNVKKPESDFDFYK

SEQ ID NO: 279101 - protein, 135 aa, Zea mays
  Clone ID: MRT4577_186118C.1.pep
FGCFFFFAYRARGARLPNKRLGTRVQRLAPTRRHKDVFAYAQGAARTGGGNADNARSQRSAGPCRERMSAEELTLDRRKGGKRRPVTLANAESKEARRGACGGVTLGRVWDDPARGLRWCTGKKKLAFEPAAARR

SEQ ID NO: 279102 - protein, 109 aa, Zea mays
  Clone ID: MRT4577_186119C.1.pep
GRFGELLVHPAAAMPLRQGAHEPRPRVQGEHCGGGGGCGREHLWVTHRRRRSVAVVIVAQLNLLGVHRSSSDYDVSGLKLDNQTQRETTAMGVSDCFKAGSNDAFKQFI

SEQ ID NO: 279103 - protein, 59 aa, Zea mays
  Clone ID: MRT4577_18611C.1.pep
RTSELTIQFVDWCSNGFKCGVNYQSTNVLPDSHLMQLHLTNCMTSYYTIDLSVVFPIDH

SEQ ID NO: 279104 - protein, 41 aa, Zea mays
  Clone ID: MRT4577_186120C.1.pep
IGVAIVGRCDSVCCTVSRGSGGNGNNSTDLVLYAELTLRMR

SEQ ID NO: 279105 - protein, 92 aa, Zea mays
  Clone ID: MRT4577_186121C.1.pep
KCTTWSGVWTCDDLSTKWAATCKNCVTCVHGKRGHQVQVPKLPPRKMWVQDPLKSHPIPQWARRIKVNQMFLFMLTSQSALFKEGIPFTKKK

SEQ ID NO: 279106 - protein, 44 aa, Zea mays
  Clone ID: MRT4577_186122C.1.pep
MKVCQVEFDKAYVVKEGEVTKAYSFTCGNEKNPRLSENCKMSCT

SEQ ID NO: 279107 - protein, 100 aa, Zea mays
  Clone ID: MRT4577_186123C.1.pep
MGRAISAVSRRPLGLSGACLLLAFRPLGLWAWLPRTMEEKSSLLQETVDYVTNILKHIVSFVVKKNDELSHGLTNISSALDTMGSAFSSIKSLLSSPIFN

SEQ ID NO: 279108 - protein, 231 aa, Zea mays
  Clone ID: MRT4577_186124C.1.pep
MPKSKRNRPVTLSKTKKKPGLERKGKVVAEIKDAVDKYSSAYVFTYDNMRNQKLKDLREQLKSSSRIFLAGKKVMQIALGRSAADEAKTGLHKLSKFLQGNSGLLFTNLPRDDVERMFREFEEHDFARTGSTAADTVELKEGPLEQFTHEMEPFLRKQGLPVRLNKGVVELVADHVVCEEGKPLSPEAAQILRLLGIQMATFRLYLVCRWSSDEFEAYKEGLMHLGADDSS

SEQ ID NO: 279109 - protein, 82 aa, Zea mays
  unsure (1)..(82): unsure at all Xaa locations
  Clone ID: MRT4577_186125C.1.pep
LRLRFVVLPFFRSGLLAGGWLVSVXLVVGAWGVPFGVSPSPSRXPCVWGSWXLRFLFFGGLFLCLGCPGGRAERPCLCRLPL

SEQ ID NO: 279110 - protein, 231 aa, Zea mays
  Clone ID: MRT4577_186126C.1.pep
MPKSKRNRPVTLSKTKKKPGLERKGKVVAEIKDAVDKYSSAYVFTYDNMRNQKLKDLREQLKSSSRIFLAGKKVMQIALGRSPADEAKTGLHKLSKFLQGNSGLLFTNLPRDDVERMFREFEEHDFARTGSTAIDTVELKEGPLEQFTHEMEPFLRKQGLPVRLNKGVVELVADHVVCEEGKPLSPEAAQTLRLLGIQMATFRLYLVCRWSGDDFEVYKEGLMHLGADESS

SEQ ID NO: 279111 - protein, 150 aa, Zea mays
  Clone ID: MRT4577_186127C.1.pep
DAECQDPDGPVLCINNCGFFGSAVTMNMCSNRHKEMITEQDQAELPASSIDRIVNGRDAVMHPVVVVSNPRVPDARVELLTMNVHEPADVAGPMDEVARISKPGNVGPNRGSACRNRVGLTRFNCRRGNLYCVLHRYFDKDDCKVPLPNC

SEQ ID NO: 279112 - protein, 189 aa, Zea mays
  Clone ID: MRT4577_186128C.1.pep
MAEAEGQLAACWGKQDDEWRKGPWTTQEDKLLLDHVAQHGEGRWNSVSKLTGLKRSGKSCRLRWVNYLRPDLKRGKMTPQEESTIVQLHSLWGNRWSTIARSLPGRTDNEIKNYWRTHYKKGKPSKNIERARARFLMQRREMQQQQQQQQQKLLLGQGKDAELASATAEDDVDEKMTGNVGPAATALAD

SEQ ID NO: 279113 - protein, 57 aa, Zea mays
  Clone ID: MRT4577_186129C.1.pep
LQVYIGNMSYNFVCFAKVTGSRMSSSAAVDEMELDGIDRHRDKERMERHRREEKDHN

SEQ ID NO: 279114 - protein, 130 aa, Zea mays
  Clone ID: MRT4577_18612C.1.pep
ALRQSSRSGAAVSVSGRLASARVAAPSPFAAGAKQVRSYAAEAKASPTEVSSILEQRIRGVQEEAGLAETGRVLSVGDGIARVHGLNNVQAEELVEFASGVKGMTMNLEAGQVGVVLFGSDRLVKEGETV

SEQ ID NO: 279115 - protein, 49 aa, Zea mays
  Clone ID: MRT4577_186130C.1.pep
NTRQFKQTKQKSKLAYRRGGNKKKRYSVPHVFDARLKISGTYQRSSLCH

SEQ ID NO: 279116 - protein, 77 aa, Zea mays
  unsure (1)..(77): unsure at all Xaa locations
  Clone ID: MRT4577_186131C.1.pep
YTVSVGNKISASFAFVPNATNGGLYVGNKXPLRRSLRLXXIGVXLPKEVTKTGAEAHYNSKSTTKKKHGXDVINAGD

SEQ ID NO: 279117 - protein, 70 aa, Zea mays
  Clone ID: MRT4577_186132C.1.pep
PRSWGRQSLPLRSWWGRLPFPPPCWWLLLSQGFHDGVPYGGDEGNPVYIDFGGYDKRWGYCFIDAPVRLQ

SEQ ID NO: 279118 - protein, 54 aa, Zea mays
  unsure (1)..(54): unsure at all Xaa locations
  Clone ID: MRT4577_186133C.1.pep
LFHHLLQVIXIYELGCMLYRNTAVDFNFTIGITYVTDYANVITLILSDIHMSLL

SEQ ID NO: 279119 - protein, 50 aa, Zea mays
  Clone ID: MRT4577_186134C.1.pep
RLCKSMVSWLPANELGGILDLNQKHVKLLLHCKAITRCWHYICKRYAFFG

SEQ ID NO: 279120 - protein, 131 aa, Zea mays
  unsure (1)..(131): unsure at all Xaa locations
  Clone ID: MRT4577_186135C.1.pep
ITTNKQSKRRHHQKREKENKPKGVDKTRRTKGNNRGRRKRGGGGAGSGGGRGRNGGGGEKEAGGGGGGGQEGGGGXGGERSSGVQGGQRAKEVAGGEKXGGTSGRKGKRGGCGNAARGKGDGATKGRKRGR

SEQ ID NO: 279121 - protein, 242 aa, Zea mays
  Clone ID: MRT4577_186136C.1.pep
MRVAATRPASSAPVALLAALALLFLVGSASLAIGAMASHVLGGKSENPAAANSLETDGLARFAVDEHNKRENALLEFVRVVEAKEQTVAGTVHHLTLEALEAGRKKVYEAKVWVKPWLDFKELQEFRHTGDATSFTISDLGAKRGGHEPGWRDVPVHDPVVKDAASHAVKSIQQRSNSLLPYELVEIVRAKAEVVEDFAKFDILMKLKRGTKEEKMKAEVHKNLEGAFVLNQMQPEHDESSS

SEQ ID NO: 279122 - protein, 66 aa, Zea mays
  Clone ID: MRT4577_186137C.1.pep
MSFSSHNHLGYHSRSSLDSMRLMMIFGSGLHIRCLASVSCTSLGFRPTSRDSPHASTDAWMEPGIQ

SEQ ID NO: 279123 - protein, 203 aa, Zea mays
  Clone ID: MRT4577_186138C.1.pep
ELLYKRFTTITKSSKVDLGLGVRKAVVKVEERDQVYQPTEEEIRRWLDPYENVVCIECNQGGDDNLMLLCDICDSSAHTYCVGLGREVPEGNWYCGGCRLGDEGPSYTGIQRTVAYERQNYRSHVGSSVSFGMAVPGGTFERPSSINPRHSFQGIDLNLSPREFPGESHPAESQVSTDSVSTPTGRAGKTISGRRELQRYIQS

SEQ ID NO: 279124 - protein, 135 aa, Zea mays
  unsure (1)..(135): unsure at all Xaa locations
  Clone ID: MRT4577_186139C.1.pep
GSTITHSNRTQAPRRHTRCAQTHQASAPMAYYQEVDYCSEEVRSVAPAGFGRHGGGVQQHVVKEKFEEVDXXRAGAFLHHHHGHHGGHGFVVRETCAAVVFFSCSGVVSVRWVSFLARAVCSSRAVGFLARFAPV

SEQ ID NO: 279125 - protein, 37 aa, Zea mays
  Clone ID: MRT4577_18613C.1.pep
FRKCPMLWCGMVNLKNPYVLNLCKKLCCGQKKKKEDK

SEQ ID NO: 279126 - protein, 135 aa, Zea mays
  unsure (1)..(135): unsure at all Xaa locations
  Clone ID: MRT4577_186140C.1.pep
LTAGNPVESTVVQAAANRLRSTPLFSEQRMAWLQPPKAPRTTAAAAAPPPPPLAPLLPDSRHGEXGRHGSSTSAPVXQPEARPPDAAAVTTSSVCSGNGGRSQLKRSRHLAADCSVSPDEDLDDEPGATRRSAGL

SEQ ID NO: 279127 - protein, 416 aa, Zea mays
  unsure (1)..(416): unsure at all Xaa locations
  Clone ID: MRT4577_186141C.1.pep
ADYSQKRRKKRISESESSSDSEFVVSGKELEELREPEPPKAAPNLHVSLRRICITRHGEGKGKEKQEQEEAGKPICGICLSXRVRPRVREELKATVQGVLNCCSHYFCFACIMEWSRVESRCPLCKQRFTTITKSSKVDLGLGVRRAVIKVEERDQVYQPTEEEIRRWLDPYENVVCIECNQGGDDNLMLLCDICDSSAHTYCVGLGREVPEGNWYCGGCRLGDEGPSYTGIQRTVAYERQNYRSHVDSSSVSFGMAAPGGTFERPSSINPRHSFQGIDLNLSPREFPGESHPAESQVSTDSVSTPTGRAGRTISGRREIQRYIQSLFRPSLPSRPDTYHNIAQNSGGVSRNEPNRWNFPSSSEANTSQNLPDGIQNHHSDLPFVQAHSNFAPFMSLDGDDFQQIEGVKSNLRNMQ

SEQ ID NO: 279128 - protein, 72 aa, Zea mays
  Clone ID: MRT4577_186142C.1.pep
MVCWNSLAGRLVGSAWCAANDRAAHDRGAGDRAAGDRGGDHRGAGNRGAMHRAVMNRAVAAALPPLVCVSGA

SEQ ID NO: 279129 - protein, 32 aa, Zea mays
  Clone ID: MRT4577_186143C.1.pep
NYTNPLNTFLDKFMMMYILDKNSVVTSAAFAY

SEQ ID NO: 279130 - protein, 63 aa, Zea mays
  Clone ID: MRT4577_186144C.1.pep
DTFVHSFAHFSRPTPPATRCATLTATPACRHFQGASCHVHDLQLHQRHTSVLSYQQLNLPHVL

SEQ ID NO: 279131 - protein, 221 aa, Zea mays
  Clone ID: MRT4577_186145C.1.pep
VPETPLHRPTELSPLLNHSPVNESTDHHSQEQGIPTLITWSQGGDEVFLEGSWDNWTSRRALERSGKDHAVLLVLPSGVYHYRIIVDGELRYIPELPHAADERGRVANVLDVHDYVPESLDSVAEFEAPPSPVHSYDLHCPGDEEFAKEPPTLPPQLLVSVLGGDVDSAGHGNQALKPQHVVLDHLFIEKGWGSQSLLALGVTHRFESKYVSFVLYKPLER

SEQ ID NO: 279132 - protein, 283 aa, Zea mays
  Clone ID: MRT4577_186146C.1.pep
MGNANAKEGENGHMAASPEPAAPNGGGGSSSSAGGAAARPPPLSPPDDVMLERPPPVPYLFVPQVPETPLHRPTELSPLLNHSPVNDSTDQHSQEQGIPTLITWSQGGDEVFLEGSWDNWTSRRALERSGKDHAVLLVLPSGVYHYRIIVDGELRYIPELPHAADERGRVANVLDVHDYVPESLDSVAEFEAPPSPVHSYDLHCPGDEEFAKEPPTLPPQLLMSVLAGDVDSAGNQALKPQHVVLDHLFIEKGWGSQSLLALGVTHRFESKYVSFVLYKPLER

SEQ ID NO: 279133 - protein, 69 aa, Zea mays
  Clone ID: MRT4577_186147C.1.pep
MSHDYVPESLGGDVNSAGHGNQALKPQHVVLDHLFIEKGWGSQSLLALGVTHRFESKYVSFVLYKPLER

SEQ ID NO: 279134 - protein, 85 aa, Zea mays
  Clone ID: MRT4577_186148C.1.pep
SIDVRCFASRLIHICNKKPLIKKYNHLFMPCGLLNQFASSRHFSSRANLTNIYKQSISTPRSGPNIELEGLAEARGDLPEEPEGT

SEQ ID NO: 279135 - protein, 61 aa, Zea mays
  Clone ID: MRT4577_186149C.1.pep
LSKDQQDKGYGGFNRRAVKSQGGAPTPPRERKQEGSEGPHPNGGKRKVKELKGELPKPPGT

SEQ ID NO: 279136 - protein, 179 aa, Zea mays
  Clone ID: MRT4577_18614C.1.pep
HASGGIFPADTIPPLFESDKETDERHYQLWRIENGVAEGSTENPKGEAIPLEYNLAGLNAISFEKGCYIGQELIARTHHRGVIRKRLMPMKFVDGNGQELEQAVAPGSEVVDEASGKKVGAVSTALGSRGMGLLRLEEALKPGSALRAGGNRDVRVQAIKPEWWPAEWTQVLQEQRAAA

SEQ ID NO: 279137 - protein, 125 aa, Zea mays
  unsure (1)..(125): unsure at all Xaa locations
  Clone ID: MRT4577_186150C.1.pep
WSFPQNYPNSPPSVRFTSEMWHPNGQLFISENSIYLLHLQLCFLTSCIIFEETPVXPDGRVCISILHPPSEDPNGYELASERWTPVHTLVGTDHSTFNSTQIVHVSFSHHDLSLGHCVCGQRVLF

SEQ ID NO: 279138 - protein, 57 aa, Zea mays
  Clone ID: MRT4577_186151C.1.pep
ARAPPLSTLRPAVLRPAVLHLRFAVLPLPPSPHGPPAPRAKKAKQPTGPNGEKGLNG

SEQ ID NO: 279139 - protein, 413 aa, Zea mays
  unsure (1)..(413): unsure at all Xaa locations
  Clone ID: MRT4577_186152C.1.pep
MATAGKVIKCKAAVAWEAGKPLSIEEVEVAPPQAMEVRVKILYTALCHTDVYFWEAKGQTPVFPRILGHEAGGIVESVGEGVTELVPGDHVLPVFTGECKDCAHCKSEESNLCDLLRINVDRGVMIGDGQSRFTISGKPIFHFVGTSTFSEYTVIHVGCLAKINPSAPLNSARGQTPVFPRILGHEAGGIVESVGEGVTECKECAHCKSEESNMCDLLRINVDRGVMIGDGKSRFTISGQPIFHFVGTSTFSEYTVIHVGCLAKINPEAPLDKVCILSCGISTGLGATLNVAKPAKGSTVAIFGLGAVGLAAMEGARLAGASRIIGVDINPAKYEQAKKFGCTEFVNPKDHDKPVQEVLIELTNGGVDRSVECTGNINAMISAFECVHDGWXXVAVLVGXVPHRDDQFKTHPM

SEQ ID NO: 279140 - protein, 49 aa, Zea mays
  Clone ID: MRT4577_186153C.1.pep
QGSRVLALPYVRRLPSRCRANEADQGFSYECRVFGAPHVCPMNPALCCG

SEQ ID NO: 279141 - protein, 150 aa, Zea mays
  Clone ID: MRT4577_186154C.1.pep
MATAGKVIKCRAAVAWEAGKPLSIEEVEVAPPQAMEVRIKILYTALCHTDVYFWEAKGQTPVFPRILGHEAGGIVESVGEGVTELAPGDHVLPVFTGECKECAHCKSEESNMCDLLRINVDRGVMIGDGKSRFTISGQPIFHFVGTSTFS

SEQ ID NO: 279142 - protein, 45 aa, Zea mays
  Clone ID: MRT4577_186158C.1.pep
MHVCIYRPVSSPRIINLDLCYSMHIQIFFEPSLHMICTWLQDKVQ

SEQ ID NO: 279143 - protein, 113 aa, Zea mays
  Clone ID: MRT4577_186159C.1.pep
QQKPSHCASYLLDRMFSRSSDLRSPCTMSQNPLVVDAALRASCVRRKSPACGQHTREPSLVWPVVRFAIYSSCDYSTLMDPVLLSTSQHVGYSIRYDPVVRIRHDVVWLGDGR

SEQ ID NO: 279144 - protein, 413 aa, Zea mays
  Clone ID: MRT4577_18615C.1.pep
MPPPPPLARRLLLQPLPSGARALHTTPAPRRGPGVLACRLASRAVVRFAGPEAARFLHSLLTNDLLSAFSAAGASSPQRYAPTPNAPARGPAAPAYAALLTPQGRFLYDLFLYRPPPRSQMLDRTGSAPETGEAPEGHPHPQEVLADVDAAEVDDLVACFKRYRLRSKVEIDNVSENFACWQRFGHDVVHTEPSTQEPEAQSIGWGQGVDHAGESAAQGNGHGWQWLKDPRLDYLGYRGIFPADTIPPLVESDKEADERHYQLWRIENGVAEGSTEIPKGEAIPLEYNLAGLNAISFEKGCYIGQELIARTHHRGVIRKRLMPMKFVDGNGQELEQAVAPGSEVVDEASGKKVGAVSTALGSRGMGLLRLEEALKPGSALRAGGNRDVRVQAIRPDWWPAEWTQVLQEQRAAA

SEQ ID NO: 279145 - protein, 64 aa, Zea mays
  Clone ID: MRT4577_186161C.1.pep
ACLQLLLPNCLWWVNRSGYGTLFHILVSNSFHVGPMVLCLLIKALFFWIRFIITCLSRSMHAPP

SEQ ID NO: 279146 - protein, 82 aa, Zea mays
  Clone ID: MRT4577_186162C.1.pep
PLFMLSSRPFKLVDFIRTYTVISVDIELSQPTDTNPLNGLHNSTASMRGLSSPGPHHHHYHHHLDDHRPPRRPHLLSHLQIH

SEQ ID NO: 279147 - protein, 44 aa, Zea mays
  Clone ID: MRT4577_186163C.1.pep
HKSPLEMVPRLEGGVGKGYIGGLVNQIIKVVLHPQCPIVVNIGC

SEQ ID NO: 279148 - protein, 48 aa, Zea mays
  Clone ID: MRT4577_186164C.1.pep
LYDCIVLAPSAFIRNTLRPRKRSPVLVSSILVHIASKAHGLFSVMGQR

SEQ ID NO: 279149 - protein, 54 aa, Zea mays
  Clone ID: MRT4577_186165C.1.pep
PSSIRSIEEVHRLIEGCAHRHLTPSSAAQNYNLDNTRLVFVRGCPLDDHPCPST

SEQ ID NO: 279150 - protein, 78 aa, Zea mays
  unsure (1)..(78): unsure at all Xaa locations
  Clone ID: MRT4577_186166C.1.pep
QAAAAPXLAFXVGALLLRLAAGFIADYRLRIGVVAAGPTATLAAFGCVGAVLGRAPVARSCARVVGGGWVAMAVTSAS

SEQ ID NO: 279151 - protein, 73 aa, Zea mays
  unsure (1)..(73): unsure at all Xaa locations
  Clone ID: MRT4577_186167C.1.pep
VILNLYXKKMAGHTTYARGIILXIXXIFPFLLLPQSYNLSYISKYNQFYPTLLYTLNLFLYTLIIFHGFSLQF

SEQ ID NO: 279152 - protein, 152 aa, Zea mays
  Clone ID: MRT4577_186168C.1.pep
VSSEFGSSAPRHWMLSKLGGVWAPRPSTGPHKLRECLPLSLILRNRLRYALTRREVLQIVMRKSVQVDGNVRTDLNYPAGFQDVITIPKTSEQFRLLYDVKGRFVLHRITPEEASYKLCRVMKFDTNKKALIGHNPFQTGQMSAIPYRGTHD

SEQ ID NO: 279153 - protein, 98 aa, Zea mays
  Clone ID: MRT4577_186169C.1.pep
GRSGAHVYMAECPVTEEAGGALCWCVKAGGLWSPLTVCRYQGRCHSLHRIRCRLPSTFMVSVGGPQVHVKVLKEDVVWFANEQDVSKDQEKGSSAEQE

SEQ ID NO: 279154 - protein, 79 aa, Zea mays
  Clone ID: MRT4577_18616C.1.pep
RPGQFYPKPQIGAPAEKKKPPRGGGTQIFYPTTQKGHSWKPRKKQVKKKGKSPQFWRGGNPQPQNVLKIQKAPPPRGEP

SEQ ID NO: 279155 - protein, 81 aa, Zea mays
  Clone ID: MRT4577_186170C.1.pep
WSSSSICQRRAADVADLSSGRHGPLLSIPNPPRRASARAAPRSCRIPPDHVFARQPPSRPHVSDPPALAIVVRTSASIARA

SEQ ID NO: 279156 - protein, 96 aa, Zea mays
  Clone ID: MRT4577_186171C.1.pep
LGTSRPAGGDPYLKQRLRLRESYITTLNVCQAYTLKRIRDPSFQVSPQPPLSKEFTDESQPAELVQLNEQSEYAPGLEDTLILTMKGIAAGMQNTG

SEQ ID NO: 279157 - protein, 76 aa, Zea mays
  Clone ID: MRT4577_186172C.1.pep
VEEDLRHAFRVFDADGSGAISAAELARVLRSLGEPASVAQCRRMIEGVDQNGDGLISFDEFKVMMARGGGCFAKIA

SEQ ID NO: 279158 - protein, 96 aa, Zea mays
  Clone ID: MRT4577_186173C.1.pep
AYVIGFVAEASSKGRSELDCSGIKTRRHRRCSGATDTALEPPILTVQTKRGPHLSARNGSTRSGSPIAALQTPLHQKGDGAADLTSSGIRARAGEA

SEQ ID NO: 279159 - protein, 167 aa, Zea mays
  Clone ID: MRT4577_186174C.1.pep
MKSLFKSKIRWQHRSNDPASPAAPPPQTSGPPPASSPSGTAPAPALSVSTPVSPSPSSAAATPTGAAAAAAAAGAGGEDYISSEEEFQMQLAMALSASSNSDCAGGLDGEQIRKAKLMSLDRFAAHRDETHTAEFLSRRYWDYNFLDYHEKVIDGFYDIFGSSIESS

SEQ ID NO: 279160 - protein, 125 aa, Zea mays
  unsure (1)..(125): unsure at all Xaa locations
  Clone ID: MRT4577_186175C.1.pep
PREHMCLVSFKYVYLKQPFYYSSLFLVWVIICRGVCLCAPIYRSFIPYYVFRSSLPPPFSSPLLTIYNFFTTLGFPKAIVRFRNAHPFSSHHVSFHFLLFSAIHYTTLLLTRVRYSHIPLXSSSR

SEQ ID NO: 279161 - protein, 115 aa, Zea mays
  Clone ID: MRT4577_186176C.1.pep
PKGRFPKEPKNFLKIPSFKHWGLGNKKIVAFHPIAKDLVVVLFFSKAKKQKAPAKFTPKFFLAKGFPKMAKAVKNPVSGNYYRPYFSKPALFRLSSGAPTLQVSKSGVKKKNSQS

SEQ ID NO: 279162 - protein, 88 aa, Zea mays
  Clone ID: MRT4577_186177C.1.pep
VSPPLTGPREKWFVMGKHAPPFCKNLFMCRVNNCPATPSCTGEFSLRTCFKRGNLGLWQPKFGWSPVISKWGQERPPTIWTPGWGSFS

SEQ ID NO: 279163 - protein, 94 aa, Zea mays
  Clone ID: MRT4577_186178C.1.pep
QLGDMILSVPFLTRGLENCRLWASFFTVWSHGSNIYVRFERTKQPKSSIGNSSRRFESTNLSTIIYVHIRGGLGSPNPTTNPRQCYRIKGCKSN

SEQ ID NO: 279164 - protein, 106 aa, Zea mays
  Clone ID: MRT4577_186179C.1.pep
FSCDPLKRTCSPRARDPQKQRTGAKWRSLSPSSIPMLPHDIQSNPPGYDPLGDTFPPTLQEELEWNTMIRHWEQDPSHSASETCLRHQVLCLQEPAGLRTPHMVPI

SEQ ID NO: 279165 - protein, 70 aa, Zea mays
  unsure (1)..(70): unsure at all Xaa locations
  Clone ID: MRT4577_18617C.1.pep
XSRNLKQKKXWILIXDAPGNVFNVXSLVFKPFLSFFFFRLXNDPNSLNWLYSHHGCRITGKYTHHPARLT

SEQ ID NO: 279166 - protein, 84 aa, Zea mays
  Clone ID: MRT4577_186180C.1.pep
VSWYICKRYICDHFYLMFTALSSVRYFGVPLTNGGCGMRKPNSMALLVPTGHWGWHRTFITRVPSTLVASITIVLCGFFPAFFV

SEQ ID NO: 279167 - protein, 213 aa, Zea mays
  unsure (1)..(213): unsure at all Xaa locations
  Clone ID: MRT4577_186181C.1.pep
MLAKGRKVAGRREEMSANYAFGPQDDDAIIKHRLLTRTTTTRGEPPLKKLQKKFMSFATEIEKDADNISDCERLYKAFLHEINTFELPLLKSKAVVDANIREKESFNELQVEIERQILHAKTDIEDLKKQLEQSKIERQHKEECEAIRKLISLQPPRSETEKLIAEXLEKEITDLKAENVACIRTLEXLKKKQFALXLLHXVVEELQLDLKMS

SEQ ID NO: 279168 - protein, 90 aa, Zea mays
  Clone ID: MRT4577_186182C.1.pep
MAGPAKASWMVAMSVGAVEALKDQAGLCRWNYALKSIHRAAKAKANVRAGGSQSTKQLPASTAALVERRRAEKAEEALRTVMYLSCWGPN

SEQ ID NO: 279169 - protein, 187 aa, Zea mays
  Clone ID: MRT4577_186183C.1.pep
VNYKLRDWLFARQRYWGEPFPVSYLDDTNEMVPLTEDDLPLTLPELDDFTPTGTGEPPLTKATNWVRTIDSSSGKPARRETSTMPQWAGSCWYYLRFMDPKNCSILVDKAKERYWGPVDIYVGGAEHSVLHLLYARFWHKVLYDMGVVSTKEPFKCLINQGLILGEIEYTAYRDNEGRWVSADSDSS

SEQ ID NO: 279170 - protein, 321 aa, Zea mays
  Clone ID: MRT4577_186184C.1.pep
MPICFYPCGPPCPSPDFPACALSLSLSLSLRRRRAWATCAAAPSPGLHRTLRQVLFRPIAGTEQLLHSFDFSYRIPHRGMLAKGRKVAGRREEMSANYAFGPQDDDAIIKHRLLTRTTTTRGEPPLKKLQKKFMSFATEIEKDADNISDCERLYKAFLHEINTFELPLLKSKAVVDANIREKESFNELQVEIERQILHAKTDIEDLKKQLEQSKIERQHKEECEAIRKLISLQPPRSETEKLIADLEKEITDLKAENVACIRTLELRKKQFALLLHVVEELQISIEDEQKSIADELRAIAGEQKMSMEEGSVGASDSMVVD

SEQ ID NO: 279171 - protein, 326 aa, Zea mays
  Clone ID: MRT4577_186185C.1.pep
MASTLLHAATASLQSSSQPARAGAATAFHPLASTPSIRLARSSFSSNRRLEVSLRAVSAGHRFAGRGAPRGRRVVAALAGEQTEGSEVGDDKDNSNGEIKPEEAQEAWKVMLEQFKAEALRMQALSMQAYDVYSKRAREVLLEASEKLKIQADKAQKDLSVIATEVSQEGQEYLVMAARNSPDSIKDITTTFRALGRLNWPSEYEDYHVGIPFGTFLTVGGFLNFMLTGSTSALRFGIVLGLALLTLGISSLRSHREGDRRPRLLVKGQAAIALVIFFREFSVLLQNGWFPKIFIVLLSGVVAAFYFYRIATGNPKDLSSKNDSAN

SEQ ID NO: 279172 - protein, 324 aa, Zea mays
  Clone ID: MRT4577_186186C.1.pep
MAASLLHASAAAASLLSSTQHARAGAAAFHPLACAPSLRLTRSSFSTNRHLEISLRAISASRRFAGRGAPRDRRVVAALAGEQTEGSEVGDDRNGEIKPEEAQEIWKVMLEQFKAEALRMQALSMQAYDVYSERTREVLLEASEKLKIQADKAQKDLSVVATEIGQEGQEYLMMAARNSPDSIKDITTTFRALGKLNWPSEYEDYHVGIPFGTFLTVGGFLNFMLTGSTSALRFGIVLGLALLTLGISSLRSHREGDRRPRLLVKGQAAIALVIFFREFSVLLQNGWFPKIFIVLLSGVVAAFYFYRIATGNPKDLSSKNDSAN

SEQ ID NO: 279173 - protein, 202 aa, Zea mays
  Clone ID: MRT4577_186187C.1.pep
MAASLLHASAAAASLLSSTQHARAGAAAFHPLACAPSLRLTRSSFSTNRHLEISLRAISASRRFAGRGAPRDRRVVAALAGEQTEGSEVGDDRNGEIKPEEAQEIWKVMLEQFKAEALRMQALSMQAYDVYSERTREVLLEASEKLKIQADKAQKDLSVVATEIGQEGQEYLMMAARNSPRLDQGYHNNVQGSWKIELAIRV

SEQ ID NO: 279174 - protein, 174 aa, Zea mays
  Clone ID: MRT4577_186188C.1.pep
MVILSEGCSDQPNIDETGSHRSKTSDFSRPASPTTQALMCDEQDATFGNEPASPTTQALMCEEQNTTFGNDYRSSFPLVSCDQDISEINAAQENLVLTGLREYLRVIITRGKINEHKSSLEAAMELDAQQHHGAPPALSATEDEEKSPPSSTIETPRTNQQPTPNGGSKDSIGS

SEQ ID NO: 279175 - protein, 188 aa, Zea mays
  Clone ID: MRT4577_186189C.1.pep
MAAPRSLADRALRGVADLIKLLPSGTVFLFQFLSPLATNNGHCATLNKALSGALVALCGASCAFSCFTDSYVGADGRVYYGVVTRRGLRTFTPDPDAAARDLSAYRLRAGDFAHAALSLLVFATLALLDADTVACLYPALELAEPTMMAVLPPVVGAVAGYVFMVFPNNRHGVGYQPTPATEDFQHKY

SEQ ID NO: 279176 - protein, 88 aa, Zea mays
  unsure (1)..(88): unsure at all Xaa locations
  Clone ID: MRT4577_18618C.1.pep
VVXLILSXLILXFLPFLHTSEQRSXTFRXXTQXXXXNLVANXXVLXXVGGQPVEHPXXIXGQXASISYXSXILILIPISGIVEDKMLK

SEQ ID NO: 279177 - protein, 127 aa, Zea mays
  Clone ID: MRT4577_186190C.1.pep
VPSSPQSRRRHRAAEKSGPKCKTWWKTRRSRPNPSWAEHCPRCLRSCPCPPRLQGCLLIQRPLMFSWDITCNDGRSLSVYNNPFAGPLPCTLLLPWVTVFQEKALTVNAMRICQDTTILVNKIIAYP

SEQ ID NO: 279178 - protein, 152 aa, Zea mays
  unsure (1)..(152): unsure at all Xaa locations
  Clone ID: MRT4577_186191C.1.pep
MSIGLEEIVVPLGLIYGSDFENPDLNLEVHFIDMLVMVVTVGLESTLVGEDLNDCAFVYGFLSFLDKISCVIVLFVLELYEEGWQLIGRVQHILVLLQTRMRCSEMSGXTVSRYEMGLISSYFTVLSLVVTSILRLXVTTPKAIAMEAPLLV

SEQ ID NO: 279179 - protein, 92 aa, Zea mays
  unsure (1)..(92): unsure at all Xaa locations
  Clone ID: MRT4577_186192C.1.pep
MSHFGRFGPPPIHDTYSLLVLNITFHESPSSPLSFSSPATLWALNWCLCLIWVAHRXTIADDLFPLSDKYNEIVDIYIPRDHRPQASASGTG

SEQ ID NO: 279180 - protein, 83 aa, Zea mays
  unsure (1)..(83): unsure at all Xaa locations
  Clone ID: MRT4577_186193C.1.pep
FRVLPVFXWAPLCGPLRSARXSXFFPFXSASPXVLXLLXVAXXPPPLXARXRXGXRXXGWXWVGXRRAVLRXAXXXACLSRLS

SEQ ID NO: 279181 - protein, 144 aa, Zea mays
  unsure (1)..(144): unsure at all Xaa locations
  Clone ID: MRT4577_186194C.1.pep
XXFFFFLVFFFCFLGKEKHQTGDGFQVQHSKGFFWFKKLTGGNAFSFFLMVATVGAGFFFVSAHKFQGFFFFWIRMARFAIPGLLFRDLFLGWFATWGPLAILNPFCGGFFRISRTFLPLVGFFHNSTPQIRRFDPQAPLGHFF

SEQ ID NO: 279182 - protein, 133 aa, Zea mays
  unsure (1)..(133): unsure at all Xaa locations
  Clone ID: MRT4577_186195C.1.pep
APSAIIPQLLPPVTSMGWVHLALCGWWRAALCDFGSGFFLAATTQKGRGGGGFFSXRPLRSASGGRGSASRVWXCLWVAGFAAFCWLGGFYCCCVRSGARFAASRWLTGCGFCCCVSSPGFTAALWVFGRCCC

SEQ ID NO: 279183 - protein, 283 aa, Zea mays
  Clone ID: MRT4577_186196C.1.pep
FFYVKGHGICEMLMREVTDVSHKFFQLPYEEKMKIKMTRQSGYRGYQKLGENVTKEKRDMHEAVNCLTPIAPGKYGDLGKTLEGDNLWPEYPSNLKVVLENYISLVKDLSRKIMRGIALALGGPADAFERGIAGDPYWALRLVSYPVSSSDEKRTDDTGMMGSHTDYGLVTLVNQDDDICALEVQNRSGVWIRANPIPETFLCNIGDMLQVWSNGIYQPTVHRVINSSHQRRVSAVFFYETDFDAAVEPVELCVEKTGGVAKYDKVVYGERLVRKAFCCFGHL

SEQ ID NO: 279184 - protein, 241 aa, Zea mays
  Clone ID: MRT4577_186197C.1.pep
MADQAKLSRHNPYTNHVFHRVIISALVLLLSCTAATSDRQPPLISQLAKDPETSLYTISVKADKSPLLLDLAGSLVWSTCPPSSAHSTVPCESDTCAVAKQQSSHRCRYVDGGRFWENREPGPSWCACAARPLNPVTGQCSTGDLTSLTMKANTTNGTMELRPEESFAVVGACAPGRLLGSLPAGAAGVAGLSRRSLSLPSQLVAQRGFGRKFSLCLPAFATFGDTPVYLPTPERGFIDYT

SEQ ID NO: 279185 - protein, 71 aa, Zea mays
  Clone ID: MRT4577_186198C.1.pep
LPLDRLFKEIEGHFQNIFLCQDHCGLPLQPFAEACLVALFGHTNLCPIHAKSVPNMPQYIHQARRIPGERA

SEQ ID NO: 279186 - protein, 88 aa, Zea mays
  Clone ID: MRT4577_186199C.1.pep
KQGSVNLAGAVFLNKNPQVAPFDFSTSCRCCLNGIAVGQIKHRRGYHVDMTSGGFFCNSSGIWVLTSLSRLVHKKLGLANPVRILGPK

SEQ ID NO: 279187 - protein, 199 aa, Zea mays
  unsure (1)..(199): unsure at all Xaa locations
  Clone ID: MRT4577_18619C.1.pep
MAAKIFVRCCMLLGALLHVAAYXATMFXPQWARXXPIACPFFAPVPLSPAVSWGXGNPXLQPYRIQQAXTAGILPXSPLFLQQSSALFLQLPLVHLLAHNIRAQQLFFLVXAXLAAYSQQQLFLPFGQLAALGSASYLRPRRLPFSPLPAACPQRFLRFAQLAALHSPAFLRRXPLLPFSQLAGVSPATFLVPPQLLAF

SEQ ID NO: 279188 - protein, 58 aa, Zea mays
  Clone ID: MRT4577_1861C.1.pep
KCLLDEQKKKKKKKKKKKKKKKKKKNKKKKGKKKTQKKKKKKKKKKKKKKKKKKGGPF

SEQ ID NO: 279189 - protein, 154 aa, Zea mays
  Clone ID: MRT4577_186200C.1.pep
PPRPPARPRTRRPGRARAATRRPCGKAAPAARQLIDRAVRAWRRKYPTSMVDDCAVVCLYLNRRASPAPVESSSGLLPVPDDVRPAAPFTGSSFRRALTSNGQAVSEEGTTAVWRALEGVARANSVIRLPRVGRVLSWRRRSTSLDEDDGGERD

SEQ ID NO: 279190 - protein, 112 aa, Zea mays
  Clone ID: MRT4577_186201C.1.pep
IPFNNSANFLAVSVQSPKGGKKKERFGAAKLVKDNRSAHNNAGWCPAKFFPITNPALHGLQFPRRFPKPFIILLFVHLLLGSGQSLIKHTHSPAAMLACYNRARGRLCLCSQ

SEQ ID NO: 279191 - protein, 77 aa, Zea mays
  Clone ID: MRT4577_186202C.1.pep
SLKAQNQTHRGRLKTLIKPSLPPLKPPLPLMDKNQEGTFLSPQSIKNASPELVSSLGLSTWTTLPYGPLTGRVWSAP

SEQ ID NO: 279192 - protein, 371 aa, Zea mays
  Clone ID: MRT4577_186203C.1.pep
MYVCMYVCMYVYAVKKKKKKKKKKKKKKKKKKHIGYLEAGRGLGGTGADAAARDICERERREGPRAEDECSLAGVMLLRSASSPLLNCGRAPAAAASVEHLAVVSPLLSPAVAAPRQGPVLCRAMSEGDLAAPLVPKKDDGHGRAPRLSASLSSSASIFVEEEDGEGEEEEEDLVAVAGAGVDVPLPLRRLLTNTGLDVSAAAALAFVEQGVGGSGGGGKACGSSGGKGGVGDGDGGSNRAATDAHYRQMIEADPGNSLLLVNYARFLKEVAGDAARAQEYCERAILASPGDAEALSLYAGLVWETSRDAGRAEDYYSRAVQAAPDDCYVLGSYAGFLWDAEEDEEENSEPLPPPSLFQGAAQRPSITAAS

SEQ ID NO: 279193 - protein, 64 aa, Zea mays
  Clone ID: MRT4577_186204C.1.pep
PTHPRTQQHRLPLLLSLPRLVINHMLSVLFMQATSTNHTYLISSSSLHSQMLQQLQDSDLYSKV

SEQ ID NO: 279194 - protein, 243 aa, Zea mays
  unsure (1)..(243): unsure at all Xaa locations
  Clone ID: MRT4577_186205C.1.pep
RHAGRARSPEVGDARSPLHATGDNEILGINEEHISPGPTANPSHLRFSKLLQSNRRIPALGGVAFDVSHLPDRLMEIQNXQALVADHFFTESLDXLKRWIGHANVATCLILHDGTGTLTLEXVTLIYTHLIGTCCTRSAKXHDTGKTLSTHVIGTLKMLELEKRVGSSNWLTSTXDGYGDALEHTQTEAYXGNVTPVESGTCYDEGKRAAETLMLDYLRQHGIEIRIAWSFHAYGPMMNIDDG

SEQ ID NO: 279195 - protein, 414 aa, Zea mays
  Clone ID: MRT4577_186206C.1.pep
MATSNGSGVAQGEEGKTPPPAGSIGGYESLHRLLEANLSPDLFQEASRLLLGLNCARPLEAISLPDATTTLAETHSFDLQAFRFSADKEFLRQSRVVRVGLIQNSIAVPTTCHFADQKKAIMDKIKPLIDAAGASGVNIMCLQEAWTMPFAFCTREKRWCEFAEPVDGESTQFLQELAQKYNMVIVSPILERDINHGETIWNTAVVIGNNGNIIGIHRKNHIPRVGDFNESTYYMEGNTGHPVFETAYGKIGVNICYGRHHPLNWLAFGLNGAEIVFNPSATVGELSEPMWPIEARNAAIANSYFVGSINRVGTEVFPNPFTSGDGKPQHADFGHFYGSSHFSAPDASCTPSLSRYRDGLIISDMDLNLCRQIKDKWAFRMTARYEMYASLLSEYLKPDFKPQVIVDPLINKKA

SEQ ID NO: 279196 - protein, 66 aa, Zea mays
  Clone ID: MRT4577_186207C.1.pep
ESCLHMEFLRTEDISYTIEIINGNNYMDSQVAAVAARREKRDVGREKESWGVKEKENQVAEGIVRL

SEQ ID NO: 279197 - protein, 54 aa, Zea mays
  Clone ID: MRT4577_186208C.1.pep
VSVRKMRAHRNTLKRKNTRVTHTHKRGESAGALNNGQKNAALTRKRHSQRVCKT

SEQ ID NO: 279198 - protein, 58 aa, Zea mays
  unsure (1)..(58): unsure at all Xaa locations
  Clone ID: MRT4577_186209C.1.pep
LTPISIEQAITASNIHLSHLFKQWLAICXVMXLVQTIKAQQLQRLWLPEINQVRCANL

SEQ ID NO: 279199 - protein, 173 aa, Zea mays
  unsure (1)..(173): unsure at all Xaa locations
  Clone ID: MRT4577_18620C.1.pep
MSARPSMSAVGHAAHTDSHMRPHTIHLDMVMYCNDCSGPFIINNPSGYQIILIGDFIRSXKKKGFYLRAMKMMNVYRPFHQQHYAYLTDTPFLPSVGEYIISGLVKPMVYQAKDVWMTXGRYIIVANKPXEAHPSTIRTDYHAECGMKLIHGSDFKQNGKKEIALWLPVRLAQ

SEQ ID NO: 279200 - protein, 74 aa, Zea mays
  unsure (1)..(74): unsure at all Xaa locations
  Clone ID: MRT4577_186210C.1.pep
MGGRRTIVLSLILGLLAAANAVPFDFFYLILMWPGAYCEDSDNGCCVXPSTWLNPAGVSSRVLSQNLFEPWSHF

SEQ ID NO: 279201 - protein, 74 aa, Zea mays
  unsure (1)..(74): unsure at all Xaa locations
  Clone ID: MRT4577_186211C.1.pep
EVQACGSVVTEKHLHAMLIPMEYFFMGYGLFRPSQINCSPGSPLNPFCISPKLLFLXSMGVKFKPIKTRATFKA

SEQ ID NO: 279202 - protein, 90 aa, Zea mays
  Clone ID: MRT4577_186212C.1.pep
GFFLSLELFSTIFFPKFFFFPPGLVLLGLFGRSLGGWIFRVGGVFPVGKCTPLSPPVFCPLSPFPPFVFFFCFGPCWVFRPPRPKGSLGF

SEQ ID NO: 279203 - protein, 37 aa, Zea mays
  Clone ID: MRT4577_186213C.1.pep
QTRKRVLINAFTVRALRDTFPPARAAGIMALSVTGSY

SEQ ID NO: 279204 - protein, 129 aa, Zea mays
  unsure (1)..(129): unsure at all Xaa locations
  Clone ID: MRT4577_186214C.1.pep
IMLLGPFASVASETGLPQCCTGSVXTLLXPPYLCTXMCSMCGNPXXQPTTWILTGHVRKGIITMXPLXLQQSHDLFQXIPLVHFVAHNIKTQQLLQLVLANLAAYSQQHHGFTFNQLAELNSGAFLPLP

SEQ ID NO: 279205 - protein, 268 aa, Zea mays
  Clone ID: MRT4577_186215C.1.pep
MTTPGSCPATTAATHPPMCAASAAGGSQKMVRPRLVLFGDSITEQSFRPGGWGAALADTYSRKADVVVRGYGGYNTRWALFLVHHIFPLDGLAPPLATTIFFGANDAALLGRTGERQHVPVSEYKNNLKMIVNHLKDCSNSMVIVLITPPPIDEEGRERFARSLYGQNARKLPERTNEMAGVYAGYCVELAREMCIPCVNIWSKMQETEGWQKLYLSDGLHLTQEGNAVVHKEVVEALRNAGFKAEQMPYDFPHHSKIDGSCPEKAFQ

SEQ ID NO: 279206 - protein, 72 aa, Zea mays
  Clone ID: MRT4577_186216C.1.pep
DPVAMPNGVCCSIGPLVGVDAVDLLDSTRAFFFPGFFLPASLSVKYYLAEPRRVLLMFFLAIVVFVPPSAFP

SEQ ID NO: 279207 - protein, 90 aa, Zea mays
  Clone ID: MRT4577_186217C.1.pep
TPHGGHRSTFKPALGYYEGVARGCLRGNVEDEGVHIRTHKTRPYTIPQRVLENLLARTQELGICPSDLHYLRETRIGHFEDNDQTEMCHE

SEQ ID NO: 279208 - protein, 131 aa, Zea mays
  Clone ID: MRT4577_186218C.1.pep
MASVNPAVAEAEAEAVGRRDELSESLAELFTNVSLMVRGELQGTNNQLALLEKMNDRVSQEYSNYGDIAAGLRVFVEQLNEKNRGFEDYVSQIDAIDQQVTEFEAVVSMLDKHVALLEKKVKSAYHISTTQ

SEQ ID NO: 279209 - protein, 64 aa, Zea mays
  unsure (1)..(64): unsure at all Xaa locations
  Clone ID: MRT4577_186219C.1.pep
RFLPKGSGGFSPKGSAVLGRCQXLRRCEFFPFVQRGVGHCFATFMLCFFMDRLWVVSCVVVLAC

SEQ ID NO: 279210 - protein, 51 aa, Zea mays
  unsure (1)..(51): unsure at all Xaa locations
  Clone ID: MRT4577_18621C.1.pep
LPYGNASNSNSKLTSTDXWGXVLWIFSIHNLLILHTLTFLFLLLSIGFSLF

SEQ ID NO: 279211 - protein, 45 aa, Zea mays
  Clone ID: MRT4577_186220C.1.pep
SYGVLMGMNRPMVMGIGLNEQQTTMAMNHHPMGHGMIDEPTTDVK

SEQ ID NO: 279212 - protein, 225 aa, Zea mays
  Clone ID: MRT4577_186221C.1.pep
MATMALRAVATALLVAAASVCGASASTLVLYNRCGETVWPGIQPSAGKEVLARGGLQLAPGRSASVRLPAGWSGRVWGRQGCSFDAPATLAEITLGTAPSQDFYDVSLVDGYNIPIAMTPVHGSGARCAAAGCVSDLNRVCPAGLAVRGEGRVVGCRSACAAYGAPQYCCTGQFGSPQQCKPTAYSRLFKSACPKAYSYAYDDPTSILTCSAGASYVVTFCPHRR

SEQ ID NO: 279213 - protein, 249 aa, Zea mays
  Clone ID: MRT4577_186222C.1.pep
MATMALRAVATALLVVAASVCGASASTLVLYNRCGETVWPGIQPSAGKEVLARGGLQLAPGRSASVRLPAGWSGRVWGRQGCSFDAAGRGRCATGDCGGALYCGGAGGAPPATLAEITLGTASSQDFYDVSLVDGYNIPIAMTPVHGSGARCAAAGCVSDLNRVCPAGLAVRGEGRVVGCRSACAAYGAPQYCCTGQFGSPQQCKPTAYSRLFKSACPKAYSYAYDDPTSILTCSAGASYVVTFCPHRR

SEQ ID NO: 279214 - protein, 597 aa, Zea mays
  Clone ID: MRT4577_186223C.1.pep
PISQYTMLTASPSSQVKPQQWGTCGVSVASTPALLPPPAAGRLVAVETRRRTRTVASAALGPVATEPAERSPVPQPPPLSSDEETVLRLGNYVPVFVMLPLEVVTTENDLEDAGKLRAQLRRLRGAGVDGVMVDVWWGAVEGAGPALYEWRAYRDLFRVVQGEGLKLQAIMSFHACGGNVGDDAVSIPLPRWVREVGEADPDVFYTSSSGARNQEYLSIGVDDEPLFHGRTAIQLYADFMKSFRENMADFLDSGLIVDIEVGLGPAGELRYPSYPETQGWVFPGIGQFQCYDKYLEADFKAAAAEAGHPDWELPDDAGEINDTPEDTGFFTAERGTYLTEQGRFFLTWYSRKLIQHGDRVLDEANKAFLGCKVKLAAKVSGIHWWYRHPSHAAELTSGYYNLGGRDGYAPIARMLARHDGAVLNFTCAEMRNSEQAEEALSAPEQLVQQVLSAGWREGVEVACENALSRYDRRGYNQMLLNARPNGVGLSGAARRRVAAVTFLRLSDELLASNNFRIFRTFVRKMHADLDYCPDADRYGRPLKPLERSAPEMPMERLLEATAPAPAFPFDPETDMSVGGGLAEAVDWVLDKIAWLFG

SEQ ID NO: 279215 - protein, 95 aa, Zea mays
  Clone ID: MRT4577_186224C.1.pep
DRGVREVSLRAIDALCLSPPKSTGRLLAAGFLECVLSLLRNGDNTLLQHCALKAAHRLCQVSEEVKKAMGDAGFMPELVSVLGASSKSPDARDMA

SEQ ID NO: 279216 - protein, 140 aa, Zea mays
  Clone ID: MRT4577_186225C.1.pep
SERLVLPVKVSGIHWWNRHPSHAAELTSGYYNLGDRHGYAPIARMLARHDGAVLNFTCAEMRNSEQAKEALSAPEQLVHHVLSAGWREGIEVACKNALSRYDRRGYNQMLLNARPNGVGLPGTARRRASPVTCYRRTDER

SEQ ID NO: 279217 - protein, 43 aa, Zea mays
  Clone ID: MRT4577_186226C.1.pep
LASTSFHTSRNASFNRRLARLPGPLPFFEEYMHSQFVNFLAYI

SEQ ID NO: 279218 - protein, 194 aa, Zea mays
  unsure (1)..(194): unsure at all Xaa locations
  Clone ID: MRT4577_186227C.1.pep
MLTGSPTSSGXKPQQWGTCGVSVASTPALLPPPAAGRLVAVETRRRTRTVASAALGPVATEPAERSPVPQPPPLSSDEETVLRLGNYVPVFVMLPXLKLNVPPETRLQKIDQVASLSNVHDEHDVXLEVVTTENDLEDAGXLREQLRRLRGAXGVDGVKVDVWWGAGEGAGPALYEWRAYREXLFRVGQGEGLK

SEQ ID NO: 279219 - protein, 66 aa, Zea mays
  Clone ID: MRT4577_186228C.1.pep
RPSERWRVPVGFVCPVSSSWVLSRFCAAVAGCEWPISVVVCKPPVHQKKKKKKKKKKKKKKKKKTE

SEQ ID NO: 279220 - protein, 37 aa, Zea mays
  Clone ID: MRT4577_186229C.1.pep
GGIVHGFTLCNTVMPVLIRSILVCSHRQYAGHRMSHN

SEQ ID NO: 279221 - protein, 183 aa, Zea mays
  unsure (1)..(183): unsure at all Xaa locations
  Clone ID: MRT4577_18622C.1.pep
MTPASQAAPPRARRSVVAELEGALLRSADTLPYFMLVAFEASGLPRFALLLALCPLLRLLELAGRGGLALRAAAFVAXAPVTRAELEAVSRAVLPKFMADDVDPAAWAAFGSCEGRRVVVTRMPRVMVERFAKEHLGAHXVVGSDLEYSRLRRSTGLLKGACHEGRRQPCPRAGRRRRPCGPR

SEQ ID NO: 279222 - protein, 35 aa, Zea mays
  unsure (1)..(35): unsure at all Xaa locations
  Clone ID: MRT4577_186230C.1.pep
PTPPAAAPPPSXXPPPAPAPSPCIEELINTHTHTQ

SEQ ID NO: 279223 - protein, 83 aa, Zea mays
  unsure (1)..(83): unsure at all Xaa locations
  Clone ID: MRT4577_186231C.1.pep
GVPLKLVKRLANTYQCFFGIXAIEKQGPRLRGPGLNKAGKLRTHXTHQESLECKVNETNATVKFQLKKVLCMGVGASTFFLLG

SEQ ID NO: 279224 - protein, 113 aa, Zea mays
  Clone ID: MRT4577_186232C.1.pep
GGGFFALVLGPGHVREGVPWAPFSIWMTWYCSTSSFRMRLPLLMGGPGIRPPTLLMACQGRVLKEKPAHAPFQCRRLSPCSAITQANHPRGPIRQLSLLKHVLTMLKKNMLLV

SEQ ID NO: 279225 - protein, 63 aa, Zea mays
  Clone ID: MRT4577_186233C.1.pep
RTSIGSGIRGLAQVPGVFHSVKNLSSRWVGNMFVHVLPSRFRQAVSRYSGIPCFLAQSCPVPW

SEQ ID NO: 279226 - protein, 278 aa, Zea mays
  Clone ID: MRT4577_186234C.1.pep
GTLGFAGDFRRSFFGESTAVLRFPGGVGPSVTFDVDAPLRERVFHFSADAIRELKAIANRRPSGGQDAEVYGKMAQDPKNPQVRGEISSFQSLCAQIWLSVTRARKRLAPDATTTFRMAVNCRHRLQPAISPVYFGNAIQSAATMATVSELARSDLRWAAGKLNATLAAYGDGTIRRAAAAWQAAPRCFPLGNPDGSVITMGSSNRFPMYVGNDFGWGRPLAVRSGRANKFDGKMSAFPGRAGDGSVDIEVCLPPETMAALLHDAEFMHYVSCPSHLL

SEQ ID NO: 279227 - protein, 82 aa, Zea mays
  Clone ID: MRT4577_186235C.1.pep
LAGPLLRVAITASHDHQWALHEVQTPTEQAPEEAPVQETPPPAVVPEESAHAEAEAEAEAEADAPADPVELAEDDQHAGDEP

SEQ ID NO: 279228 - protein, 71 aa, Zea mays
  Clone ID: MRT4577_186236C.1.pep
PGSTHAVRKKKKKKKKKKKKKKKKKKKKKKKKKKKKKKRKKKKKGGGRFLRDPKPYFTRASQGEYFFFWAP

SEQ ID NO: 279229 - protein, 127 aa, Zea mays
  unsure (1)..(127): unsure at all Xaa locations
  Clone ID: MRT4577_186237C.1.pep
QALRRTPYLLAPHLAHGPGREEASHKKPAADEKAEKTTRWKKPQAQKRLAGFQSLRQGGRLDKGKQKGQKSVGTFQDLLFKGVKPGPPHLRIXSSRAWSLMNSFLTAIFKRLSVEAANLIRFTRRPT

SEQ ID NO: 279230 - protein, 70 aa, Zea mays
  Clone ID: MRT4577_186238C.1.pep
SQMAIVPQRPLAKTTAVHTTLVLDVARRRPPLRGSRGGASTFPIEEGCPATPSRRIGPCTCLGLRQRAPS

SEQ ID NO: 279231 - protein, 60 aa, Zea mays
  Clone ID: MRT4577_186239C.1.pep
SEQEAKKESHFRARVDGAETSMQDVVREELERQVDGSTRSPGAARTSPASSLGAAAPSRG

SEQ ID NO: 279232 - protein, 127 aa, Zea mays
  unsure (1)..(127): unsure at all Xaa locations
  Clone ID: MRT4577_18623C.1.pep
PSTKLDRTRTGPANGGNLCASAGYRQIKAERMQALWRRTGIRHQSREQGRSDRSGETNGTAMRASGARALQWRVGECLANAMGLCVCVCQYVLEDGREGAGAXRSLPRRRGRERERERERERGRRGG

SEQ ID NO: 279233 - protein, 60 aa, Zea mays
  Clone ID: MRT4577_186240C.1.pep
VWQNLRTPWKGTSMITVCVGSSQRADHQMWNSFLRRGGGDASGVPDGGGPQAGEHGAKPT

SEQ ID NO: 279234 - protein, 119 aa, Zea mays
  Clone ID: MRT4577_186241C.1.pep
FVSSATRLPGKKYTHISFPLHVPPSAPVFPYQGLDVRAQILSLQKGGKSSCVLDSAITGVTKHDSSIALSWPHHIELRRRPSLILNQHGKLMLRPPDNLADYNQGIPEAEHEKVPHVAY

SEQ ID NO: 279235 - protein, 73 aa, Zea mays
  Clone ID: MRT4577_186242C.1.pep
RPRVRPRMRPLVRFLVRPPARLKPMDGVHEDMFTKLSTEGCMRANVCASLCYPSEGGRTDLVIDGDKHRLGAA

SEQ ID NO: 279236 - protein, 73 aa, Zea mays
  Clone ID: MRT4577_186243C.1.pep
CGSARRKEARRGSSACRSSGHCRHRSSLPAYGGRAGATLPQCLRWRTGAHADLIQRRDGDLSRASPGSCTLRS

SEQ ID NO: 279237 - protein, 60 aa, Zea mays
  Clone ID: MRT4577_186244C.1.pep
SPCSAAHLSRYLAIYLSHCWRRQATTIDEPPFKHIVHCPLCGGSVVRAHNTAHCRPGSLP

SEQ ID NO: 279238 - protein, 43 aa, Zea mays
  Clone ID: MRT4577_186245C.1.pep
QIMLSQFPKGQIRRLTPFGHLKPPPPPRKQWVFLPTVKAFLEV

SEQ ID NO: 279239 - protein, 68 aa, Zea mays
  Clone ID: MRT4577_186246C.1.pep
HTQVKFLIYPKAANVTLTVYEFNQQNVPNLQSDPENIDGEKQFLNQSAREAYSILGFGIEVTLIRQTF

SEQ ID NO: 279240 - protein, 74 aa, Zea mays
  Clone ID: MRT4577_186247C.1.pep
FGSSHDRAEHYFERAVRAEPADSEALSRYATFLWKARNDLAGAEDTYQEAIAADPGNAHHAAAYAHFLWNTGVE

SEQ ID NO: 279241 - protein, 90 aa, Zea mays
  unsure (1)..(90): unsure at all Xaa locations
  Clone ID: MRT4577_186248C.1.pep
LEXPCIASAPHRLHLRPPPPRPTAGRMEAPVSPYASSPESVPRRAPRSPPQLHQSPSEEGDDQEKPRHLRFLACNTAAGRIIEKGGYTIN

SEQ ID NO: 279242 - protein, 166 aa, Zea mays
  unsure (1)..(166): unsure at all Xaa locations
  Clone ID: MRT4577_186249C.1.pep
LYRFSIRRXSGXQRSSRXAPRXRATKLVNXPAGCTPAAAAISSILFMNSASPPPIPSKLALSAHLAGVRAGRGRHTITPVPQFTGARDLASPAHPPPPPRKAGTGREEVEGDDKAEEERAHGGGATAATWKPMTLFRCDIGRGRGLTASSDPGCPLVGPPPHRTWG

SEQ ID NO: 279243 - protein, 242 aa, Zea mays
  Clone ID: MRT4577_18624C.1.pep
GTLEAGRALSRGSAEAQLHQHTTMFTFSGNLLAGQYDTQKQRSPPPKPTPVTFPALHPPEPSTQAPPASWSQPGARIADHFLRLKKPSDVTEETLALLNVTFQPESDLETFLSSLSNNAESFLPPRSWFDSPGEQQSSSNTGTPPKLLSNGRKPPEQRDFFVRSRELFFNNADAFSTLTRKGCGTQPPLRLAHFRKFWEGLDNLAYYWDTSLDEYLPPAQGANSDERTAPNPLSGSTDTNPQ

SEQ ID NO: 279244 - protein, 469 aa, Zea mays
  unsure (1)..(469): unsure at all Xaa locations
  Clone ID: MRT4577_186250C.1.pep
MVRRPRPARTPARCALSASLDGMGGGDAEFMKRIEELAAAAGVQPAGPAGCGWPASVELSASNVGLPLALRMLKRKKQQQQAQLQAVARPSRWDEGLLGSAGESVGRAFSSMVLIVGELQSFALQQMRDALLCDDLQGVLARVQGEMHDSFVWLFQHIFAGTPAFMVSLMLLLANFTVQSMGRSVAAAAATIPPTAPAVALVNAQRPEPSRPRFDAASVKTFSVDRMASVGGDIGGGGKTPPVAGATGDGRSDESLYRLSRVSPQQPSAPPVAEVAQDAADADEQAIWEMMLAEALKASPRTEELSDPDVLRSLVAPVEAELETEDHAEHTLTEQRYEQAVAAEPNNPLILANFAQFLYLVQNDHDRXSLPSPTRCSSQRSRSYXNKPSSLRRAXLLRVRAEPADSEALSRYATFLWKARNDLAGAEDAYQEAIAADPGNAHHAAAYAHFLWNTGACTGTGAEATRRDA

SEQ ID NO: 279245 - protein, 115 aa, Zea mays
  Clone ID: MRT4577_186251C.1.pep
ECISLVSINTTIVLPAPLSNQCTLTKSEPFPSHKLLVLWTAFCSPYAQPCHACESPPVRITFHLCQESECLLRLPQPPGRWITTPEYVYSGLQPSPYKLDTATKQPFPYTNETLP

SEQ ID NO: 279246 - protein, 84 aa, Zea mays
  unsure (1)..(84): unsure at all Xaa locations
  Clone ID: MRT4577_186252C.1.pep
RHPQEKPDKNKELFNSPLGEKEQKGSHRMPLPPAGSGGKGEKKPGRRKETRQTPCQINQAVRPVVDPGEGPIQSEDVXVKNPHT

SEQ ID NO: 279247 - protein, 66 aa, Zea mays
  Clone ID: MRT4577_186253C.1.pep
THELGAISVNHVHLVNSKHFFMYCPKSDGCRYGTLQKALRGYVKRFQAVFFFRLSKNQNLGVTFVK

SEQ ID NO: 279248 - protein, 433 aa, Zea mays
  Clone ID: MRT4577_186254C.1.pep
GSTTGGGAAAAAAAAAVVDPGAPAALVGPSLQVLSALSDQNNKRIVLALQSGLKSEILWALNALTVLSFKEKDDLRRDATPLAKVPGLLDALLQVIDEWSDISMPKDHTKPPRLRTLGANTTLSGFGQENMEKVYSDTATTSNDQSKAEDSSVTKKRAASFWFDEDGLFNNDDEGRAERQQCAIAASNIIRNFSFMPENEIIMVQHRHCLETIFHCLENQNREDDELITNMLETLVNLAPVLDLRIFSSSKPSFIKMTEKGAIHAIMGMLSSSVKPWHCAAAELIGRLIINPDNEPFLLPIIPQIYKRLVDLLSVPAYDAQAAAVSALYNVAEVNMDCRLKLASERWAVDRLLKIVKTPHPVPEVCRKTSMILESLVSEPQNRMHLLVHENTFAEILTSEGKYSDTFARIVYELTARPSNKVTSGHAIWGNIN

SEQ ID NO: 279249 - protein, 64 aa, Zea mays
  Clone ID: MRT4577_186255C.1.pep
RTFVSRSLSHIFPSEFLVYVFLFGPAPMLLVYLATLTNQVFMSDLYIHIPTAFDPFSESNSCHS

SEQ ID NO: 279250 - protein, 825 aa, Zea mays
  Clone ID: MRT4577_186256C.1.pep
GTSRPAGNLYRQSHLGGRLPAYDGRKSLYTAGPLPFTSMTFEITLQDEEDSVGGGQGGQRRERVFRVVIKFAARADLHHLAMFLAGRQADAPQEALQVLDIVLRELPTARYSPVGRSFYSPNLGRRQQLGEGLESWRGFYQSIRPTQMGLSLNIDMSSTAFIEPLPVIDFVAQLLNRDISVRPLSDSDRVKIKKALRGVKVEVTHRGNMRRKYRISGLTSQATRELSFPVDDRGTVKTVVQYFMETYGFSIQHTTLPCLQVGNQQRPNYLPMEVCKIVEGQRYSKRLNEKQITALLKVTCQRPQERELDILQTVHHNAYYEDPYAQEFGIRIDERLAAVEARVLPPPRLKYHDSGREKDVLPRVGQWNMMNKKMVNGGRVSNWACINFSRNVQDSAARGFCHELAIMCQISGMDFSLEPVLPPVTARPEHVERALKARYQDAMNILRPQGRELDLLIVILPDINGSLYGDLKRICETDLGLVSQCCLTKHVFKMSKQYLANVALKINVKVGGRNTVLVDALTRRIPLVSDRPTIIFGADVTHPHPGEDSSPSIAAVVASQDWPEVTKYAGLVSAQAHRQELIQDLFKVWQDPQRRTVTGGMIKELLISFKRATGQKPQRIIFYRDGVSEGQFYQVLLYELDAIRKACASLEPNYQPPVTFVVVQKRHHTRLFANNHNDQRTVDRSGNILPGTVVDSKICHPTEFDFYLCSHAGIQGTSRPAHYHVLWDENKFTADELQTLTNNLCYTYARCTRSVSIVPPAYYAHLAAFRARFYMEPDTSDSGSMASGARGPPPGAARSMRGAGSVAVRPLPALKENVKRVMFYC

SEQ ID NO: 279251 - protein, 90 aa, Zea mays
  Clone ID: MRT4577_186257C.1.pep
FYFHFISFFLASFPSLTPPLNMFGFFHFFGPQRNVVEDEVDETFTLAAAYEAEANNRRSHRRLILRTMLEERGSSSCITSRRANLASATF

SEQ ID NO: 279252 - protein, 97 aa, Zea mays
  Clone ID: MRT4577_186258C.1.pep
RSTSRAGPFFLCCPSFFRGGNSIHVHIYSPTSCQIHLNTLHLTSYANLFNQLFNASPRTLPNTLPFTHTQRHYIHASTLFLSIKSEPTISVQTYTSP

SEQ ID NO: 279253 - protein, 253 aa, Zea mays
  unsure (1)..(253): unsure at all Xaa locations
  Clone ID: MRT4577_186259C.1.pep
GTAKDDLKSKASLINSLNEKVQTLYTEKGEVEEKLSALVSQYTYLKSASEERASHDSELLVQKDDMLNQLEEKLSAALSDSSKDRTRIAELNNELVTTRTILDNEVVARKKLSDLVEFTEEALTGSRNEVFKLSEELDAVKRSNQDLMTQISKLTDEASEVRQALANKIEQAESVSATLSDELVSVREVLKKSEGELEITSKQLVXVSEAHSDLNKELLGAYKQLESTQSELVXERXISATLTXELEALVKTS

SEQ ID NO: 279254 - protein, 145 aa, Zea mays
  unsure (1)..(145): unsure at all Xaa locations
  Clone ID: MRT4577_18625C.1.pep
GEEEQHGTAGGARKQPNPAAGQGGGPGQATPQQAGHGDAGTRRGGGGTRRQATPPRAADRXXRRQAXTPTDAAAXRNRQXXSPRQRPNRRXGAKAXXXNGPXXTXNXADEKGXXXEXXEEKGGKGXXDPKXXXXXXGTKXDHXDD

SEQ ID NO: 279255 - protein, 92 aa, Zea mays
  Clone ID: MRT4577_186260C.1.pep
PLEFFHGASSSQLHDEDGTMHRYAPILGCVMVGSFQSSERLQRSATARCEHADNPHRDDDGNHVPTALPRMCPLHPLPHHLSGVCRLLVLLH

SEQ ID NO: 279256 - protein, 69 aa, Zea mays
  Clone ID: MRT4577_186261C.1.pep
QSNICRFISFLHHPIDNEVRAVTTHTYKTQLTTLDYRSRLAFPMLSSWTHLIFTSSYTAMVIPLLILVH

SEQ ID NO: 279257 - protein, 82 aa, Zea mays
  Clone ID: MRT4577_186262C.1.pep
RPEGCDAKRRCRSGMSASLWIKIHDVLKVSDEYLYTPSQKQGASLHYWKLDDMDDSGKMRWEHDDMDDSDHEFDRKPSNSTQ

SEQ ID NO: 279258 - protein, 57 aa, Zea mays
  Clone ID: MRT4577_186263C.1.pep
STKTDYDGALLHRSWRLSLDQGWITDAWRAPPADTNGWSDLIGGQSLGQRGAGACVG

SEQ ID NO: 279259 - protein, 252 aa, Zea mays
  unsure (1)..(252): unsure at all Xaa locations
  Clone ID: MRT4577_186264C.1.pep
TQARPTRASRSRAIRPLPPPRAPQPPPPMAAAAPAQGKLLSQIPQTRFNPXSSHPWQPHPWQPCXKPRVPTTPPSMASPPSIHGSHAPSAPFHPWPRLPPRRDSSHPLLPRGLRLPXSPSASXFPSFPSALDLAPCPPTPASVTAHPGQRWTQPLPRVCSRPRPSSGTSPPARVPGATGWTPPSPRCSSGRSAGGRARRGAFPSTRSSTTSMVPSSPPLGEPKPSRGGRGRPDXNPAPAKRDERKEAESFWG

SEQ ID NO: 279260 - protein, 320 aa, Zea mays
  Clone ID: MRT4577_186265C.1.pep
SRVSHGGTGHSGQTPLGQVGKLSFAVEPWTKGFSTSCAAPYSAGATEHQLSIDEKVDNSTVASDSDGKSPVSEKLKFLSGSCYLPHPDKEATGGEDAHFISIDEHVIGVADGVGGWADVGIDAGLYAKELMRNSMSAIKDEPEGTIDPTRVLEKAYMSTKARGSSTACIITLKDQGIHAVNLGDSGFVVVRDGRTVLRSPSQQHDFNFTYQLESGGGSDLPSSAQVFHFPVAPGDVIVAGTDGLFDNLYNNEISGVIVEALRVGLEPQVAAQKIAALARQRATDKNRQSPFASAAQEAGYRYYGGKLDDITVVVSYVKSA

SEQ ID NO: 279261 - protein, 212 aa, Zea mays
  Clone ID: MRT4577_186266C.1.pep
IFWPPCSLIHGAQKIPAGSPFFFLQQQTNSAPFTFGRGPLCSLRARHFSSPSSRSRGAPPCIFPAMARNSASSLLVWCLLRARRNAAASSGHEIPSVLLASARSAQSRPKASRGCLDSPTLRRRSARFDCLRVSLRRICAAPTCHRGNPCPCRRHALRIAHRQRAQTNGMHARHESARLFALYDCDLFYLRIRSMMCLHVYMCVKCFGYAHW

SEQ ID NO: 279262 - protein, 71 aa, Zea mays
  unsure (1)..(71): unsure at all Xaa locations
  Clone ID: MRT4577_186267C.1.pep
GQSPHGFQTEGSYLXGRFSMQMKRVGSDSAGTVRAFYLSSRNSEHDEIEFEFLGNRTGQPYSVQTNVFTGG

SEQ ID NO: 279263 - protein, 105 aa, Zea mays
  unsure (1)..(105): unsure at all Xaa locations
  Clone ID: MRT4577_186268C.1.pep
TNMYTYISMVALIGGIPPAXVFENPKLMHYVYIDTIAKVGLTKYVSDLFLIGLIYHLYNQIATNTLQRVSPLTHADRNAIKRVYTICFSIIDTGNRISTQTGIGT

SEQ ID NO: 279264 - protein, 276 aa, Zea mays
  unsure (1)..(276): unsure at all Xaa locations
  Clone ID: MRT4577_186269C.1.pep
MPPSPSSAGAGAASPSGSASASGSDPTPSWWESVSQARSRILALSSILPAAVSHDVAALADADRPARALLRSPAAYSALSDALRAGGGADDPACHWLYDTLLSADPDLRLAALAFLPLLAALYLRRLPPELPSSLSGFEAVLLAVYSSEAKNRQGKPVLVQVPDLSVPSLYHTPAVQPPAPSPLAGRSXADPPYGTNPQATPVVGGAXLEPQAAVKSTKRAGIIGVAFEAYYSKISQMPAASKVDACNAVAAWAGQYCKCRFELDEKELEEEEVTL

SEQ ID NO: 279265 - protein, 103 aa, Zea mays
  Clone ID: MRT4577_18626C.1.pep
ADIPSVSGTTRPKSTYIGGEYRRSADSSSTDVALAFEVPSGWLKEKDCVTVSVLQALLGGGGKPSCGRKVKELHLPLNRFVDEPDQIKSVFAFKVVYNNIGIF

SEQ ID NO: 279266 - protein, 117 aa, Zea mays
  unsure (1)..(117): unsure at all Xaa locations
  Clone ID: MRT4577_186270C.1.pep
MFGLQHYWNQGRNPTAHGGLHHTTFKTFCKADEGYCLTVRYGNVLLPPANPPDXHHNWYKDMLFSTHIKDXEEDNPAFALLNKATGLAIKYSLGQSHPVKLKPFNQENQNETLLWTE

SEQ ID NO: 279267 - protein, 50 aa, Zea mays
  Clone ID: MRT4577_186271C.1.pep
MAAESFLFTSESVNEGHPDKLCDQASDAVLAACLAQDPDCTVVCETCTMT

SEQ ID NO: 279268 - protein, 63 aa, Zea mays
  Clone ID: MRT4577_186272C.1.pep
KEKPRRRLSPLVGSSQIKKGPQPYLYNIIGPASKVGLPWNRRLVRNQKYKCSPSRRVNLWLGP

SEQ ID NO: 279269 - protein, 71 aa, Zea mays
  Clone ID: MRT4577_186273C.1.pep
VFSPRANTVSSVNAWLPFPQLEHQSFLMALVWLGMHSVLRSIMCVTEYGGSCPPLVSLAPDIQPRHCFCDR

SEQ ID NO: 279270 - protein, 90 aa, Zea mays
  Clone ID: MRT4577_186274C.1.pep
IIGLLVVRARLPRTSHTETIFGIQLWKGLYGASTACPKLGLSSSTATVAKIKKVIEDLDEKEKETCDASGAGEAASMTPARSAIAGMAED

SEQ ID NO: 279271 - protein, 108 aa, Zea mays
  Clone ID: MRT4577_186275C.1.pep
CSVTWPGDQPDDFEKPSLSRMTSPLSRNMKLPRTPHEAFQHRRDSVYPCPRTRAPTTMGTLCSSTESADAGTTIVMPTWSQYRRMLPCASVRPYYYENTSTDDQTSSC

SEQ ID NO: 279272 - protein, 70 aa, Zea mays
  Clone ID: MRT4577_186276C.1.pep
SRSSSHYLCSPSYNFYNFFHSTNLLLQTHHLSTNNPSLLVPSFRFLITYSSILKLLVLYLLLPIYYPFHF

SEQ ID NO: 279273 - protein, 153 aa, Zea mays
  unsure (1)..(153): unsure at all Xaa locations
  Clone ID: MRT4577_186277C.1.pep
MTTATCPTXAPAKGGNEQGGTRIFGPSQKYLSRDLAAHTSLKPRKDGQXTQEELQKRNLREELEERERKHYSSKDKSYAKKKRDRRKSSSQLLLEGSKREAEDKIVPQEIDADDSDVEPKSDDEREDNTTSSLTLFRQKWSNCEKNLGDIKIN

SEQ ID NO: 279274 - protein, 246 aa, Zea mays
  unsure (1)..(246): unsure at all Xaa locations
  Clone ID: MRT4577_186278C.1.pep
MHRPTPAATVSIKYGGSEGRRPESKNEATQYGLDMTEQQYLEHSIPWIAANDAAWRALCRYWASTEFKAKSVRHSSNRGTESYHRYGGDDHFRLAKRMEASTGAVPSDVQIYLRGHRGSDPANPDVLCSQKATDXAGCLEMFGRFCLYGFLYVRLHXLLYEAAYGEAMSSXHGPDYDWRTSPIDPQAVYASGGKAHGRYTMFANIIDSNQVRVQRGGSSRSTARSSRRSTQDSAEVEQLREELRRH

SEQ ID NO: 279275 - protein, 319 aa, Zea mays
  Clone ID: MRT4577_186279C.1.pep
APRTARIEPVPLDGGLKAAFHRCGEVCREYAKTFYLATQLMTPERRMAIWAIYVWCRRTDELVDGPNASHISALALDRWESRLEDIFAGRPYDMLDAALSDTVARFPVDIQPFRDMIEGMRMDLKKSRYRSFDELYLYCYYVAGTVGLMSVPVMGISPASRAATETVYKGALALGLANQLTNILRDVGEDARRGRIYLPQDELEMAGLSDADVLDGRVTDEWRGFMRGQIARARAFFRQAEEGATELNQESRWPVWSSLLLYRQILDEIEANDYDNFTRRAYVPKTKKLMALPKAYLRSLVVPSSSSQAESRRRYSTLT

SEQ ID NO: 279276 - protein, 80 aa, Zea mays
  Clone ID: MRT4577_18627C.1.pep
YTHTHSHDTRCIHWILGVLFSLARNANFLIRWMAFFFSYHAARQVPICLARLFIHSLPSCTRLLLLHVVDVKYKEYNGVY

SEQ ID NO: 279277 - protein, 85 aa, Zea mays
  unsure (1)..(85): unsure at all Xaa locations
  Clone ID: MRT4577_186280C.1.pep
VEFDIQLETEECVRGRPGXGAIGAAGRGGGAPRRPRXDDQRELEAELRKMAPPNGRTVLIFRARGGCPKGRMEVWGAKKVRRIKK

SEQ ID NO: 279278 - protein, 77 aa, Zea mays
  Clone ID: MRT4577_186281C.1.pep
DVSSEFGSSVTLFCLRRQPPAAVAGLFQGARSTPGNMLRGAPPQGEHGAGYPCEPAPLESDRRSGGETQGRTTLTGA

SEQ ID NO: 279279 - protein, 56 aa, Zea mays
  Clone ID: MRT4577_186282C.1.pep
KTKPRPFGCVSPQTKGWCPHKLGQAILTAIIIKKILTGYSTYPEKGAKPQIHLLSR

SEQ ID NO: 279280 - protein, 52 aa, Zea mays
  Clone ID: MRT4577_186283C.1.pep
ETECFPSPWVAVLAISLMSLFNGKEYIYRVTRMFVKKKKKITKKKKKKKKSL

SEQ ID NO: 279281 - protein, 67 aa, Zea mays
  Clone ID: MRT4577_186284C.1.pep
GPCFVGSLVTSGCSSSRSRPRTSRVFPWDRGLAFVCFPAPGPLLCFVITGVFCRPRAVFRASSRVLA

SEQ ID NO: 279282 - protein, 101 aa, Zea mays
  unsure (1)..(101): unsure at all Xaa locations
  Clone ID: MRT4577_186285C.1.pep
ATDRVRPHLRHSCLQQDLGVPSDQSFPWGAGDGGGWAMPQPNLSIAICLLCVANNIPVSIFGSFKKKKNPSPWFXCFFSPPRSRWXSVPRVLCLPSLFFFF

SEQ ID NO: 279283 - protein, 233 aa, Zea mays
  unsure (1)..(233): unsure at all Xaa locations
  Clone ID: MRT4577_186286C.1.pep
MALEPVARAVAEEVARWGAMRQTGVSLRYMMEFGVRPTERTLLLAAQFLHKELPIRIARRALDLDSLPFGLSTKPAILXGQHVALHDPDPEPGVIGLINTKMSPMTVARIASEDARAICMREYGSSPNVDIYGDPGFTFPXLWLNCNNLEPVTAVNXYVTPHLHLMIFELVKNSLRAVQERYMDSDKLAPPVRIIVADGAEDVTIKITDEGGGIPRSGLSRNFTYLYSTAENP

SEQ ID NO: 279284 - protein, 363 aa, Zea mays
  Clone ID: MRT4577_186287C.1.pep
MASEPVARAVAEEVARWGAMRQTGVSLRYMMEFGARPTERTLLLAAQFLHKELPIRIARRALDLDSLPFGLSTKPAILKVKDWYVESFREIRSFPEVRNQKDELAFTQMIKMIRVRHTNVVPAIALGVQQLKKDLGGPKAFPPGIHEIHQFLDRFYMSRIGIRMLIGQHVALHDPDPEPGVIGLINTKMSPMTVARIASEDARAICMREYGSSPDVDIYGDPGFTFPYVTPHLHLMIFELVKNSLRAVQERYMDSDKLAPPVRIIVADGAEDVTIKISDEGGGIPRSGLSRIFTYLYSTAENPPDLDGHNEGVTMAGYGYGIPISRLYARYFGGDLQIISMEGYGTDAYLHLSRLGDSEEPLP

SEQ ID NO: 279285 - protein, 269 aa, Zea mays
  unsure (1)..(269): unsure at all Xaa locations
  Clone ID: MRT4577_186288C.1.pep
MASEPEARAAAEEVARWGAMRQTGVSLRYMMEFGARPTERTLLLAAQFLHXELPIRIARRALDLDSLPFGLSTLPANLKVKDXEDFSFLXSSPLGRTRMSXMTPHTNLVPAVALGVQQLKKDLGGPKAFPPGIHEIHQFLDRFYMSRIGIRMLIGQHVALHDPDPEPGVIGLINTKMSPMTVARIASEDARAICMREYGSSPNVDIYGDPGFTFPYVTPHLHLMIFELVKNSLRAVQERYMDSDKLAPPVRIIVADGAEDVTIKAGNSG

SEQ ID NO: 279286 - protein, 99 aa, Zea mays
  Clone ID: MRT4577_186289C.1.pep
VGNFFRLKKKKKNKKKKKKKKKKKKKKKKPKKKKQKKKKKKKKKKHINKKKKTKKKKRGALLKIPSLNPLPFPFKASLKRSHKSLFLALLLKNWTLKNP

SEQ ID NO: 279287 - protein, 104 aa, Zea mays
  unsure (1)..(104): unsure at all Xaa locations
  Clone ID: MRT4577_18628C.1.pep
FCLLMLLGLSXXAASATIFPRARSSLASLLPRLFFAASSVCXGSXRGPXXXXPXXAAGVLPLSPLFLPXSSALLRPXPLVPSLAPGLGARRLPHLVLAGLAACS

SEQ ID NO: 279288 - protein, 73 aa, Zea mays
  Clone ID: MRT4577_186290C.1.pep
PTRPIIPFLHNVTIPKDCNRDQKCYIYLSGQVMDKLAKIDPYFAKLGDAMVTWIDACDELNPDGPAAGKDTDK

SEQ ID NO: 279289 - protein, 144 aa, Zea mays
  unsure (1)..(144): unsure at all Xaa locations
  Clone ID: MRT4577_186291C.1.pep
LRCTPSPFERACEXLERSHMALGLTPPRDPARCPGSSARNTGLKSSAGPTMNCCLGGRDGDTWLGRGDPDANDQRCSKDLPVDTPARDEERLPEVPLVDEIRTMVLQHYLRRHHLHKLLPFKPGPLSTEPFWGLAAGTSTTASC

SEQ ID NO: 279290 - protein, 68 aa, Zea mays
  Clone ID: MRT4577_186292C.1.pep
FPPFTHSRECPKIIWGWVLCGIPQGSPFFLSACFFRCLSRLSIFPHWEKLGVVSPRFLYSPFGPVGLH

SEQ ID NO: 279291 - protein, 78 aa, Zea mays
  unsure (1)..(78): unsure at all Xaa locations
  Clone ID: MRT4577_186293C.1.pep
HVVLVVQMLFQEYFKLIILQTITLLATTESSELVAVVEEAAFXFKTFQAPLLELLFPTSPMSGRRSAVLSVHLNSFWF

SEQ ID NO: 279292 - protein, 55 aa, Zea mays
  Clone ID: MRT4577_186294C.1.pep
QDTEVCIAVFAWERAAKREQHNGAGGETPYAAERTGYQQGGQYGDISHEAGPSAR

SEQ ID NO: 279293 - protein, 332 aa, Zea mays
  unsure (1)..(332): unsure at all Xaa locations
  Clone ID: MRT4577_186295C.1.pep
MSHPHKVEQYFSKSEFSCKILKSRAGKLSMTFHIFINFVLQTRDDARQFMKYLHPDLGVELPERSYGTDCRIYVPDHPKSRXIIFDEFVIAHILGWWGKAIMIRNQSLLWVLSIGFELMELTFRHMLPNFNECWWDSIVLDILICNWFGIWAGMKTVQYFDGRTYEWVGLSRQPNIISKVKRMLGQFTPAQWDKDEWHPTLGPWRFIQVLSLCVVFMAVELNTFFLKFCLWIPPRNPLIVYRLVLWWLIAIPTIREYNTYLQDSKPFKKVGSFCWLSLAICIVELLICIKFGHGLFPKSMPSWLITFWSAVALLLVLFVWTWKYRTMKRKMI

SEQ ID NO: 279294 - protein, 297 aa, Zea mays
  unsure (1)..(297): unsure at all Xaa locations
  Clone ID: MRT4577_186296C.1.pep
MGANGHHEPRRGCNGTVCNGSIRPLDYFGDVDPWTAWAYKPRTISLLLTGTCLLIWASGALDPERSSSADRVSSVKRGVFAMIAVFLAYSFLHTPSTVXIRPHPAIWRLVHGMAVVYLVALTFLLFQTRDDARQFMKYLHPDLGVELPERSYGTDCRIYVPDHPKSRFNNVYEIIFDEFVIAHILGWWGKAIMIRNQPLLWVLSIGFELMELTFRHMLPNFNECWWDSIVLDILICNWFGIWTGMRTVRYFDGRTYEWVGLSRQPNIISKVKRMLGQFTPAQWDKDEWHPTRGPGRF

SEQ ID NO: 279295 - protein, 151 aa, Zea mays
  Clone ID: MRT4577_186297C.1.pep
EGGQRRLLIVVTTTRSAPGARRRRRGELLRLAHTLRLVRPPVVWTVVEPAADAPATAEVLRGTGVMYRHLAFRPEGNLTAAGAGAEAHAQRNAALAHVERHRLAGVLHFADAAAVYDVGFFDQIRQIESVLSTPSSHAFCSLPSISRSYCF

SEQ ID NO: 279296 - protein, 111 aa, Zea mays
  Clone ID: MRT4577_186298C.1.pep
MAVINGRSKRVRVTAVPRPLELRSFPAAGEGPRPLVLLSFPAAGEGLPPRGAFHDCVRSFLAGSAVPADGAWQVAFGVGNGVVVVMEVVEEDVAKTGIERIYCDHCTVAGE

SEQ ID NO: 279297 - protein, 51 aa, Zea mays
  Clone ID: MRT4577_186299C.1.pep
TKRTVVVNKLFSAAWVKPPKKTAYLRLFVSHYLPLNKTVFRITIIFFPAAM

SEQ ID NO: 279298 - protein, 55 aa, Zea mays
  Clone ID: MRT4577_18629C.1.pep
STIFLGRHQFLRPSISIDKSSYLLYFGNAATKLIYLPNNLQHEIQVVVAQGVQIR

SEQ ID NO: 279299 - protein, 60 aa, Zea mays
  Clone ID: MRT4577_1862C.1.pep
DKRLLSQYTTQRQDFFPSQNHSYRHDKLLTRFQEKRKFKRRDGRTQYHTKDQAHKPAQRS

SEQ ID NO: 279300 - protein, 124 aa, Zea mays
  unsure (1)..(124): unsure at all Xaa locations
  Clone ID: MRT4577_186300C.1.pep
MRRTTPRRRRAAAAEMSQQLPANLVEIMEQRMKLIEQRSAYLQEQINQXPAASPEEYSRANKEFRKLESTMELIKDLRSKQEEIEGLKSLVANDHEEKDMREMAEEELLVAVEEEKRLQHELFR

SEQ ID NO: 279301 - protein, 187 aa, Zea mays
  Clone ID: MRT4577_186301C.1.pep
ELVLPHLIPLTPPTRPLPPPDLVGLGSARPPRAAAAQQQQVDVQLRNEDLRIDTYRSGGSGGQSVNTTDSAVRITHIPTGTVVAIQDERSQHMNKAKALKVLRARLYELERRRLHMDRSKLRSEQIGSGDRSERIRTYNFPQGRVTDHRVGVTHHSIADVMEGESLDMFVDALLLQEEMDAIASFGA

SEQ ID NO: 279302 - protein, 121 aa, Zea mays
  Clone ID: MRT4577_186302C.1.pep
RTRGGTRGQKLSRQGALRLHAPPPQVSGKRGPPGKGRSRISPATLRSVLCMVWPPWPPVGDKGPSRLCVSCIQPEWPPAWGVVIVIAGHLPYWPRAPAPFRSPPFFYGPTPFLGRIVGVFF

SEQ ID NO: 279303 - protein, 412 aa, Zea mays
  Clone ID: MRT4577_186303C.1.pep
MVRPGKALAAPQLLLLVFLCLLAGGARASPPTDALRRVSPRAGAGGLCQQLLLPQGYPCTEHTVQTDDGFLLSLQHIPHGRNGIADNTGPPVFLQHGLFQGGDTWFINSNEQSLGYILADNGFDVWVGNVRGTRWSKGHSTLSVHDKLFWDWSWQDLAEYDVLAMLSYVYTVAQSKILYVGHSQGTIMGLAAFTMPETVKMISSAALLCPISYLDHVSASFVLRAVAMHLDEMLVIMGIHQLNFRSDMGVQILDSLCDDEHLDCNDLLSSITGQNCCFNSSRIDYYLEYEPHPSSSKNLRHLFQMIRKGSFAKYDYGWWGNLRRYGQLRPPSFDLSSIPESLPIWMGYGGLDALADVTDVERTIKELRSTPELLYIGGYGHIDFIMSVKAKEDVYVDLMRFLRAQQGMHSSY

SEQ ID NO: 279304 - protein, 417 aa, Zea mays
  unsure (1)..(417): unsure at all Xaa locations
  Clone ID: MRT4577_186304C.1.pep
MQYHLRRCGGGALAALWRLRHNASSAVASPPVAWRRPCLPPRFYSTAEMSQQLPANLVEIMEQRMKLIEQRSAYLQEQINQXPAASPEEYSRANKEFRKLESTMELIKDLRSKQEEIEGLKSLVANDHEEKDMREMAEEELLVAVEEEKRLQHELFRSLLPKDEADEKDCILEVRAGTGGEEASLFAMDIFRMYEKYAQKNGWKFDVIDIMESAVKGYKEASGTISGPGAFGKLKFESGIHRVQRVPATEKSGRMHTSAVSVAVLPQADEVDVQLRNEDLRIDTYRSGGSGGQSVNTTDSAVRITHIPTGTVVAIQDERSQHMNKAKALKVLRARLYELERRRLHMDRSKLRSEQIGSGDRSERIRTYNFPQGRVTDHRVGVTHHSIADVMEGESLDMFVDALLLQEEMDAIASFGA

SEQ ID NO: 279305 - protein, 196 aa, Zea mays
  unsure (1)..(196): unsure at all Xaa locations
  Clone ID: MRT4577_186305C.1.pep
YARVISETHQAKLPSIDLTTLATNILSLLALHALCVSATNACIISQCTLALAAIRPQLLPQCTSXGLRHLAAQAYMLQQALADSVLQQPTNQLQQQYLAHLTIQTIETQQQQQLLPALSQLXVENPVDYLQQQLLASNPLALANVSAYQQQQQLQQFLTALRQLAMGNPDVYLQQQHLLSSSPLAVGNAPTYLQQQ

SEQ ID NO: 279306 - protein, 194 aa, Zea mays
  unsure (1)..(194): unsure at all Xaa locations
  Clone ID: MRT4577_186306C.1.pep
MNRASWLLLVLVQLSCLHCYSATHHGGXEARTPXLPAPANVVVGSVVVVHSGSSEATTTAVSSGTLVGVRCHDGNGRTVFRKDGVVTDRSGRFRVHLPQASPPCVATASSARGLHLVAHHNKHDHGGGTRVFSAGAFSVRPELCSNKGLFFPPVPLVPEPPNVGGVPXPPNPVTPAPPSLVPPLLPTPSPASVL

SEQ ID NO: 279307 - protein, 284 aa, Zea mays
  unsure (1)..(284): unsure at all Xaa locations
  Clone ID: MRT4577_186307C.1.pep
MNRASWLLLVLVQLSCLHCYSATHHGGXEARTPXLPAPANVVVGSVVVVHSGSSEATTTAVSSGTLVGVRCHDGNGRTVFRKDGVVTDRSGRFRVHLAHGPSSSSSSSSHQLRSVTSCSVAVHLPQASPPCVATASSARGLHLVAHHNKHDHGGGTRVFSAGAFSVRPELCSNKGLFFPPVPLVPEPPNVGGVPIPPNPVTPAPPSLVPPLLPTPSPPSVLPPLVPQPPPSSVIPPLLPLVKPPPPPPPPQLLPPLVPVLPPGVPGVPPASASTNRRPVNVNHP

SEQ ID NO: 279308 - protein, 167 aa, Zea mays
  Clone ID: MRT4577_186308C.1.pep
MNRASWLLLVLVQLSCLHCYSATHHGGGRKHGRPLLHAPANIVVHSGSSEATTTAVSSGTLVGVRCHDGNGRTVFRKDGVVTDRSGRFRVHLAHGPSSGSSSSHQLRSVTSCSVAVHLPQASPPCVATASSARGLHLVAHHNKHDHGGGTRVFSAGAFLVRPELCSN

SEQ ID NO: 279309 - protein, 101 aa, Zea mays
  unsure (1)..(101): unsure at all Xaa locations
  Clone ID: MRT4577_186309C.1.pep
GRVGGRTKYMVIQGEPTAAIRXKNGSGCITVKSTRQAMVGGIYHEPMTPGQCNMXAVRLTDYLAQQGLRVDSLNLSRSLAHGWSIHQQLYRHHDYIIGNLL

SEQ ID NO: 279310 - protein, 90 aa, Zea mays
  unsure (1)..(90): unsure at all Xaa locations
  Clone ID: MRT4577_18630C.1.pep
RSAQRTVGRGRPPPTGARAARAAEAPCGSAAGESGXGVPPRWGWGRGRRRRRRKRRRRKGRERTSGGGGWTSVRHVRAERPTTDPGRTRG

SEQ ID NO: 279311 - protein, 67 aa, Zea mays
  unsure (1)..(67): unsure at all Xaa locations
  Clone ID: MRT4577_186310C.1.pep
VEYTSSDPSPSMAILXAFYSKLLTFLDAHHKVPAKEQVDALLKELFALSTVTGILSTLLATCVIVDQ

SEQ ID NO: 279312 - protein, 338 aa, Zea mays
  unsure (1)..(338): unsure at all Xaa locations
  Clone ID: MRT4577_186311C.1.pep
HKRDAGGVPAPASDGHPELSGPRADRRREHRHPAAAYRQPLRRRLPQPSRPVVRVPARERRTSSDHTRGDDAALQRELRGHQQPSSAKWSTRCQYRSPHDRECCAQPGPVDGRRGSKAERLVAHADRELHRVDQVQLGGQRGGRSAAQRPSKSARGAPHPPNXATGVPSPRRYSPPPTTSSKTPTPTSSASSPTSAGYATPTKRPSRSAWCSSRPGPIAAIPAPPTPPPSGSPLWKSCRCGSSTSTGKDPATSTGRSESSTPSAACTCTTSPEPARSRSTPGTTPSSCGRLVSCRPPTTSSSTSTSWTGTQIHRRTMRWPRGWWRGTPATPSAATATS

SEQ ID NO: 279313 - protein, 92 aa, Zea mays
  Clone ID: MRT4577_186312C.1.pep
VGKQASSEAMPTAGRADWSQRVGLRAAMSHSCGERVIYQELMYGVACTGEGDTVLRRGTGAQGGPRRKEREDAHERERANGQRNAGLSMGGG

SEQ ID NO: 279314 - protein, 114 aa, Zea mays
  unsure (1)..(114): unsure at all Xaa locations
  Clone ID: MRT4577_186313C.1.pep
VSPRRTRVRLFPLRSCWEFLFLHLRLLALARAVSRSCSRACSFHESPSASFNLSSVRSSFPTVALHQFACCTHAGPAXPCSLVCLLSAPCAHGLPRARRALPSSMAFNLLRRDP

SEQ ID NO: 279315 - protein, 102 aa, Zea mays
  unsure (1)..(102): unsure at all Xaa locations
  Clone ID: MRT4577_186314C.1.pep
PETGFGDFGTQGTPFPLGGAFNRWXRFGFFHPPLDPFRVSIALGANFPGSFPWFLVGTFXWLSGFPARFGFFXVGPPNIFSRSLREFRKWLKQFRGLMKPRN

SEQ ID NO: 279316 - protein, 87 aa, Zea mays
  Clone ID: MRT4577_186315C.1.pep
AFRPVTTFNGNEGPYGKQGGGGQVMGWATFRRERSCLQWHREASLRLEHARQTAEITMGFLNHWGVLCLTCTHQVNRGLHRFRLAQC

SEQ ID NO: 279317 - protein, 109 aa, Zea mays
  Clone ID: MRT4577_186316C.1.pep
DPTEGYQKAPHGAGSHPAPGGQREGAAQAVWWAPPREGGGYAQNPQAPPPQKGGLVQGSPRRCRCHLNPPPGKKAFAPALFPRFSPPLVPMPFKAQCVWECQNPLFLVP

SEQ ID NO: 279318 - protein, 135 aa, Zea mays
  Clone ID: MRT4577_186317C.1.pep
GFSSLDGNKSVQQELPYTSEELFAQRPLKSSPSLREPDMNAKSGHPNVGFRDIVKDCINRDSVGLTVKTSVQEARRNGQHKDSPRPLLLSKSMDGTCIIGIDRTTNVPANVNGSRRCLQEQSRFSCDDRRLLRPT

SEQ ID NO: 279319 - protein, 74 aa, Zea mays
  Clone ID: MRT4577_186319C.1.pep
MCEEETTALVCDNGSGLCKAGFAGDDAPRALFPSIVGRPRHQGVMVEMGQKDSYVGDEAQSKRGILTLKYPIEH

SEQ ID NO: 279320 - protein, 89 aa, Zea mays
  Clone ID: MRT4577_18631C.1.pep
WVVYTRGTKGGYLATNYTHLWLSTTTRPICAIYRFFFPPPIFLSPFLRPGHPTPLDSGSQNRFNRLPEHDLLAPIIFHHHPPSCVQRCE

SEQ ID NO: 279321 - protein, 67 aa, Zea mays
  Clone ID: MRT4577_186320C.1.pep
SSPPPQLGTNMLVPLWCVYQHLILDRSPALMISATIILNQPQTQSRLGLDSWGTTWQSKPHRPQLTE

SEQ ID NO: 279322 - protein, 76 aa, Zea mays
  Clone ID: MRT4577_186321C.1.pep
RKNKGTPRSRGEFKSRPKGAKHPLGWAALLTIHTRPFIKTGCGHMSSQLYIHAHKNARKPHINPSACHRHEDTWRN

SEQ ID NO: 279323 - protein, 48 aa, Zea mays
  Clone ID: MRT4577_186322C.1.pep
RASVRRLRARATGKPWPGSMRHRAAALFLNQLGAISGQHASANADDVE

SEQ ID NO: 279324 - protein, 55 aa, Zea mays
  Clone ID: MRT4577_186323C.1.pep
VFDLFDTKHNGILEFEEFARALSVFHPSAPIDDKIDCEPSFLTLFIHSFILDYAT

SEQ ID NO: 279325 - protein, 105 aa, Zea mays
  unsure (1)..(105): unsure at all Xaa locations
  Clone ID: MRT4577_186324C.1.pep
GSRKLPRPHFDEVDDEPYKLFTRRNRTEVSIGKMVNIEYLPEIHKXHKRMERLLKKQQRDALLLESYXALDGLTTVRSIRDRTPATYTFDDYDRSVIEAIKITKN

SEQ ID NO: 279326 - protein, 76 aa, Zea mays
  unsure (1)..(76): unsure at all Xaa locations
  Clone ID: MRT4577_186325C.1.pep
GCLWWGASGSSFFAVWSCSSFSFLAACVVCLALLFLWACSGLFRPFPCFCFALFPXVPFVSLFVAVFLXFRCLLSL

SEQ ID NO: 279327 - protein, 83 aa, Zea mays
  Clone ID: MRT4577_186326C.1.pep
PHVLRVCIRIVRFSVVHARMRLSINFNLLSRPESVSIINPIITITIPMSTGPNVADTSSSNVRMSPYVKERNQAHKSAQRFQA

SEQ ID NO: 279328 - protein, 96 aa, Zea mays
  Clone ID: MRT4577_186327C.1.pep
FQCIRFRILLRFSVYAYCTCFQFQFWYGELPGALFAVPVFSSSLLRPSRAPSPLKQLGLLYMVVFSRSIPRHLIQVGFVCFLASILGYFSHECVCV

SEQ ID NO: 279329 - protein, 104 aa, Zea mays
  unsure (1)..(104): unsure at all Xaa locations
  Clone ID: MRT4577_186328C.1.pep
MVARMDAGMQAVHAVGLLSALVLLLVLRRLLAVLQPLALLLLLPLRWRARAAGAVAADVATDAATASMPRASGRKGKASAVXTVALRLPVGSPMMPALWHAYKL

SEQ ID NO: 279330 - protein, 161 aa, Zea mays
  unsure (1)..(161): unsure at all Xaa locations
  Clone ID: MRT4577_186329C.1.pep
HDLSSLRLGRTYCLHWWYCYDESYTSNTKTAAVATYXYGIDINXYIYMTSTDHITSNLDKLAVQNKGTNWTSQPAGXMSIDNIGHAVIDTHVXPCISTMSCPHAHQQNGPAXHIVEVSLSLLARASMPLKFWDEAFAAAYLINCTVIKLLDYLFSFEKLSQ

SEQ ID NO: 279331 - protein, 87 aa, Zea mays
  Clone ID: MRT4577_18632C.1.pep
LPTRTFRPRRCCRRRRRRAPASPARATPTWRRPRQAPPSASVCHTCRIPSHTSIRTAGSWPGSLGQAPTASAATNARSRSGRDRLTS

SEQ ID NO: 279332 - protein, 95 aa, Zea mays
  unsure (1)..(95): unsure at all Xaa locations
  Clone ID: MRT4577_186330C.1.pep
PDGRTCIHVXQTPVMDSLENGATDKCRLALAHGTPVGLPSDDDMGNREPGHNAXAAXRIFAPGATLGDQALASWTIYXGDGTDYIIESSENGTLG

SEQ ID NO: 279333 - protein, 77 aa, Zea mays
  unsure (1)..(77): unsure at all Xaa locations
  Clone ID: MRT4577_186331C.1.pep
FFFFFYFLIFXSFXXXXXKGRVCYKNIFFQPKTKRTTQLLTNTPIIHPKKTAPLGLHLKNTVKQHSALTTAKPKQVK

SEQ ID NO: 279334 - protein, 160 aa, Zea mays
  Clone ID: MRT4577_186332C.1.pep
MEHDVHHQHQQAMELPPGFRFHPTDEELITHYLARKAADARFAPRAVGEADLNKCEPWDLPSRATMGEKEWYFFCVKYRKYPTGLRTNRATESGYWKATGKDREIFRSKALVGMKKTLVFYTGRAPRGGKTGWVMHEYRLHGKHASSSRLMPSSVRAGAS

SEQ ID NO: 279335 - protein, 167 aa, Zea mays
  unsure (1)..(167): unsure at all Xaa locations
  Clone ID: MRT4577_186333C.1.pep
PHQQGGGPTESXGHRSTAXQPKRRXATXDDXRAAXTDRTHADGTSGGTRRGRREAKQKGANNGXGRXGRNNQRXXHGRGDATPHDDNANNDTGXDKQANHXHKXDTTHGSNDADGKPDGDNANTDDGKDNKDEADRNPSNRPXGEHGNDHENEGTGDNDDREGAGKH

SEQ ID NO: 279336 - protein, 376 aa, Zea mays
  Clone ID: MRT4577_186334C.1.pep
RRSSAHYPGRRWSTTCYHHHQQQQEDEEEAMELPPGFRFHPTDEELITHYLARKAADPRFAPRAVGEADLNKCEPWDLPSRATMGDKEWYFFCVKDRKYPTGLKANRATESGYWKATGKDREIFRGKALVGMKKTLVFYTGRAPRGGKTGWVMHEYRLQGKHAAASSSSSLVPSSVSCGASSQQDEWVLCRVFKKSIEPPSVPGSKRSSSVACMGTEGTGVGVGPSSMSTEDDFAACAALPPLMDVSGGSGANMSLSAAAAAASIEVTPPAGAAPAPHVTCFSNAPLEGQFLNPPFLLPSAAAAADHIALAASASPFLASMMMQQQAQYAGDGLLQGAGGWYGKLAGERERLSGGVPAEISSTRHCMDHEASFWGF

SEQ ID NO: 279337 - protein, 214 aa, Zea mays
  Clone ID: MRT4577_186335C.1.pep
MDAALLVTVLVPAVAALLVLGSGAASASPPRAFFVFGDSLVDNGNNNYLMTTARADAPPYGIDFPTHLPTGRFSNGLNIPDIISEHLGSQPALPYLSPDLRGDQLLVGANFASAGVGILNDTGIQFVNIIGIGQQLHNFQDYQQRLAAFVGDDAARQVVSNALVLITLGGNDFVNNYYLVPFSFRFRQFVIQDYVPYLISEYSKILTRLYELGA

SEQ ID NO: 279338 - protein, 226 aa, Zea mays
  unsure (1)..(226): unsure at all Xaa locations
  Clone ID: MRT4577_186336C.1.pep
MDAALLVTVLVPAVAALLVLVLGSASASASPPRAFFVFGDSLVDNGNNNYLMTTARADAPPYGIDFPTHLPTGRFSNGLNIPDIISEHLGSQPALPYLSPDLRGDQLLVGANFASAGVGILNDTGIQFXQQQRQIRGRRVVACRSRTTGIQQYVLXVAAYTAELTFVITYVRRGQVNIIGIGQQLHNFQDYQQRLAAFVGDDAARQVVSNALVLITLGGNDFVNNY

SEQ ID NO: 279339 - protein, 39 aa, Zea mays
  Clone ID: MRT4577_186337C.1.pep
WPYLPYRDGEIAQQKYSELTKGMPSLRSERYYTPFKEDP

SEQ ID NO: 279340 - protein, 61 aa, Zea mays
  unsure (1)..(61): unsure at all Xaa locations
  Clone ID: MRT4577_186338C.1.pep
VSPINSLIFCVRHLLFIQVIHXMVISAFGYVHTIATFEMAAGFHALIQYTDADTASAAREA

SEQ ID NO: 279341 - protein, 54 aa, Zea mays
  Clone ID: MRT4577_186339C.1.pep
WARCNLTFPGHDRPVSRGILLEAKHSSWKTDFVQEQERMSLLFRVKDHRLLTIL

SEQ ID NO: 279342 - protein, 71 aa, Zea mays
  Clone ID: MRT4577_18633C.1.pep
LLFFYIYFFFWVFFNSNFLVTPLQKNASGGPMGGHKKYVWGRRGTHLQTQEHPPSRQNPLAGQRQSRSHQK

SEQ ID NO: 279343 - protein, 238 aa, Zea mays
  Clone ID: MRT4577_186340C.1.pep
MGSVSGQTRIATMNLSLSSSEKSSNNRSSSLLNPKNAVSDSYGVSSKCSTFLRGQFQRIQLSYTRHTRPLPKRAGHVVSPSCVMPLTEENVERVLDEVRPALMADGGNVALHEIDGLVVVLKLQGACGSCPSSSMTLKMGIESRLRDKIPEIMSVEQFLEAETGGLELNEENIEKVLAELRPYLSGTGGGGLELVEIDGYIVKIRLTGPAAGVMTVRVALTQKLRENIPSIGAVQLLE

SEQ ID NO: 279344 - protein, 94 aa, Zea mays
  Clone ID: MRT4577_186341C.1.pep
YISRQRIHWHGEERGMHTQGRYAQEEVGARDLKAGLMNAVPLVGRYMLKVLYAHGVGTVSHDYLEVVLELFDNLLFWSRQHSAIDSKKTRIILT

SEQ ID NO: 279345 - protein, 56 aa, Zea mays
  unsure (1)..(56): unsure at all Xaa locations
  Clone ID: MRT4577_186342C.1.pep
LKAPKTARLERFEGPRKIKLLPYPWTPKSGLVTAALXLKRDPKKAKFKSVLGKLSP

SEQ ID NO: 279346 - protein, 51 aa, Zea mays
  Clone ID: MRT4577_186343C.1.pep
RLTYSSVSAAYYRGFIQFILGQDTLFGKGPREKGEEHFFGTDAPKRLTGLF

SEQ ID NO: 279347 - protein, 183 aa, Zea mays
  unsure (1)..(183): unsure at all Xaa locations
  Clone ID: MRT4577_186344C.1.pep
MDKLRVHRCTGDAVEWSPSPIVALAASPCASQVAAAREDGSLELWLVSPGSVGWHNQLTIQGNDESRVTSLVWGRRGGEATGRLLSSSVDGXSVCEWDLFYLQQKIVLDTVGIPIWQMAIEPSVDAKNTENNSSEFAVNGHPNQNDSSDSDLSNIDDGDNSEDEDGSTNTISSYHVNDFQRLA

SEQ ID NO: 279348 - protein, 49 aa, Zea mays
  Clone ID: MRT4577_186345C.1.pep
MNKKKVVAVILGLLGSLTAIHFMTLGGFCRPDDIHRQIGTGFGGRLWIL

SEQ ID NO: 279349 - protein, 126 aa, Zea mays
  Clone ID: MRT4577_186346C.1.pep
WPYVVHGHYADAAEAAAHLASALNVPMVMTGHSLGRNKLEQLLKLGRMPRAEIQGTYRIARRIEAEETGLDAADMVVTSTKQEIEEQWGLYDGFDLMVERKLRVRRRRGLSCLGRYMPRMVVIPPG

SEQ ID NO: 279350 - protein, 89 aa, Zea mays
  Clone ID: MRT4577_186347C.1.pep
FFFFFFFFFFFFFFIIMGIQSYIRLKRIQDNLPYVRVRFHSLASFFAARHLYAGFSVVATSANWVTTHRDEHAKFFEISRCSIPGDWAF

SEQ ID NO: 279351 - protein, 65 aa, Zea mays
  Clone ID: MRT4577_186348C.1.pep
SRSVFSPCRDSPSYTSKYGSGHSIVPCSSFLSSLFSTCVPVINLPHSSFDSVRLNTCLSNELEPN

SEQ ID NO: 279352 - protein, 60 aa, Zea mays
  Clone ID: MRT4577_186349C.1.pep
PSFFFFLIKLEQIIKDPITNRRLQYRCDKLPIVIFLTETKFQSQKITKYHMSLGLITTSF

SEQ ID NO: 279353 - protein, 150 aa, Zea mays
  Clone ID: MRT4577_18634C.1.pep
LTSVLAAQNTGRQGHFLLAASSSPTPLSLFVLFFFSFLILACGHLLSLYSFFFFNFLLQPHKKQGPPGSICSWPTAPQCFVRVSISLHFLFTSVLVSMFGRHCALISRNFMSTGLRRPCRQRAHPFGRVSCCRLGSDGGPSTTGQKKSVS

SEQ ID NO: 279354 - protein, 108 aa, Zea mays
  Clone ID: MRT4577_186350C.1.pep
DEFVSNKVLRAPPPRIKVKPIQKKEPVEENPTPPKRVFQDRQYQVHAPIVRKKKTRKVPTPPLLKTELFHQLKFPVKPADIKKKKESLIAREDLERARSNPQISNYLA

SEQ ID NO: 279355 - protein, 88 aa, Zea mays
  Clone ID: MRT4577_186351C.1.pep
GSVLLYYTSTEWFPIRGEWWWWCFHLSFCPGGPSLILLLLSSLFVCLFVCVLSGAGSVKCQEPEQCVCVSKPLRQKCRSHSDSNARLD

SEQ ID NO: 279356 - protein, 69 aa, Zea mays
  Clone ID: MRT4577_186352C.1.pep
SWKGPWPCEWPLGLLILHLRVPCSKHLGNVVSAPPGSGGYPLVIACKFFINTRVGGAFPGQKNFLWHLQ

SEQ ID NO: 279357 - protein, 83 aa, Zea mays
  Clone ID: MRT4577_186353C.1.pep
EEDLKRPNHKQLGRELSISGTSRLQPQTFKFQSLTATYGGPNEALHTYSTTMKTDANRITLEESNEAYTTTVKATHRILCGIV

SEQ ID NO: 279358 - protein, 120 aa, Zea mays
  unsure (1)..(120): unsure at all Xaa locations
  Clone ID: MRT4577_186354C.1.pep
PPPERGRRANNGKQGGKPPGPKTTGXDAVTASEAXVVADRGSRAGEAAGPRAGTRVGGPPPRAATSWRAVAKGRAGPPATFVAGAAVEATASPWGERXPSAGXRRREASTPSHLWGAVRT

SEQ ID NO: 279359 - protein, 139 aa, Zea mays
  unsure (1)..(139): unsure at all Xaa locations
  Clone ID: MRT4577_186355C.1.pep
MENAKSEAAVKDEGMLKFGDMQPKRLHRFIVFKMDDKYKEIVGDQVGDRDTSYEDFTNSLPENDCQYTIYDFDFVSAKDXTKSRIFYILGSPSSDKGKNKMLYASSNXNSRRGLNGIQVXVXGTDAGEIXLDEIKDRGR

SEQ ID NO: 279360 - protein, 600 aa, Zea mays
  Clone ID: MRT4577_186356C.1.pep
MARRRNPSVVESDSSSEQEIHEETLPRSRSKRGRGSGNVMQGGEASGSHGARGRTARNPYGRSRPAANPHAWEPTSDDDGGKDDEIDLPSAHAPVIRGLVLHRAEARRAGNEPVTDFTASGGFALLQDIRFQNPALRIRDARIDGNRFWTLHHVDFYNTVILPKKHQPILHQRYINWEGCEAIGDPEMTQALRACERKKMKDIMTFQYDWNDEVIAQFYSTLWVKLADEDSPYNYPYLNFYIEGSWYKVSYRRFAHILGFTDNDISGDKIKIHDFRQPTRDEARDLHLSKSGKYWESTNVHKYYRYINSLSRMTLIPKGGNQMNILGESKVLLSFMKPSSSESINVFDMIWQEIIHVACFPLKGCLHAPFIMKMIEVVTQFRYDKSTRHQSYTPFWIDPNNPAGRLRKAPSSSRAHTSAGPSAGPAAVAAGASRPSPGRGSPTPRGRGRGRGMGARLAHGIAVFFSMCRNISVDVHELTRHQRETDDNLRRQASTMGMPFAPRSPDVPLHPPPPEINEWHQQAYEVPFMSAEDEEEETYFDDHEQFAPPPYYGDPGQSSSHPPPQDPSGSAPPLDQSGEEHFASHLAHHFFAPHQPPPNW

SEQ ID NO: 279361 - protein, 415 aa, Zea mays
  Clone ID: MRT4577_186357C.1.pep
MAQQRMVLEVIHLDHANVSKMELKERLAKMYKVKDRNTIFVFKFRAGSTGSGLIYDNLDSKKFEPKYCLIWVCCRLALPFVALFHIDMPAILRPAPIPSPVSTFSVRPTATRITVRKMGEVAPLIPATRRRTMSRKAAVAVEADRPAEDVSEEKTLKITIALNQEAEAVAIASKEEKGLQDEPKGEKEDKKTLVERYIVKETQITITTMNCSISRSEADIGVKRKKPNESLYEKKPEEPTLVLTSLDYSIDDLFILYRTIARCLTQLFAKDITLDEKQELDEALQREISKERSSKLEKRSRGPPAVAGHMSLTTSYCKTKAPKNVAVASSLAAQLYGLDILAVSIQLEKSVVLFKPKFLTAGEGNASSRHGTFVTAGVVTTTTQKSLCGPPGTMIFYRIGEKEINKQRKKAMNDF

SEQ ID NO: 279362 - protein, 173 aa, Zea mays
  Clone ID: MRT4577_186358C.1.pep
RTILKFIYLLHYYYYCFFYQFWALHERRLPGRDGWTASAVNAAPMRGFTTPRLPPGPRKRLGERRIGVPPAAVPSCPPRLASTNSTQGQGVVQQRGPREVGGCRHKEREAEHHGRRSRGLEGGGRRGLLCVNCRIRDIDSTGDEAERGPSAGMRPPWMGLCRRPWHHYYPGLG

SEQ ID NO: 279363 - protein, 129 aa, Zea mays
  unsure (1)..(129): unsure at all Xaa locations
  Clone ID: MRT4577_186359C.1.pep
PKSFGIPNLPKGFIATGGASSNESFLKWVXGIFGLPVFPVQKLNLAFLGPAFKIPPGWFFNAQGSFVPFWGLYQGNLEKPPLGLKLAVPAGAKKQARGLPQKDPPLFGKKMGFENPLVEKIGRFLEKNL

SEQ ID NO: 279364 - protein, 76 aa, Zea mays
  Clone ID: MRT4577_18635C.1.pep
MPRDRDEPAAVRVYTVCDESRYLIVRNVPSLGCGDDLASLFGTYGPVEECTPMDAEDSEPYTDVFFVKFSQVNNAR

SEQ ID NO: 279365 - protein, 106 aa, Zea mays
  unsure (1)..(106): unsure at all Xaa locations
  Clone ID: MRT4577_186360C.1.pep
ACPPLETEAQRWRGALLPDCCSQQSVRPVLKAVCQAKDEPLAGLGGMPSLFWDLGPKRCQWCQTTPTSEGDSLAKSGVFTKDXASLKRKVPTEWIWGGSGCVCVGS

SEQ ID NO: 279366 - protein, 41 aa, Zea mays
  unsure (1)..(41): unsure at all Xaa locations
  Clone ID: MRT4577_186361C.1.pep
EAXNTTIDPLSKKDWNDLIAPAMLPIRNIGKTLVTRTQGTT

SEQ ID NO: 279367 - protein, 134 aa, Zea mays
  unsure (1)..(134): unsure at all Xaa locations
  Clone ID: MRT4577_186362C.1.pep
PDPTLAAGDSTXXSSHLRTSPASYTVGYTEGVARTGSXRSQGXTRAWRDAASKAHARXVGSADGGRXKEGIAPRXRVRXXRALXXAATAHSGAMXXAXXXXVXPPRVXRGLRHAGXWXVVSRGRGXEADEGSSR

SEQ ID NO: 279368 - protein, 392 aa, Zea mays
  Clone ID: MRT4577_186363C.1.pep
PASATRPVAGEEAAASAAASPSASASPTRAAGQGQADQCERRLWVKDRSRAWWDRCNSADYPEEEFRRAFRMGRGTFDMICDALGSSVAKEDTMLRAAIPVRQRVAVCVWRLATGEPLRLVSKRFGLGISTCHKLVLEVCAAIKSVLMPRFLQWPDADAAARFKEGFERASGVPGVIGAMYTTHIPIIAPKISVAAYFNRRHTERNQKTSYSITLQGVVGPDGAFTDVCIGWPGSMPDDQVLEKSMLHQRAAAGMMHDSWLVAGASYPLMDWVLVPYTHPNLTWTQHAFNEKVAELRRVAVEAFARLKARWACLQKRTEVKLQDLPVVLGACCVLHNICEIRGEEVDPAIRCELVDDETTPENPVRSETASRARDNIAHNLLHRGLGGNTFF

SEQ ID NO: 279369 - protein, 102 aa, Zea mays
  Clone ID: MRT4577_186364C.1.pep
ILSIIIFHLLTTMMVTGMSLHNRGAMTIRTDYTQLGISNHTTYVALNPCICEPFPWSPPLHEQVRATREYITLPGVLLCQEGTCYSRHLSNPSVRLSLHVCG

SEQ ID NO: 279370 - protein, 113 aa, Zea mays
  Clone ID: MRT4577_186365C.1.pep
GTQPSSISCAQAASMSASADSVAPEDCLPRQLPEILGDLADRTGDGDSSASITADSSGLQHELCGSFGWLQFFFGRKDKGLEGGEPSERCGKAHKRESRLHCSGCNPILFLTK

SEQ ID NO: 279371 - protein, 111 aa, Zea mays
  unsure (1)..(111): unsure at all Xaa locations
  Clone ID: MRT4577_186366C.1.pep
YWGGTGRHMTSNDHQAEVRHEHNYLPHXTSISXVKQLTFWDTTLHSGLHPLFPDIKTMLIKRELSFPHLPSIDDLYSDSIPLTAQTTMGTIRSMLPCLVNLVEDTTKYVLR

SEQ ID NO: 279372 - protein, 85 aa, Zea mays
  Clone ID: MRT4577_186367C.1.pep
MESTVNPKAYPLADVQLTMGILDIIQHSTNYKQLKKGANEAMNTLNRGISEFVVMAADTEPLEILLHLPLLGEDKTKSSHTRGDD

SEQ ID NO: 279373 - protein, 99 aa, Zea mays
  Clone ID: MRT4577_186368C.1.pep
FGSRDVTHVIFLSFACARHPVDLKCAGNHNVDCLRCGRAASSGLLRCTASRVEPVLMSMYGGISTNVGRCSLILSDSLGYLLKQNYHTECRAGPYDRPQ

SEQ ID NO: 279374 - protein, 79 aa, Zea mays
  Clone ID: MRT4577_186369C.1.pep
DRPVFLLCLLHYSSSAALHALGLEAPSMRCGLSIQVHDDGGRWRSHSWPARRSCSFRRAPRFDLNFGFCTYSVGSPLHR

SEQ ID NO: 279375 - protein, 68 aa, Zea mays
  Clone ID: MRT4577_18636C.1.pep
RKPGETTPLKPVVNNLTGVLSLFHGREVGWNGTPNQACKSVCGTQENTAPPWCKGGPPVSSGFQPCPP

SEQ ID NO: 279376 - protein, 143 aa, Zea mays
  unsure (1)..(143): unsure at all Xaa locations
  Clone ID: MRT4577_186370C.1.pep
SKTRAMPSGCKLRTHRMNQRRADKAYKNSRFGHXESXKPFAGTSHAKGIGLKNIGIEVRHPNSAIRTCARVQLAENAKKIAAFGPNDVCLNYIEENDEALIAGFDRKEHPARDIPGXVRMQAVTVSGECLLGLFKENKEKPMP

SEQ ID NO: 279377 - protein, 63 aa, Zea mays
  Clone ID: MRT4577_186371C.1.pep
RGPPPPRPGRPKRNNTWEELWALARVPSWGGPAIIHGALNFPRNVAGIQTFSLYFSIQHNSVI

SEQ ID NO: 279378 - protein, 284 aa, Zea mays
  Clone ID: MRT4577_186372C.1.pep
GGSAYPRDWDYARLRAVADKVGALLLCDMAHISGLVAAQEAANPFEYCDVVTTTTHKSLRGPRAGMIFYRKGPKPPKKGQPEGAVYDYEDKINFAVFPSLQGGPHNHQIAALAVALQQTMSPGFKAYAKQVKANAVAIGNYLMSKGYKMVTDGTENHLVLWDLRPLGLTGNKVEKLCDLCHITLNKNAVFGDSSALSPGGVRIGAPAMTSRGLLEKDFEQIGEFLHQAVTICLNIQKEYGKLLKDFNKGLVNNKDIENLKVQVEKFADSFDMPGFTLESMKYKE

SEQ ID NO: 279379 - protein, 71 aa, Zea mays
  Clone ID: MRT4577_186373C.1.pep
NRCNNCIFNGVNPYISKVLQIEFIVHTLVCCSQLDQNDSRSYLPGHLYSILWCAAACWSKGTPRALAITLD

SEQ ID NO: 279380 - protein, 88 aa, Zea mays
  Clone ID: MRT4577_186374C.1.pep
LLPVSSMSPGPTQSLDTRTGSCTGPITSLASSQCSASGLHWYKHAGKHSPSVFVPRGLPLGHKCWIGWVHITYTWRGGRVVAAKTIRL

SEQ ID NO: 279381 - protein, 118 aa, Zea mays
  unsure (1)..(118): unsure at all Xaa locations
  Clone ID: MRT4577_186375C.1.pep
MYKSWLAQTQYSSDGKPSNEANGCNFQSLSLTMSPSVQNGVGAISSVQVNEDSRKRVMAKSHAREPVPRKSIDTFGQRASQYRGVTRHRWTGRYENNLWDNSCRKEGQTRXGRQVSLV

SEQ ID NO: 279382 - protein, 94 aa, Zea mays
  unsure (1)..(94): unsure at all Xaa locations
  Clone ID: MRT4577_186376C.1.pep
SVSKQIKEKRLKFRQFALRWFKWSVIRNVCCYLVRRMWDSYIAECYYLRDFLVXISASFLLTXSDTLHKLDFHEMVMYLQHLGIRTLAHDDLEI

SEQ ID NO: 279383 - protein, 95 aa, Zea mays
  unsure (1)..(95): unsure at all Xaa locations
  Clone ID: MRT4577_186377C.1.pep
TVKLQIWDTAGQERFRSVTRSYYRGAAGALLVYDITSRETYNSLAAWLTDARTLASPNIVVILCGNKKDLDPEREVTFLEASRYXAQENELMFLE

SEQ ID NO: 279384 - protein, 83 aa, Zea mays
  Clone ID: MRT4577_186378C.1.pep
TSYYNLSPSFTFLLFLPLQRSFFYNSMAIAYPVLYVTLLSSNYLKKVSLFSRTRIYSLASISGFYLLIPSHSTQTYHINCFNP

SEQ ID NO: 279385 - protein, 59 aa, Zea mays
  Clone ID: MRT4577_186379C.1.pep
HILFFVGVTTNYTLAALTHFQTSKSTDQIFCRQVQGQYFTFVQKNECVLLLQQLTMILF

SEQ ID NO: 279386 - protein, 138 aa, Zea mays
  unsure (1)..(138): unsure at all Xaa locations
  Clone ID: MRT4577_18637C.1.pep
VIDYKLTYPSGTATAMGINSLHTGTGAELADKQVRCLGKYLSISFIWNCFKWFFSGVGDSCGFDNFPSLGLAAFKNTXGDWYPADLGSNDFKGLYGYKVFISVSVILGDGLYNLIKIIYATIKEIMNARAKQGRLPLA

SEQ ID NO: 279387 - protein, 69 aa, Zea mays
  unsure (1)..(69): unsure at all Xaa locations
  Clone ID: MRT4577_186380C.1.pep
TPSPPSFTTTRGPSFGPTFPSPKPSPPPTFSLTRITPKPSLPPPHPQXQSINAHTIKWREGQPKLPPFV

SEQ ID NO: 279388 - protein, 35 aa, Zea mays
  Clone ID: MRT4577_186381C.1.pep
RIQKFLISSSETFRYFNRKNYVTPCNITQYNQTIP

SEQ ID NO: 279389 - protein, 52 aa, Zea mays
  Clone ID: MRT4577_186382C.1.pep
MAPKKPSATGAAALQPLDHNQETVSLREARSQKRKAVSPTPPEDEIDQEIRN

SEQ ID NO: 279390 - protein, 293 aa, Zea mays
  Clone ID: MRT4577_186383C.1.pep
MEFIDSFCTRAGASRNGSGLQYFGRSRKKHVQVKMLYRPNGTLGPAEAPKPRRRKQSDEEVPHNLHRLMNSSPRISHAGLPKRPRTTAAGDAKNGAVAPGGGNGAGVCNGSSVQVPTEAGGWLGNGCSEAKSHERTVPLLNHEVSGEDSSRHAAKSSGGIADNGVGVGNSSAGQKVKVKRKELLLNQNTGKEREEPEEATQTEPFVRSITLDESKPNSKGKGRSNPNGNGTERLAGPADTKGRGEGVTPPKITSVWKIKKLKTSHCSSDSKVLHKVCVPPPTAAETSASVKAD

SEQ ID NO: 279391 - protein, 134 aa, Zea mays
  Clone ID: MRT4577_186384C.1.pep
GRPWHLKLLPLCAPIMYGGEWVTSCSPAGSKRHEAVRHGSKRLLQWSSAMMADGYASRRPWDGMTPARHGHKHGVRKCVVRATRVPSAMHATCSLRCRQAREAPCVGVLPLPWHPPCAMEKKTASLLRRLYKNE

SEQ ID NO: 279392 - protein, 72 aa, Zea mays
  unsure (1)..(72): unsure at all Xaa locations
  Clone ID: MRT4577_186385C.1.pep
TSCSGESCLTESPCRGLEAASPHLQGKACLGLSFFQNLLMWGASGSVLSFILLNQNLXMFDKYSSCSDDVGC

SEQ ID NO: 279393 - protein, 100 aa, Zea mays
  Clone ID: MRT4577_186386C.1.pep
PPERVFKQRRAPFPPRKCFKGKLLKKVLANANFPPKPWGAQRRAKRLEKIGGETTKIKGLVFFFKQKLGLARETIFFSPFWGGTETVEKFPVFINKTLWG

SEQ ID NO: 279394 - protein, 80 aa, Zea mays
  unsure (1)..(80): unsure at all Xaa locations
  Clone ID: MRT4577_186387C.1.pep
FFFFXXXXXXXXXXXXXXXXXXXXXXXXXXXXXXXXXXXXXXXXXXXXXXXXXXXFLPRLYNLAYRLYKHLMTCLWTTII

SEQ ID NO: 279395 - protein, 70 aa, Zea mays
  Clone ID: MRT4577_186388C.1.pep
VSPSVLNVALYTPAVLHHDDTIEAGWILVALVVVDLSPAPLTADQYSCRLPTTSLSARTGTTSRPESQSP

SEQ ID NO: 279396 - protein, 45 aa, Zea mays
  Clone ID: MRT4577_186389C.1.pep
DVIPIRTPLWCEHNGAQDTSQRCMLPIGYTFLSLTIGKLSSQLTW

SEQ ID NO: 279397 - protein, 70 aa, Zea mays
  Clone ID: MRT4577_18638C.1.pep
QRRVLFFFFFLFFFCKNRTIFFLHSSSSRKREESRVDEDDNDGALKETGRRKDGNKNKRPKGKERQSRRN

SEQ ID NO: 279398 - protein, 30 aa, Zea mays
  Clone ID: MRT4577_186390C.1.pep
PNPQGLALILLDIDQKLRQQYSSFKLKAQR

SEQ ID NO: 279399 - protein, 114 aa, Zea mays
  Clone ID: MRT4577_186391C.1.pep
QEAPTTRASQKPHRPPDTCRVACSKSPQGAPISSTSVALSGQVTLFAAGSHQIARDLPTTIASTQPLRPGSTTTREAYLRRSVPVIQHCVLIRPRAAAFCPRRCSSPVAFAGKV

SEQ ID NO: 279400 - protein, 60 aa, Zea mays
  Clone ID: MRT4577_186392C.1.pep
NKNSKPIFFLDVHDPQFTNSSVRAHKLTTKNAKGEKLSNGRSPLEEKIGDLNAFAKQQHP

SEQ ID NO: 279401 - protein, 105 aa, Zea mays
  Clone ID: MRT4577_186393C.1.pep
GDRRPLRRPAPASLRSGARCCVCCCSRARALSSRASSFPGASSSSSSRFSGEVGEAPPLTASASGMGRSDRRSASGLWLGFGWEGEAGCREPKAKGDSGGGEKGI

SEQ ID NO: 279402 - protein, 42 aa, Zea mays
  Clone ID: MRT4577_186394C.1.pep
RTSTLNKLDYEQNSMLWHRATSLEIQAISNSGLVCFGTAQLQ

SEQ ID NO: 279403 - protein, 271 aa, Zea mays
  unsure (1)..(271): unsure at all Xaa locations
  Clone ID: MRT4577_186395C.1.pep
MTSMTAATDVKPAPAAGGPQLKLLVDRRSRRVLYAEARKDAVDFLIGLLRVPAGLAARALAKRGEPAPGSLGSLYAGALALDDAFFVSSSPNRDALLSPSTLPSAALPLLLGEGAVPPAPAPPPPQRFFRCNAYAPPCRGNPTNVTDVAGLPCPACRQPMTMXAAAARGRARQAAGACAGAGGRGXGAGGYVKEVVTYLVMDDLTVAPMSTISAIMLLKKFDVKDCSALEETTVELGTKEXLMLLKAXSLQSSTALTDVFSGAVSIDRISG

SEQ ID NO: 279404 - protein, 233 aa, Zea mays
  unsure (1)..(233): unsure at all Xaa locations
  Clone ID: MRT4577_186396C.1.pep
LADDXSLEVQLSRDNVKAITQDLIIAGXLIKNPKILAKATEELNHVIGPNRLVTESDLPRLPYIEALFKETMRVHPAAPMLAPHVAREDISVDGYDVLAGTVVFINVWGIGRDPALWDAPEEFRPERFLDSKIDVRGQDFQLLPFGSGRRMCPGFNLALKVVALSLANLLHGFEWRLPDGVTAEELSMEEAFKLAVPRKFPLMAVAEPRLPARLYTGACPTYSFGGCTSGDST

SEQ ID NO: 279405 - protein, 79 aa, Zea mays
  Clone ID: MRT4577_186397C.1.pep
RSLRSCTRGRQQAVVEREVEKMKSSTLLAILVLQALSVPAGLAKRTSRANNNKPFLFRQLHSWSGRVELRRTPQQVRRQ

SEQ ID NO: 279406 - protein, 519 aa, Zea mays
  Clone ID: MRT4577_186398C.1.pep
MEQATWAAFLGIVLCAALFHRTFLARGRRRANNPPPGPKPWPIIGNLNLVGELPHRSMNELSKRYGPLMQLRFGSLPVVVGASVEMAKLFLKTNDAAFSDRPRFAVGKYIAYDFSDLLWAPSGPCLRQARRICATELFSATRLESFEHIRDEEVRVMLRQLRQAAGRTVRLRDYLQMLTLGVISRIVLGKKYVQEEAADGEGDSASAMTPAEFGEMVDEFLVLHGVFNIGDYIPWLDWLDLQGYVARMKRMKARFGRFLERLLDVHNERRLREGGNFVAKDMLDVLLQLADDTSLEVQLNRDNVKAITQDLIIGGTDTSAKALEWAVSELLKNPKVLAKATEELDHVIGPDRLVTESDLPRLPYIEAVLKETLRLHPAAPMLAPHVAREDTSVDGYDVLAGTVVFINVWAIGRDPALWDAPEEFRPERFFESKIGVRGQDFQLLPFGSGRRMCPGINLALKVMALSLANLLHGFKWRLPDGVTAEELSMEEAFQLTVPRKFPLEAVVEPRLPDRLYTGA

SEQ ID NO: 279407 - protein, 517 aa, Zea mays
  Clone ID: MRT4577_186399C.1.pep
MEPATWAVFLGIALCAAAALFLSRGRRPVYNPPPGPKPWPIIGNLNLMGELPHRSMNELSKRYGPLMQLRFGSLPVLVGASVEMAKLFLKTNDAAFSDRPRFAIGKYTAYDFSDLLWAPSGPYLRQARRICATELFSATRLESFEHIRDEEVRVMLRQLRQAAGRTVRLRDYLQMLALGVISRIVLGKKYVMEEAADGEGDSAPAITPAEFREMVDEFFALHGAFNIGDYIPWLDWLDLQGYVARMKRMKARFGRFLERVLDVHNERRLREGGNFVAKDMLDVLLQLADDTSLEVQLSRDNVKAITQDLIIAGTDSNANTLEWAVSELLKNPKILAKAMEELNHVIGPDRLVTESDLPRLPYIEAVLKETMRVHPAAPMLAPHVAREDTSVDGYDVLAGTVLFINVWAIGRDPGLWDAPEEFRPERFVESKIDVRGHDFQLLPFGSGRRMCPGINLALKVMALSLANLLHGFEWRLPDGVTAEELSMDEAFKLAVPRKFPLMVVAEPRLPARLYTGA

SEQ ID NO: 279408 - protein, 668 aa, Zea mays
  Clone ID: MRT4577_18639C.1.pep
MGSEGEITGPLLASGAGAPAPEAVPPWREQVTARGLAVSAVLGVLFCLITHKLNLTVGIIPSLNVAAGLLGYFLVRTWTAALERFGVVSKPFTKQENTVIQTCVVACYGLAFSGGFGSYMLAMDQRTYELIGPDYPGNRAVDVKTPSLGWMIGFMFVVSFLGLFSLVALRKVMVIDYKLTYPSGTATAMLINSFHTTTGAELADKQVRCLGKYLSISFIWNCFKWFFSGVGDSCGFDNFPSLGLAAFKNTFYFDFSPTYIGCGLICPHIVNCSTLLGAIISWGILWPYISTKAGDWYPADLGSNDFKGLYGYKVFISVSVILGDGLYNLIKIIYATIKEIMNARAKQGRLPLAQVQDGDEGSNLSAEEKHLNETFIKDSIPPWLAGSGYIGLAAISIATVPMIFPQIKWYLVLSAYVVAPLLAFCNSYGTGLTDWNLASTYGKIGLFIFASWVGQNGGVIAGLAACGVMMSIVSTAADLMQDFKTGYLTLSSPRSMFVSQLIGTALGCVIAPLTFWLYWSAFDIGNPDGAFKAPYAVIFREMSILGVEGFSALPQHCLAICSFFFIASLVINLLRDVTPKNVSRFIPIPMAMAIPFYIGAYFAIDMFVGTVILFVWERVNRKECDDFAGAVASGLICGDGIWTVPSAILSILRIDPPICMYFKPSLSS

SEQ ID NO: 279409 - protein, 53 aa, Zea mays
  Clone ID: MRT4577_186400C.1.pep
MLPASNLARNSQPSQFPPPKEKPSIMIGWDPKLWFSCKEKHVFVCPLQCKNFC

SEQ ID NO: 279410 - protein, 121 aa, Zea mays
  Clone ID: MRT4577_186401C.1.pep
VAWVFFFFFVLVFFYFSSWQCLPSPVWRSAIPFTLLLTLATLGAGDGGSFLFLISFVGGGGCLILLLGPRRWVACFLADLFVSLLFRPCLVRGVSLALLFCYVDALFRLCCIAAVRLCVNV

SEQ ID NO: 279411 - protein, 71 aa, Zea mays
  Clone ID: MRT4577_186402C.1.pep
SPTHVVLHTRRFARILYVEVLAMAGVSDGGVRKHTSRRSVDKRDPETERLTTAVYGAFSSGWDAWLYCIRS

SEQ ID NO: 279412 - protein, 315 aa, Zea mays
  Clone ID: MRT4577_186403C.1.pep
MLRNLLWPTSKHDVYLVQSYSVTHWSALLRRGREVLNVAGRLAPTHNVKGAGPLSRVQISAMAVKDNLMVAGGFQGELICKYVDRPGVAFCTSLTGGSSSITNAVDIHQAPSGATRVMAANNDCVVRTFDAERYSLLTQLTFPWSVNSTSVSPDGKLLAVLGDSTECVVADPQSGKAVATLRGHLDYSFASAWHPDSRVLATGNQDATCRLWDARSLSEPFAVLGARIGAVRGLRFSPDGRFLAAAEAADFVHVYDAAAGYAGAAQEVDVFGEVAGAAFSPDGEALFVSVADRTYGGLLEFRRRRADRYLDACFF

SEQ ID NO: 279413 - protein, 47 aa, Zea mays
  Clone ID: MRT4577_186404C.1.pep
ILTPCKIFPPPIHFFAPPILVTSVGWAPCLFQGTFYCNHCNNQWACL

SEQ ID NO: 279414 - protein, 88 aa, Zea mays
  Clone ID: MRT4577_186405C.1.pep
PPPRKGAAHKLAPPLKGPAPHSLFEQVERVFLSPPLFPPVHRRKGVFGLINYVLYKLGEGSPLRGWSLFLISGKKRITSSPLCKKRFR

SEQ ID NO: 279415 - protein, 663 aa, Zea mays
  Clone ID: MRT4577_186406C.1.pep
MDRVRGSAFLLGVLLAGSLFAFSVAKEETKKLGTVIGIDLGTTYSCVGVYKNGHVEIIANDQGNRITPSWVAFTDSERLIGEAAKNQAAVNPERTIFDVKRLIGRKFQDKEVQRDMKLVPYKIINKDGKPYIQVKIKDGEDKVFSPEEISAMILGKMKDTAEAYLGKKINDAVVTVPAYFNDAQRQATKDAGVIAGLNVARIINEPTAAAIAYGLDKKGGEKNILVFDLGGGTFDVSILTIDNGVFEVLATNGDTHLGGEDFDQRIMEYFIKLIKKKYSKDISKDNRALGKLRREAERAKRALSNQHQVRVEIESLFDGTDFSEPLTRARFEELNNDLFRKTMGPVKKAMEDAGLEKSQIHEIVLVGGSTRIPKVQQLLKDYFNGKEPNKGVNPDEAVAFGAAVQGSILSGEGGDETKDILLLDVAPLTLGIETVGGVMTKLIPRNTVIPTKKSQVFTTYQDQQTTVSIQVFEGERSMTKDCRLLGKFDLNGIPSAPRGTPQIEVTFEVDANGILNVKAEDKGTGKSEKITITNEKGRLSQEEIDRMVREAEEFAEEDKKVKERIDARNQLETYVYNMKNTVGDKDKLADKLEAEEKEKVEEALKEALEWLDDNQSAEKEDYEEKLKEVEAVCNPIVSAVYQRSGGAPGGDADGGVDDDHDEL

SEQ ID NO: 279416 - protein, 665 aa, Zea mays
  Clone ID: MRT4577_186407C.1.pep
MDRARGSAFLLGVLLAGSLFAFSVAKEETKKLGTVIGIDLGTTYSCVGVYKNGHVEIIANDQGNRITPSWVAFTDSERLIGEAAKNQAAVNPERTIFDVKRLIGRKFADKEVQRDMKLVPYKIINKDGKPYIQVKIKDGENKVFSPEEISAMILGKMKDTAEAYLGKKINDAVVTVPAYFNDAQRQATKDAGVIAGLNVARIINEPTAAAIAYGLDKKGGEKNILVFDLGGGTFDVSILTIDNGVFEVLATNGDTHLGGEDFDQRIMEYFIKLIKKKYSKDISKDNRALGKLRREAERAKRALSNQHQVRVEIESLFDGTDFSEPLTRARFEELNNDLFRKTMGPVKKAMEDAGLEKSQIHEIVLVGGSTRIPKVQQLLRDYFDGKEPNKGVNPDEAVAFGAAVQGSILSGEGGDETKDILLLDVAPLTLGIETVGGVMTKLIPRNTVIPTKKSQVFTTYQDQQTTVSIQVFEGERSMTKDCRLLGKFDLNGIAPAPRGTPQIEVTFEVDANGILNVKAEDKGTGKSEKITITNEKGRLSQEEIDRMVREAEEFAEEDKKVKERIDARNQLETYVYNMKNTVGDKDKLADKLEAEEKEKVEEALKEALEWLDDNQSAEKEDYEEKLKEVEAVCNPIVSAVYQRSGGAPGGDADADGGVDDDPDEL

SEQ ID NO: 279417 - protein, 89 aa, Zea mays
  Clone ID: MRT4577_186408C.1.pep
TGMLLSQPSPTSPRCYWRRCPTWKRAWTAPHRTTPASRHGLLQLLEPPPERTAAVTTDEARRWWYGGIHAPPPGRRARPDREVAGGQRQ

SEQ ID NO: 279418 - protein, 158 aa, Zea mays
  Clone ID: MRT4577_186409C.1.pep
SGSCNWPPAWRRLAPFGRWDPRWPTGGRSSTGLTRPTFRPRGRLSFSGPPCPWRGRRLPPRWALVVPPPPKEEAIMEPPRFLGGPATRRVLRPPPTCVFQCSPCWRRHWQVPWRCNKQFRIIRPNSFCLFGGGPYVPFQTGKKFPPPPLGFLASSCFA

SEQ ID NO: 279419 - protein, 131 aa, Zea mays
  unsure (1)..(131): unsure at all Xaa locations
  Clone ID: MRT4577_18640C.1.pep
PQGEPWNAPSGRGSNGSWGPPGAPRSREXPGRXGXXXLQNALERFHPIPFPFPFPHSTRAQQNVSFCPPDAKFEKARPPLWVVPARAPPGCSASAFLHLFCYSRCMPVYASSDPVSPQKKKKKKKKKKKNT

SEQ ID NO: 279420 - protein, 67 aa, Zea mays
  Clone ID: MRT4577_186410C.1.pep
PTVREMDRPGSFIGDFLGTRGEADEHFSATGGNAGRVCATRSPAAPAVGFALRVPPRHRALKTPHPD

SEQ ID NO: 279421 - protein, 78 aa, Zea mays
  Clone ID: MRT4577_186411C.1.pep
FIHQKKKHTPPPTKLYSLKARSCRYQDTLFINLVLNNRQRSQCHHTLTQFPLMCTGDTLARIMYILMYHEAECSNQYP

SEQ ID NO: 279422 - protein, 126 aa, Zea mays
  unsure (1)..(126): unsure at all Xaa locations
  Clone ID: MRT4577_186412C.1.pep
MIACVKCVSALPKVGAMRYRNALRYNIQGITKPQIRRLWKTIDKKSISDIIYNESRGVLKIFLENXIRDXAFTYTEDARRKNVTRMXIVYAXQRQERTLYKVMDRAHLFHHLNSMTEVLSSDPSEL

SEQ ID NO: 279423 - protein, 141 aa, Zea mays
  unsure (1)..(141): unsure at all Xaa locations
  Clone ID: MRT4577_186413C.1.pep
FKNLPIHVPLKARALFSTVLISEVGNGSRTLTDRWLFGRRIIDIAPSLLDXIPKRIANKSTLQEALLNRRWIKDIKGALXVGGLVDYIQMWDLLSDVELQPDQDDKHIFSLGSDGCYSAKAVYEGLTLFVPPPRVWKTCAP

SEQ ID NO: 279424 - protein, 41 aa, Zea mays
  Clone ID: MRT4577_186414C.1.pep
RRGHTSQDVEGSPVDHPLRSISPSHRINHASTGQRCHVRRT

SEQ ID NO: 279425 - protein, 76 aa, Zea mays
  Clone ID: MRT4577_186415C.1.pep
GRVGGRVGCNSVFMISFFFFFLTKPQHLCQATVPKRKGKDKDRHTAMAYAHSYRKARSTLRPTHKHMAETRKNYFV

SEQ ID NO: 279426 - protein, 84 aa, Zea mays
  Clone ID: MRT4577_186416C.1.pep
RVGAGAGPGKKAEIWPYVPYSLVAHPYAAPAYDKKAPPGYVRRVDAVMPVSSTYGGPAAAAGPPQEERLATMFSDDNPNACSVM

SEQ ID NO: 279427 - protein, 147 aa, Zea mays
  unsure (1)..(147): unsure at all Xaa locations
  Clone ID: MRT4577_186417C.1.pep
VRTDPLYYTMRFIDGLRXKEEALESGRRRRIEPITNRTAWTQSGQSSESTKXNMCRVFWRNXGDTARHVSPIDRVVSLKSYRRAEGSLHRCAEKWAPGHKCATTVQLHVIDEVWDLLSQEECPKIATETIEQIFMAVSPKIVQIRAG

SEQ ID NO: 279428 - protein, 87 aa, Zea mays
  Clone ID: MRT4577_186418C.1.pep
AVCRPHSNLRVTEAGPLTLCYVWATVIMTPTVARAVPRRRVTGREYWTTPPEHSYMRSVSAYVATYSRALLRLDHCSPTVPHFLGHT

SEQ ID NO: 279429 - protein, 122 aa, Zea mays
  unsure (1)..(122): unsure at all Xaa locations
  Clone ID: MRT4577_186419C.1.pep
RKRQKXTKRTPTATQRDPGGTKSHRPTKRQDAPKRNGQKPKSKPSDSRKEHAEAXXATRRQTGTSXTPGQPPPTXEAQRRTAQETTPPPKDEPXXQKKKKMXXTREARRTSKGGQAEAPQPP

SEQ ID NO: 279430 - protein, 82 aa, Zea mays
  unsure (1)..(82): unsure at all Xaa locations
  Clone ID: MRT4577_18641C.1.pep
LXITIKRSFTLLFHTILAVSFNSSYXHLHYLLTDVPPHPNSLPDNVFLPDLPFNALPSNLKDVLFLPFDPIYNLNIYKSIDI

SEQ ID NO: 279431 - protein, 131 aa, Zea mays
  unsure (1)..(131): unsure at all Xaa locations
  Clone ID: MRT4577_186420C.1.pep
MSFGFLLPLKKRIERLHNAINRSMESIVHTXRYQGVVPIKVNQNKHFLHDKVRGVQQWNYGLEAGSKPELLIAMSCLPXRSXPKPNLICNGYKDXDYMAIALSXRAMGLNLIIVLEMEEELAICLDQYRKL

SEQ ID NO: 279432 - protein, 87 aa, Zea mays
  unsure (1)..(87): unsure at all Xaa locations
  Clone ID: MRT4577_186421C.1.pep
QKTRKGRGIGSGTGKTAGPGHKGPEARXTASLAFQGGQXPIRRRLPRRDSRPLSFHSTRGLGKCKLIKLENDSPNDTRDLKNSAMEQ

SEQ ID NO: 279433 - protein, 109 aa, Zea mays
  Clone ID: MRT4577_186422C.1.pep
TFFFFFFFFFFFFFFFLGTHDLQAAPLTPLTIAQDKIRGIKPREPQLYRLPFYTLPTKILCTQLFSKNEPISQRKRTPMLSRHHPKGKKENLVQKENHCYRSWWVLQMK

SEQ ID NO: 279434 - protein, 62 aa, Zea mays
  Clone ID: MRT4577_186423C.1.pep
AGYLRVQMMTLEAFIQPLINQEWELLKHGGTEILEDSSRKGSHETHARIHKPKQRSYIDTGP

SEQ ID NO: 279435 - protein, 68 aa, Zea mays
  Clone ID: MRT4577_186424C.1.pep
IESLVNLVARQELSRKQALSPFLGIATLSLPVGSGNLKKTQTESKIGHWLWDGPEDPQPFADLFLRWW

SEQ ID NO: 279436 - protein, 72 aa, Zea mays
  Clone ID: MRT4577_186425C.1.pep
AMRAPYESTAVSFPLCCLHNWTSPNKHLILDQRALFMLILYINNVSLLLKCLFQHMLKMTLCLIWRPWAHSL

SEQ ID NO: 279437 - protein, 72 aa, Zea mays
  Clone ID: MRT4577_186426C.1.pep
AAAESQFYPFFLKTSLLKRLARGFFFFFGPTEMDWGGDFGTVGRTTTRVVGALSAGWGLRPETCLGSFFKGH

SEQ ID NO: 279438 - protein, 112 aa, Zea mays
  Clone ID: MRT4577_186427C.1.pep
SPGTYGMLFFFLKGGVVFFPGLFIFPKEKFFLLQVFFLPPLPFFFFPPHTKVGGVFFFFPPPPIFFGGPKILLGWPFSFVSPPPSNCFAAWDNLRFPKKKKKKKKKFQLIKS

SEQ ID NO: 279439 - protein, 53 aa, Zea mays
  Clone ID: MRT4577_186428C.1.pep
LFCLNICNVSDVGRGLVHVVRRGLCVNVIEECSPPRKNVDPPVWSLKGGRTSG

SEQ ID NO: 279440 - protein, 60 aa, Zea mays
  Clone ID: MRT4577_186429C.1.pep
MSFRNQKRGGKDGGRTSSASDLGKPFINTGSWYRMPPAGGVMASRKSSLREGLGSSGFSL

SEQ ID NO: 279441 - protein, 50 aa, Zea mays
  Clone ID: MRT4577_18642C.1.pep
LVLSSTSIDQSMLITLCPLDPLQFFSVMCEPVGLFRNGSPPFTSTVCFDK

SEQ ID NO: 279442 - protein, 45 aa, Zea mays
  Clone ID: MRT4577_186430C.1.pep
HSSGYVHEVPDALVLTAFSVRCTQHHKRENERPLLGGGWLQLLEP

SEQ ID NO: 279443 - protein, 100 aa, Zea mays
  unsure (1)..(100): unsure at all Xaa locations
  Clone ID: MRT4577_186431C.1.pep
RALADSPIXGEIRGLGMIMGTEFTGNKSPTDLFPAEWGVGAIFGEECQKRGMLVRVAGDAIMMSPTLIMTPGEVDELVRIYGEALKATEERVAALQSKKN

SEQ ID NO: 279444 - protein, 55 aa, Zea mays
  Clone ID: MRT4577_186432C.1.pep
AVVTTQSTRGVAGDAIMMSPTLIMTPGEVDELVRIYGEALKATEERVAALQSKKN

SEQ ID NO: 279445 - protein, 42 aa, Zea mays
  Clone ID: MRT4577_186433C.1.pep
MGDEYLNAPGETYSVTLTVPGTYGFYCEHHQGAWVVGRVAVN

SEQ ID NO: 279446 - protein, 114 aa, Zea mays
  Clone ID: MRT4577_186434C.1.pep
CWRRRPRRSHYHSSYHSPSLSPSPSVSTRVVSMSGIMPRMEHPYAARSLVGYPCPQSGHPDAHLYSPVYFRSTSSSSCIGRWRVQSTTHSATYGHGKGPGPRSPHALRLAVRQG

SEQ ID NO: 279447 - protein, 81 aa, Zea mays
  Clone ID: MRT4577_186435C.1.pep
PTQATHTRSYCQSTLCFKCMTYRCRTGIMKTTRLMLSYLCRHGMVTYLIALMLTGEQTMPLCLTNTLTARRCYSTFLYSRA

SEQ ID NO: 279448 - protein, 80 aa, Zea mays
  Clone ID: MRT4577_186436C.1.pep
RHDRKSLYGSKKGSANPLGLSELDESLTYSSNAGRSEGINNEQLVDRRSTTHEAKRHHKQISNEGGDDGTYPRTCRSRPT

SEQ ID NO: 279449 - protein, 48 aa, Zea mays
  Clone ID: MRT4577_186437C.1.pep
SYKGALIFTQRSNSNNMTTSKRRYIIAPLIYITKCIILCVQMYTYLYY

SEQ ID NO: 279450 - protein, 169 aa, Zea mays
  Clone ID: MRT4577_186438C.1.pep
RSRLCPSVPAVGTSVISQQIVGQGSSRKIVKKQLSPKREDEERGNREMSYQRVPPEEPYPPPGHPRSQAHPYPPPPDVYPPPPRGHGHPPPPHGVYPPPPQGPYPPPQQPPPGYQGYFNDQQRPYYPPPHGEHQHNHHQGNQGSSSGFLKGCLAALCCCCVLEECCGCF

SEQ ID NO: 279451 - protein, 43 aa, Zea mays
  Clone ID: MRT4577_186439C.1.pep
LNPLYSTHSFCGNYYHSYGDGFKVMREFISYYYSISLLTLFIV

SEQ ID NO: 279452 - protein, 104 aa, Zea mays
  Clone ID: MRT4577_18643C.1.pep
GQRPPAGWPADGEVLQLLPRFREELPRVENRIPERNRAPRPKTRKGPPKVPYPLLFPDVGAKEKGTPAKGIPPSVPICQLPSPPLFFYCFVPKAPIMVVGLISL

SEQ ID NO: 279453 - protein, 71 aa, Zea mays
  Clone ID: MRT4577_186440C.1.pep
PVSELLFLMKVGTSPGTESVDVRPRRQLLNLNNQMPQRNLFSQRLQKAQGSLLTGYPWESVGTCDIWVHFS

SEQ ID NO: 279454 - protein, 60 aa, Zea mays
  Clone ID: MRT4577_186441C.1.pep
KSHVSLGLAIKHENMDIFMFSKLQATHGSSMFIFLIVRQSAHYNKCGNALSSQTSKIQYA

SEQ ID NO: 279455 - protein, 82 aa, Zea mays
  Clone ID: MRT4577_186442C.1.pep
KKWVFHALKEFQPMVPPKCLKAPWFFFPFINNPPYQWNNLVHGILDWIQFGFQRWIRKITPNPRKQKLNHRGQKKKIPSWGP

SEQ ID NO: 279456 - protein, 60 aa, Zea mays
  Clone ID: MRT4577_186443C.1.pep
LPAFFFSQAQVHLACAFLDLRQCNIFKQCLFFSTHPFSLFVPIDCSVFMFLSHDSSCPHV

SEQ ID NO: 279457 - protein, 63 aa, Zea mays
  Clone ID: MRT4577_186444C.1.pep
GTQLRSTGRKSVRPCWIDGHQKQANSDECGDRGINKVRRRWCLSVELLICNNNNKTGFNLIHS

SEQ ID NO: 279458 - protein, 147 aa, Zea mays
  unsure (1)..(147): unsure at all Xaa locations
  Clone ID: MRT4577_186445C.1.pep
RVRNSTAAATTDVASVRSLFWRKHVWRRRPTGRLTTAETSRSEGGPGRALAHRQRXRINWDGRRVATARPAPTTTRQQRRLQHHRIPLWSWVRRRPGPAGPAAELSCRPAPATVTLLGHVLTATGDLLEPPPACFPFLGKSSGRGAS

SEQ ID NO: 279459 - protein, 42 aa, Zea mays
  Clone ID: MRT4577_186446C.1.pep
CKLTAGLTVYYSMNIILPLPYVVPLFKGSVIYVWWTVSNACS

SEQ ID NO: 279460 - protein, 70 aa, Zea mays
  Clone ID: MRT4577_186447C.1.pep
NLRGSLLLSCFQEPQNGSGPCQSWHPPVTVAASGNHRLGGPRLNSVRAFLRKVFPDITFCFSTFLIFHVG

SEQ ID NO: 279461 - protein, 153 aa, Zea mays
  Clone ID: MRT4577_186448C.1.pep
CYDRKESLTVSVSWGYSVQVFKGNVLLPDLLAVQKTFVPWKRGRNVTDVYMFNTKHYPRDECKRGALFFLKGITSREGKTETTYNRQPPRKCPPDLIPLKSLRLIKVTSERLQLAPGKALRRHCCDIVPSSSDANIDINVRKCRDDELIAMHS

SEQ ID NO: 279462 - protein, 104 aa, Zea mays
  unsure (1)..(104): unsure at all Xaa locations
  Clone ID: MRT4577_186449C.1.pep
CSDDWSDMSWDLTSLDFAKQLPWFSALQFNLHANRITAETLTGAGVLSADWNINGDWLAVENTSELTFDLILSATCATXTEXQDTNWYVTGHQNGSDKVCKMFH

SEQ ID NO: 279463 - protein, 61 aa, Zea mays
  Clone ID: MRT4577_18644C.1.pep
MGTSKEQASKGYGWVEKKGKRAIYMGHLSPQGKGSAIKAALAQCANVGHGGVIGNYTIPYK

SEQ ID NO: 279464 - protein, 92 aa, Zea mays
  Clone ID: MRT4577_186450C.1.pep
GEGPNLLKLGSKEKCLGLGKRLGSRKKMPYQFSGVFPKGEVKFFPPKGGVYPERVNPERKGVGQNFRRMGKKVTPFEVKFTGKATLGYSPFR

SEQ ID NO: 279465 - protein, 65 aa, Zea mays
  Clone ID: MRT4577_186451C.1.pep
MATERWRLLASSEEPAMGNKMYAHGFGEGSPARKAAIKLPHFFNYIDVNSVLAQLESYNTEAYLE

SEQ ID NO: 279466 - protein, 128 aa, Zea mays
  unsure (1)..(128): unsure at all Xaa locations
  Clone ID: MRT4577_186452C.1.pep
RRARKPLMLNLMRLQGDPTVGIMGLLAENYMMLWNAGLSRPDDSPCYGGTLILTLKSTDYDRXSQQLKXVSTMQHACIYAGGSICAGSLHNRWRSIYDVAALLTYIQVLLCDPNPNSPANLEAVRLVS

SEQ ID NO: 279467 - protein, 116 aa, Zea mays
  unsure (1)..(116): unsure at all Xaa locations
  Clone ID: MRT4577_186453C.1.pep
FQPILFRLHPFRFSSIHPPPVLSPXDQPRPPPPTTPPPAPEMXIPAPDSPRPPPXIPPXPPRPLPPHPPIAEIPXPPNRXPXTPPPRXRPPSRPATTTGRCCAPRCPSPRSGCRSS

SEQ ID NO: 279468 - protein, 58 aa, Zea mays
  Clone ID: MRT4577_186454C.1.pep
QAGLALNVHFVKLVSWFDTQWPYSIRLADLIRHMFKTQSGVFPPLLAHGWLPLVYAPN

SEQ ID NO: 279469 - protein, 176 aa, Zea mays
  unsure (1)..(176): unsure at all Xaa locations
  Clone ID: MRT4577_186455C.1.pep
AKLVDSPVLQLNATDYALGLSKYVQAAXNVQHRWLLQIRYRSXSWQPLDDAVSHFLEASAAHDEKAADLELQXPSSTISPGGNPXKFQLFVAIRAVNNKYKYLERKFLFPEGLDGRSWFKHVVFAPGKWTGYSGATFPGIVEAIGEGDEAATKRWIGIVTKAIDSAADLLEKDDWA

SEQ ID NO: 279470 - protein, 179 aa, Zea mays
  unsure (1)..(179): unsure at all Xaa locations
  Clone ID: MRT4577_186456C.1.pep
FYFFIFFIFLFFFFIFFFLVFLPGFFAGEFSASGTQGGGPQGVLKRGAGKKARREREGXEGEGRGRNGKGEKNSPQQTNRKKKGETKGGQKREQKERNRGQQKGRETGGKTGEKAGSKNRQKGGKKGGAKGAPGGASLAAKRRATGKGPSREGPKKGAKKGPPRGAPPGEKAGKRGLKE

SEQ ID NO: 279471 - protein, 121 aa, Zea mays
  unsure (1)..(121): unsure at all Xaa locations
  Clone ID: MRT4577_186457C.1.pep
MREGISSSLXSAGIQGRSGSWHLYWLEHGIHRNRQRPRDKTSRFRHDALHTFFRETGAWQTPPRAEYGDLQPAVIXTERAGTYRQLFHPEXLISVEEDRANNFSRGHYTTDLRXRDLCLDH

SEQ ID NO: 279472 - protein, 82 aa, Zea mays
  Clone ID: MRT4577_186458C.1.pep
PVGQSASASDRPSGHPSLTLALRFHLRFLDPTPPPLVFRPVAGLGRARELLHQHSLCPHSTRSFELHGAAGVSKACSCSWLP

SEQ ID NO: 279473 - protein, 183 aa, Zea mays
  Clone ID: MRT4577_186459C.1.pep
MSFLQDPSFFTMGMWSIGAGALGAAALALLLANTDVFLSKPQKAALEYLEDIDLKTLEKEPRTFKAKELWEKNGAVIMAVRRPGCFLCREEAADLSSLKSMLDQLGVPLYAVVKEHIRTEVKDFQPYFKGEIFLDEKKKFYGPQRRKMMFMGFIRLGVWYNFFRAWNGGFSGNLEGEGFILGG

SEQ ID NO: 279474 - protein, 640 aa, Zea mays
  unsure (1)..(640): unsure at all Xaa locations
  Clone ID: MRT4577_18645C.1.pep
LAPCSRQGAGPPRGRRGRDDFYASTTRHATIRTHLAAAEDDGXMWRSRARALLLLRSTITRPPPPPPQPYPTRTLTRVPPPRFLSSSPDPIPDASSSAAADPFPEAFSSPTKASQDAAEAGEDNLSSMWEEAGDADDIFASPGSADAVADDEEVARICAAVESTPEDEIASTLADMTVDFNEPLLAAVLLAADQCSCKKLISLFNYAAKNNPASKSLSNLEVLVSKLADSAEIDKADAYLLWDSIKEIGSVPGSVSTPLLNEMIAIFWKLEKSKAALEVFSKFDEFGCTPDSDSYYLVIEAARKKSLFRSACEVCEKMIGSACFPNGEKVGRILIYLCEGKKVKMAHSLYLAVKEKKIPVPKLALDFLVGALARNDETIGTALELLEEYQGESLKHAGKSFATVVHALCRLNKMEDANNLLMRMVQLEEYKGESLKNAGKTFATVIHGLCRKKKLEDAKALLMRMVNVGPAPGNAVFNFVITALSKQGEMEDAKGLMRMMESQGISPDIYTYSVLMSGYAKGGMIDEAHDLLREAKKIHPKLNRVAYHILIRGYCKMEDFEKANECLKEMKKDGLQPNVDEYDKLIQSLCLKAMDWRRAEKLLEEMEDSGLCLRGISRSLITAVKELEGEEMQSKASQEA

SEQ ID NO: 279475 - protein, 38 aa, Zea mays
  Clone ID: MRT4577_186460C.1.pep
CECASLTLFTYPILGYPCMFLAFGVKPVLDSKDPLGVL

SEQ ID NO: 279476 - protein, 49 aa, Zea mays
  Clone ID: MRT4577_186461C.1.pep
RHVTSLYMDDPSPVACDAHYARITSGLADEYSTGYHLVHRFADSYCVLS

SEQ ID NO: 279477 - protein, 115 aa, Zea mays
  Clone ID: MRT4577_186462C.1.pep
SLEYVVLRPRRRLGGHRGARRGGSGSGPHQRLLRRRARRRRRPRGRCRLVLQRLHSLSLVAAGRSEAVRATKRDIESHRCTHSDTWAALRFETSCVRIGGFSPVSLSNLHHAWLV

SEQ ID NO: 279478 - protein, 74 aa, Zea mays
  Clone ID: MRT4577_186463C.1.pep
YTTYIRFMRWFHPGQINTKSLLFSIRLRLIPLPLEKGNLDLLPLRIANTFAIPEVYCQNREGFTKVVQKMTLRF

SEQ ID NO: 279479 - protein, 133 aa, Zea mays
  unsure (1)..(133): unsure at all Xaa locations
  Clone ID: MRT4577_186464C.1.pep
KIRANLSPYYGRPQSSSKNLLFTLTPCCQFKRRAXPFRQLATGYXINNTWWPKAHNCGLNPRGYGQPQNLLPXSHLAASSQNDFWTQQQALPMYQKFAANHKTLXQLRPLVPFEQLALTNPAASYQQHMIRGA

SEQ ID NO: 279480 - protein, 98 aa, Zea mays
  unsure (1)..(98): unsure at all Xaa locations
  Clone ID: MRT4577_186465C.1.pep
LWIKEIPFIPQVKKKKGNPGLPLLKKAGGLPSQPSLGVFFYFPPFFWXSFLKKKKGGWFFWFPTSLKKKRFFFPEGKTLFGFGILPFPSKGVFFFPPL

SEQ ID NO: 279481 - protein, 219 aa, Zea mays
  unsure (1)..(219): unsure at all Xaa locations
  Clone ID: MRT4577_186466C.1.pep
MNPTAHDQTTQQQKPNGRRAVGSSQTWTRYGVLLPSQQTRKLKEWILTDEQQQVVNASGLGHLALTTGFTIDRSLLTAFCERWNNETNTAHFMGFEMAPSLRDVSYILGIPVTGHVVTAEPIGDEAVNRMCLHYLGESPGSGEQLCGLIRLTWLYRKFHQLPENPTINDIAFSTRAYLLYLVGFTLFPDTXGXIVSPRYLPLLXDFRKIHEYAWGGCSP

SEQ ID NO: 279482 - protein, 121 aa, Zea mays
  Clone ID: MRT4577_186467C.1.pep
PTRPPTRPPTRPNSDALQLARLADPDGSRTIGVITKLDIMDRGTDARNFLLGNVIPLKFGYVGVVNRSQEDINFNRSVKDALAFEEKYFLTLPAYHGLAHCCGVPQLAKKLNMILLKHVTN

SEQ ID NO: 279483 - protein, 68 aa, Zea mays
  Clone ID: MRT4577_186468C.1.pep
FFLFLVSTLNVNYVWYHGPRRACFMLIRSDFLKPNINCSSQHVSVKYWSTGCAVFLIKSVFFYSLKPK

SEQ ID NO: 279484 - protein, 94 aa, Zea mays
  Clone ID: MRT4577_186469C.1.pep
DGKPMKIEIVGTNTPTASAALPVSNGGHARNAVRSAPRGAAPAGMPQRRPHQRGGRRSGGSGGGRRGKERSKPKSAEELDADLEKYHADAMQTN

SEQ ID NO: 279485 - protein, 846 aa, Zea mays
  Clone ID: MRT4577_18646C.1.pep
MKLKKKEFLSLTQGNMTVSEYRDRFTQLSRYAPEEVDTDEKHQEHFLEGLIGPLNYQLQSHTFPNFQTLLNKAIGLESKIRELSDHKRMFQGQSSRNTRPNNAQGSQFRSRNQGGNNYQVQRSGQQGQRNNQSQNQQRNNSQTNQRSGGSSQNRQGGAVNTQARSNNAPVQPNGCFKCVLFDSGASHSFITESFVEKHNIPKYPLKKMLHISSSGGDMKATHSCLRVNLKIQGIDFPVNLVVLGSNVIQCANGTIMLTSPQGERVQVSTDMSTNAKGKTVINHLEEKLLENIKIVCEYPDVFPEELPDLFDRMKGAKIVSKIDLRLGYHQLKIRAEDVPKIAFTTRYGLYEFLVMSFGLTNAPAYFMNLMNKAFMEYLDQFVVVFIDDILIYSLNEEAHEDHLRLVLQKLRDNQLKLLFLGHIVTDGGIKVDPGKISEILNWKQPKDVSKIRSFLGPAGYYKRFIEGFSKLVKPLTSLLEKGKEFKWDEACQNCFEELKKRLTTTPILVMPDIHKGFDVYCDASHLGLGCVLMQEGKVIAYASRQLRKHEKNYPTHDLELAAVVHALKIWRHYMIGNKCKIFTDHKILKYIFTQKELNLKQRRWLELIKDYDLEIQYHPGKANVVADALSRKGQVNNITTHLMSHKLCWEMEQLNLGMLNNVEATVMEVESTLEQEIRKGQESDEKIKEIKTLIGLGKAPDFTEDDQGTIWFKKRICVPEIEHLRQLILREAHDSAYSIHPGSTKMYQDLKEKYWWYGLKRDVATHVALCDVCQRVKAEHQRPAGLLQPLKVPEWKWEEIGMDFIVGLPRTRDDYDSTWVIVDWLTKVAHFIPVKTTYSGAQLAEL

SEQ ID NO: 279486 - protein, 254 aa, Zea mays
  unsure (1)..(254): unsure at all Xaa locations
  Clone ID: MRT4577_186470C.1.pep
MAETLDMTLDDIIKNNKKSNPSSRGARRSRGVSAPGGGTGGVGPTRRPFKRAGNRQAPYQPPKAPDAAWQHDMYXGRRRRRRRRREGLGXLETGAKLYISNLDFGVSNEDIKELFSELGDLKRFSINYDRSGRSKGTAEVVFARRSDAVAAVKKYDNVQLDGKPMKIEIVGTNTPAAAAAHPVPNGGHARNAARSAPKDAAPAGMSQHRPHQRGGRRAAGSGGGRRGKERSKPKSTEELDADLEKYHADAMQTN

SEQ ID NO: 279487 - protein, 253 aa, Zea mays
  Clone ID: MRT4577_186471C.1.pep
MAETLDMTLDDIIKNNKKSNPSSGGARRSRGGSAPGGGSGGVGPTRRSFKRAGNRQAPYQPPKAPDAAWQHDMYPAVAAGGGGGGRVSALETGTKLYISNLDFGVSNDDIKELFSELGDLKRFSIIYDRSGRSKGTAEVVFARRSDAVAAVKKYNNVQLDGKPMKIEIVGTNTPTASAALPVSNGGHARNAVRSAPRGAAPAGMPQRRPHQRGGRRSGGSGGGRRGKERSKPKSAEELDADLEKYHADAMQTN

SEQ ID NO: 279488 - protein, 96 aa, Zea mays
  Clone ID: MRT4577_186472C.1.pep
DLGPSFVVLCKGKKGTDLVVCKESCALSQQSNLVLYGRIQCKGKCTEQKGITAPAMKVCQEECDKAYVVKAAEAPRPAGSPAPSRRTRASARTAGS

SEQ ID NO: 279489 - protein, 94 aa, Zea mays
  Clone ID: MRT4577_186473C.1.pep
AQVCVASEMSSVTAVSARLPGCSVALPRRPLPALCHDAYMVPARVSHPGPVDRTWPVPARLTPRPRVVPVLKPWVIGAAPAEQGGHSRSLAPVI

SEQ ID NO: 279490 - protein, 195 aa, Zea mays
  Clone ID: MRT4577_186474C.1.pep
DVITGHGETMTCSKERNADLFDAVLGGLGQFGVITRARIVVEPAPARARWVRLVYTDFAAFAADQERLIAGPRQPDGTFGPMSYVEGSVFVNQSLATDLTNTGFFSDADVARIVALAAERNATTVYSIEATINYDNATSVDQELKSVLDTLSFVEGFAFQRDVSYEQFLDRVRNEEVALDKLGLWRVPHPWLNMF

SEQ ID NO: 279491 - protein, 106 aa, Zea mays
  Clone ID: MRT4577_186475C.1.pep
KPPQGFGSKNMVKMGFFPGAGLGKDGQGFSPPFSGVRGPKSRGFGPGAKFFLPPFWPLRDFSCGVPCSIRVTMFFGGGPPFAPLMVNPWVFPCFFPLSNEVFFFWS

SEQ ID NO: 279492 - protein, 73 aa, Zea mays
  Clone ID: MRT4577_186476C.1.pep
CFLQRVGVIGISNSHADGAKLDDGSYTDGALDPLGADERPDLDPVEDHMLITCLTPANISALSALRAAMITLT

SEQ ID NO: 279493 - protein, 262 aa, Zea mays
  unsure (1)..(262): unsure at all Xaa locations
  Clone ID: MRT4577_186477C.1.pep
MDGCRAVLTGDMQWHEATMSNSSCDSDHLHRERGEQGLMSSQLQQQLEQIYMLMDMELEHELHLHHNVPPQGCSQRQLSSPFLPFAVSSDVTSSPVLTSSSTTTFCQQPAEASPSPLDTPFSPLPYSYSDTIPDLEEIMSRPRHKDGHAESSISAFRQCVRHLRPKKKLKQGGCGQRAIKTAMSVLARMHSSRLSQWQRQISSTEMAAAVPSDESKNVQLLHVRSERKRREKINDSFEALKNALPPSCSQRDXTSILMRGRD

SEQ ID NO: 279494 - protein, 85 aa, Zea mays
  unsure (1)..(85): unsure at all Xaa locations
  Clone ID: MRT4577_186478C.1.pep
PWVHLLAQNMIAXQLHQLVLGNLDAYSDEQRHLPFSELAASKSGAYLLQELPCSHLCDGYWKKCLPLKQLRPLNSDGYLPHLEIL

SEQ ID NO: 279495 - protein, 57 aa, Zea mays
  Clone ID: MRT4577_186479C.1.pep
ETSPGLTHLNHVYDTHGMFETPTAFVLDPQPHVKAWWPGPMESPFVQKVAPPKNPSA

SEQ ID NO: 279496 - protein, 82 aa, Zea mays
  Clone ID: MRT4577_18647C.1.pep
CYFLSQGTCWTSYFQDTFGGTILDPDGRHVDKVPRGEAHHEPLDMYMHLDVATDAYRMPRSERLNMEIAPTLNFPGTPDTDI

SEQ ID NO: 279497 - protein, 68 aa, Zea mays
  Clone ID: MRT4577_186480C.1.pep
GGGYLLTSKTYWHHAAVLQLYDVQNVICYDKLYDYIIDLSVSFLLSVHYRPNRVCIFTLIISQTPYIC

SEQ ID NO: 279498 - protein, 55 aa, Zea mays
  Clone ID: MRT4577_186481C.1.pep
SFRTNAYRGELYKQRVQANNTLIFKVHTSVIHLIHYLDHLHITSDYHLRECTLLP

SEQ ID NO: 279499 - protein, 164 aa, Zea mays
  Clone ID: MRT4577_186482C.1.pep
HSPLPLVARPRPWSYLLVPALVSTRRHHGVVVDPARTPPRQVAWDTLPIPALPLPLLGSLLSSSSGCAPLLSAFLPALSLIWPWMLGSSSSPSSATPIGSLEPAPQPPSSLKSGCPSSSWWPPSPAVILHSKPRSGLRLPCACPLCTSRRAVGAALAAVELCSL

SEQ ID NO: 279500 - protein, 160 aa, Zea mays
  Clone ID: MRT4577_186483C.1.pep
VVSHATEHTKTAAGGAHSKPGILDAAWHTSGKKIRRGIAREPKAYHWARNFSSMVWMPIHTPNQELEADQVPDQLLSHVPTLRMMMRNILLVLLRPPYLAGDDNWTDTDRPDPGAHACLLLPGNAVVTHDYRASKRGPSSGPPAPASQTGEPAGCKESLC

SEQ ID NO: 279501 - protein, 81 aa, Zea mays
  unsure (1)..(81): unsure at all Xaa locations
  Clone ID: MRT4577_186484C.1.pep
CRKSMDKFAALISSFRYPXXXASGLRAPLKDVXXTLSVRSILKALXXGTFRRTAKKTVMQRAAALNAFYNGYICIANSDLA

SEQ ID NO: 279502 - protein, 568 aa, Zea mays
  Clone ID: MRT4577_186485C.1.pep
MGSTTMSPPSFPVVLLLLLLATIAAAAGSNMDEEVVDDLQYLIDNSDDIPTNDPDGWPEGDYDDDDLLFQDQDQDLTGHQPEIDETHVVVLAAANFSSFLASSHHVMVEFYAPWCGHCQELAPDYAAAAAHLAAHHHQAHLALAKVDATEETDLAQKYDVQGFPTILFFIDGVPRGYNGARTKEAIVDWINKKLGPAVQNVTSVDEAQSILTGDDKAVLAFLDTLSGAHSDELAAASRLEDSINFYQTSTPDVAKLFHIDAAAKRPSVVLLKKEEEKLTFYDGEFKASAIAGFVSANKLPLVTTLTQETSPSIFGNPIKKQILLFAVASESTKFLPIFKEAAKPFKGKLLFVFVERDSEEVGEPVADYFGITGQETTVLAYTGNEDARKFFLDGEVSLEAIKDFAEGFLEDKLTPFYKSEPVPESNDGDVKIVVGKNLDLIVLDETKDVLLEIYAPWCGHCQSLEPTYNNLAKHLRSVDSLVVAKMDGTTNEHPRAKSDGYPTILFYPAGKKSFEPITFEGERTVVDLYKFIKKHASIPFKLKRQESRTESTRAEGVKSSGTNSKDEL

SEQ ID NO: 279503 - protein, 170 aa, Zea mays
  Clone ID: MRT4577_186486C.1.pep
LDGEVSLEAIKDFAEGFLEDKLTSFYKSEPVPESNDGDVKIVVGKNLDVIVLDESKDVLLEIYAPWCGHCQSLEPTYNKLAKHLSGVDSLVIAKMDGTTNEHPRAKSDGYPTILFYPAGKKSFEPVTFEGERTVVDMYRFIKKHASIPFKLKRQESRRESIQTDGVKDEL

SEQ ID NO: 279504 - protein, 57 aa, Zea mays
  Clone ID: MRT4577_186487C.1.pep
PQDLQAARALVIISIIVAALGVLLSVVGGKCTNCLEDESAKAKTMIVAGVVFLLAGL

SEQ ID NO: 279505 - protein, 74 aa, Zea mays
  unsure (1)..(74): unsure at all Xaa locations
  Clone ID: MRT4577_186488C.1.pep
ILNTLCLGKYNYKPGEKMVNPQHPXVLVTSLLQEAKNSIITIMGNISYQQWHTTVSSQTYDFFPWLQNSDPNQI

SEQ ID NO: 279506 - protein, 138 aa, Zea mays
  Clone ID: MRT4577_186489C.1.pep
FNIGGPSLRFPGCRPLVGSYDLSFLGPLLAFPWAPLCPRAVGDSPAVPRFIPGLAPPLCPLGSFPLLPLRLGLFLLLALLFGLGPPPSWGFYPPVVWSFPPGVPFFFLFSLPPGLLALSVFSLAISRVFLLRGFRGPP

SEQ ID NO: 279507 - protein, 1375 aa, Zea mays
  Clone ID: MRT4577_18648C.1.pep
MDLGTHMLCARFYPWNRVNTSYAPPPRQIPIYPVVVEEVLVDLPHIRVENVVILKDSSEEQLPTPTPLAESLAFVARSSTSALPTLAVQAPAPGGDDPEDSGDDDDEDDDDNEGEYKQVNKEANYAQQDYFMGFGPITEHYTSMFEMGHFPNLLQEVLHALGTYVRPLYETRRVSEPPRAFYYITRIHVRVMDAGDRGFRTLSAHESLTPLSTYAASVSDAARRTLGSLSHTYRQQLQDTRFRHLPLRLSGGSQTSIVPGGAGEERLNTLAGVVAGLNTDLDSATLDLSRVHLELEDAHARIVLEAQLQGRDLPEAQMVNACQGPNNNRNQRGQQIPPPPPNPNMEQFIAAQMQFLQGLTATVQQIQQNQLNQQHQQQQQNAPAARDKHRDFMSHHPPMFSHAVDPLDANDWLKVIGKKLDITQCNDREKVLYASGRLEGAAFDWNYEAKEEGVPFPYSREYDCQQLALKAKEGNCLTTKGSSKVSPARTPDRTMLKVRSSALEIRMEIIIKRSSGQQGQRRNQSQNQQRNNSQTNQRSGGSSQNRQGGAVNTQAKSNNAPVQPNGYFKCVLFDSGASHSFITEPFVEKHNIPKYPLKKMLHISSPGGDMKDTHLCLHVNLKIQGIYFSVNLVVLGSNGIDVILGCDWLKSCDGVIQCANRTIMLTSPQDERIQVSIDKSTDAKWKTVVNHLEEKPLENIKVVCEYPDVFPEELPDLFDQMKGAKIFSKIDLRSGYHQLKIRAEDVPKTVFTTRYGLYEFLVMSFGLTNAPAYFMNLMNKVFMEYLDQFVVVFIDDILIYSLNEETHEDHLKLVLQKLRDNQLYAKFSKCDFWLKEVASLGHIVTDGGIKVDPGKIMKPLTSLLEKGKEFKWDDACQNRFEELKKRLTTAPILVMPDIHKGFDVYCDASHLGLGCVLMQEGKELCWEMEQLNLGMLNNVEATVMEVESTLEEEIRKGQESDEKIKEIKTLIGLGKAPDFTEDEQGTLWFKKRICVPEIEHLHQLILREAHDSAYSIHPGSTKMYQDLKEKYWWYGLKRDVATHVALCDVCQRVKAEHQRPAGLLQPLKVPEWKWEEIGMDFIVGLPRTRGGYDSIWVIVDMLTKVAHFIPMKTTYSGAQLAELNMSRIVCLHGVPKKIVSDRGTQFTSRFWKRLHESMDTKLNFSSAYHPQTDGQTERTNQVLEDMTGESQVFGPEILQEAEKQVQIIRENLKTTQSRQKSYADNRRRELMFEVGDFVYLKVSPMRGMKRFKVKGKLSPRYIGPFMILERKGEVAYQLELPDSLSDVHAVFHVSQLKKCLRVPEEQLPMEELKVNKDLTYSEYPIRILETSRGITRSKVINMCKVQWSHHLEDEATWEREDELRAEFPQLFSKVS

SEQ ID NO: 279508 - protein, 63 aa, Zea mays
  Clone ID: MRT4577_186490C.1.pep
CMVMSPLRSQDSRRRRTHKYVCDSVSLVSDEETTRAMSSVVVFTVTSTHKRRATRWMMMPASD

SEQ ID NO: 279509 - protein, 60 aa, Zea mays
  Clone ID: MRT4577_186491C.1.pep
GNLLSPPPLSLLVYPRRNTSLLLMCCSTNKIRMVIKKFSNKEKKKKKKKKKSLTCPGGRS

SEQ ID NO: 279510 - protein, 178 aa, Zea mays
  Clone ID: MRT4577_186492C.1.pep
MRSVNGEVEGTHDHEANRRGQLIEWMNALLPEFSLPPDSSDEELRELLSDGVVLCRVANTLIPGVLEGSWDGYAPSDQRLGNVKKFLSVIADMGLPGFSVKDLDEGSMSPVVECLLVLRDSVDPRLGDDIPPDVTRTPLRKQWGVPEMDKPQVPGAALGKRSPAEDREMALQIPKPIR

SEQ ID NO: 279511 - protein, 195 aa, Zea mays
  Clone ID: MRT4577_186493C.1.pep
CPTQSLERCPSSPRIHRLLAFDVVLFAASLASRYIVLSRESQLDAPLNPRGIRFISTMVKLTYASGLAQASMVLAPLAIAYLVSAPNTRRIRIALWLVALVSWIAALKTADWGYLGNLRVPSDGTPLVLGFATFWAFSKSAPSNHPLPRTPPYPRLRQSRLFKAIDLFWNSRRHVNIAPFSTRPLPGSTRRYPWL

SEQ ID NO: 279512 - protein, 249 aa, Zea mays
  unsure (1)..(249): unsure at all Xaa locations
  Clone ID: MRT4577_186494C.1.pep
MASQTPAVVMDNGTGYSKLGFAGNDSPSFVFPTAIATKGPTGGTGGSGSGRPAVANKPSFLTGGAGPGGHLSGKRGTEDLDFFIGDEALAAAGGAGYGINYPIRHGQIDNWDLMERFWSNSIFKYLRVEPEDHHFLLTEPPLNPPENREATAEIMFESFNVAGLYIAVQAVLALAASWTSSKVQDRSLTGTVIDSGAGVTHVIPVAXGYVIGSSIKSVPIAGRDITNFVQSLLRERGEPDSSLQTAERI

SEQ ID NO: 279513 - protein, 151 aa, Zea mays
  Clone ID: MRT4577_186495C.1.pep
QPYTVREILASPAFGDRPVKDAARHLLFHRAMGFAPSGDAHWRGLRRLAANHLFGPRRVAGAAHHRASIGEAMVADVAAAMARHGEVPLKRVLHVASLNHVMATVFGKRYDMGSREGALLDEMVAEGYDLLGTFNWADHLPLLKHLDPQGV

SEQ ID NO: 279514 - protein, 112 aa, Zea mays
  Clone ID: MRT4577_186496C.1.pep
FFAQIPKIFVGSKGQNLSGARFGLLGDSGNCGSPPFFSPLGKNVFLEGGLFSPRQCWGWKPPGAVFAPSGQQNFVPKTGLWVWGPEAPLPLKSHQVFAPNQDCQLCFFSKSF

SEQ ID NO: 279515 - protein, 48 aa, Zea mays
  Clone ID: MRT4577_186497C.1.pep
YGIQITNFASKTPYCHTKVKKVICTTTRSWFRQSDMANLLDICKNKKK

SEQ ID NO: 279516 - protein, 104 aa, Zea mays
  Clone ID: MRT4577_186498C.1.pep
MRVLLVAVTVLAFAVSATYTHTSGGCGCQPPAPVHIPPPVHLPPSVHLPPTVHLPPPVHLAPAVHLTPTVHVPTTVHLPAPPCHYPTQPARPQTHSQAHPCPCQ

SEQ ID NO: 279517 - protein, 86 aa, Zea mays
  unsure (1)..(86): unsure at all Xaa locations
  Clone ID: MRT4577_186499C.1.pep
QKCLSPWTDEQSQYPTIQSYMVQDVIQASILRALVXTLQQPYALLXHTSLVHFYLQRIGAQQLPHQLLSTIXKYLAANLVCLPQQT

SEQ ID NO: 279518 - protein, 64 aa, Zea mays
  Clone ID: MRT4577_18649C.1.pep
MARRVRPSHLVLALAAAYLLLISLKFRRVLDLAATDLADDPAAVGAFSSPCSGDHLPPAGSGFG

SEQ ID NO: 279519 - protein, 43 aa, Zea mays
  unsure (1)..(43): unsure at all Xaa locations
  Clone ID: MRT4577_186500C.1.pep
PACGSVRVVCSSSRRLVRGSSLPGRPLRCPRLRFSVVGTRXPA

SEQ ID NO: 279520 - protein, 65 aa, Zea mays
  Clone ID: MRT4577_186501C.1.pep
KYKLLINSFSIYKNLNSKKCVLIISYTTTTHSFKPLFHFLTKYYIQIDQPLSYKFLPKYNTPFYT

SEQ ID NO: 279521 - protein, 87 aa, Zea mays
  unsure (1)..(87): unsure at all Xaa locations
  Clone ID: MRT4577_186502C.1.pep
MSTYAFYKSSFSDPSTLKHITEFSPRTXTPGYXHTNTPLTVYSAPQSIGYRPDRAKYFDEYSEHNESYLTGELHGDYGWNTHELSPD

SEQ ID NO: 279522 - protein, 168 aa, Zea mays
  Clone ID: MRT4577_186503C.1.pep
MTDQQTQDLVKELVHRLLSAAESGGRGGGRDTGGALRFAHRILSSRLAPAVLPDEHALAESIKRRLAASGRPDDALSFADLHSKLSVRARPASLWPLLYLLDSLSSQYRAAAAASCLPNLPIAALPQNATSGTAPGAGVRPGSRTHGAPPGGLVLVSKDPDTSARSAA

SEQ ID NO: 279523 - protein, 93 aa, Zea mays
  Clone ID: MRT4577_186504C.1.pep
MCIPLFRKKKHDRVYDYHPQPAMGYSKKYGYNDYGYYNGGKKSRKHGRHYASAAGDLAGAWADYSGGGHHGGGHGDGGGGGGGADGGGGGGCS

SEQ ID NO: 279524 - protein, 43 aa, Zea mays
  Clone ID: MRT4577_186505C.1.pep
ITAEIIFVLLREMEKSSLHQSFMLSAISSTTYQLTALTYLFIM

SEQ ID NO: 279525 - protein, 81 aa, Zea mays
  Clone ID: MRT4577_186506C.1.pep
LEPAGKKKKKKKKKKKKKKKKKKKKKKKKIGGQRRAEARSKKKNEGSKEIEARKQGQRRKACNLLSPVAAVASPLQSRQES

SEQ ID NO: 279526 - protein, 72 aa, Zea mays
  Clone ID: MRT4577_186507C.1.pep
LDVYLAETVMLIFGMGLYGLFVSNASADVRSESDRALSGPSLFGVFALAGAVGEPWRRIWRSWTLMWRVSLF

SEQ ID NO: 279527 - protein, 274 aa, Zea mays
  Clone ID: MRT4577_186508C.1.pep
WVHLCLVVGAGAGGRDERVPQWGVQETRELIMARGEMERETVAARRSAKTMWEAVAARLRERGYRRTAEQCKCKWKNLVNRYKGKETSDPENGRQCPFFDELHGVFTERARNMQQQLLESESGVSVKTKLKRPGGDRSSGESDDKDDDGEESDDEKPMHNRKRKADDKKQQHQRMSEKSRTGISSIHELLQDFLVQQQHIDVRWREMIERRAQERVVFEQQWRLTMQRLEQERLLLEHSWMEREERRRMREEARAEKRDALLTTLLNKLLQEDL

SEQ ID NO: 279528 - protein, 87 aa, Zea mays
  unsure (1)..(87): unsure at all Xaa locations
  Clone ID: MRT4577_186509C.1.pep
PRVRPRVXKKKKKKKKKKKKKKKKKKKKKKKKKKKKKKKKKKKKGGPPYKETNFPSPLHPKGTGFYFWGPPNLNFPGPGILHFAGLG

SEQ ID NO: 279529 - protein, 752 aa, Zea mays
  Clone ID: MRT4577_18650C.1.pep
MEQFIAAQMQILQGITAAIQQIQQNQQNQQHQQQQQYAPPARDKHRDFMSHHSPTFSHAVDPLDADDWLKVIGKKLDITQCNDREKVLYASGRLEGAASDWWDAFTVAHPNVDTITWQEFQENFRAHHIPSGIMKLKKKEFLSLTQGSMSVSEYRDRFTQLSRYAPEEVDTDEKRQQRFLEGLIGPLNYQLQSHTFPNFQTLLNKAIGLESKRKELSDHKRKFQGQSSRNTWPNNAQGSQFRSGNQGGNNYQVQRSGQQGQGNNQNQNHQRSNSKTNQRSGGSSQNRQGGASTTQARNNAHVQPNGCFKCGELGHYANNCPRRNQQKPQKSNNQRNDQNTPARGSAQNKTPQNQSRGRVNHVTAESVPGDADIVYGMFLVNSIPASVLFDSGASHSFITESFVEKHIIPKYPLKKILHISSPGGDMKATHSCPHVNIKIQGIDFSVNPVVLGSNGIDVILGCNWLKSCDGVIQCANGTIMLTSPQGERIQVNIDKSTDAKGKIVINHLEEKPLENIKVVCEYPDVFLEELPVLFVNKKDGSRRMCVHYRSLNEVTIKNKYPLPRIEDLFDQMKGAKIFSKIDLRSGYHQLKIRAEDVPKTAFTTRYGLYEFLVMSFGLTNAPAYFMNLMNKVFMEYLDQFVVVFIDDILIYSPNEETHEDHLRLVLQKLRNNQLYAKFSKCEFWLKEVAFLGHIVTDGGIKVEPGKISEILDWKQPKDASKIRSFLGLAGYYRRFIEGFSKLVKPLTSLLEK

SEQ ID NO: 279530 - protein, 77 aa, Zea mays
  Clone ID: MRT4577_186510C.1.pep
AKGKFTAYHVVGLRLKTKPIDPNCNAFLWSHSAIGPGAMGCVLQTSEGVSIAYGKRSRLKCERATALHSLLCLHKVE

SEQ ID NO: 279531 - protein, 59 aa, Zea mays
  Clone ID: MRT4577_186511C.1.pep
TRTSVEERGVSHSTTTPTTTSSDRKGTGMESEEADITHGRSETYVSMCVSLVLSGPCNH

SEQ ID NO: 279532 - protein, 160 aa, Zea mays
  Clone ID: MRT4577_186512C.1.pep
MEESGASAAAVVPRLLAAKEESGKSFSDIAAETGLTNVYVAQLLRRQAQLKPDMAPAFRAAVPALTDELVELMMRPPFRSYHPDIVHEPAIYRLNEAVMHFGESIKEIINEDFGDGIMSAIDFYCSVDKIQGADGKDRVVVTFDGKYLPYTEQRSEHMMS

SEQ ID NO: 279533 - protein, 83 aa, Zea mays
  Clone ID: MRT4577_186513C.1.pep
GTRCTLLCILIKRFRLYSFQSPNTAASCTVIYCHFLPVSVLGNLRDLMPSLHVVSVYQAPSPISNLNSPSAVTFIVVSYQFHQ

SEQ ID NO: 279534 - protein, 105 aa, Zea mays
  Clone ID: MRT4577_186514C.1.pep
LFPPFPFLSPLFFPPCFVAPFCLEPRPPFFEGNKEFVSVVHLLCCRVLSAKKYPCLGITPTGIKFVCSLMPFLNPKPWGGFPFAVPPGVFPPAWESNLAFYLVFS

SEQ ID NO: 279535 - protein, 49 aa, Zea mays
  Clone ID: MRT4577_186515C.1.pep
MRECIFVHIGHAVIQVVNACWELYWLEHGIQSDGHMPVDKTAGHYYECL

SEQ ID NO: 279536 - protein, 62 aa, Zea mays
  Clone ID: MRT4577_186516C.1.pep
SILFQRGPHTYSEDTILQLDFLNKERTIFLQALQKLFNPNIVKLKEVTMENHELFFIFEHMV

SEQ ID NO: 279537 - protein, 86 aa, Zea mays
  Clone ID: MRT4577_186517C.1.pep
TSQHSYDSSRSCNGKISLFPTTKTTDRRTKKTKTAGRMHQLPMDGGCWEGAIGNCGCTSCSGEVAVEGPGLTSSSSASASRGGHRT

SEQ ID NO: 279538 - protein, 82 aa, Zea mays
  Clone ID: MRT4577_186518C.1.pep
GGHTFFFFLYSPIYFNFLLNSSHRHEDVYYYTFNNTLNFYLRNISSGMKDHGLMHDENPCLSSHKLFYFMKLKYQKFYLIST

SEQ ID NO: 279539 - protein, 365 aa, Zea mays
  unsure (1)..(365): unsure at all Xaa locations
  Clone ID: MRT4577_186519C.1.pep
VPAKQENGGSCLVAWDSVTRPLKYGGLGIPNLQHMCWALQAKWLWLQKTDRDRPWLGLSIPFQQHVKDLFAASLISHVGNGSNTLFWTDKWLNGCSIRDLASEVVSKVAKRALTSMTVVQALENRQWIAHINXPLSLIGIQQFLFLWDTLGDVQLSQEEDRHVWRHETSGVFSSKSCYKVLLLGSTVFEPWKRLWKTWAPPKCKFFLWLAIRNKCWTADRLQLRGLPHPDVCPMCDQAQETIQHLLTACIFARQFWHTILAAIGLGHLTPTADEGNFSEWWGKVCLRVTKTRKKGLNSLIILGAWCLWLQRNRAVFHGESPSLPRILRCFSDECVCWVLAGAKEVGSMGLVAALGEVGSSFSTSM

SEQ ID NO: 279540 - protein, 568 aa, Zea mays
  Clone ID: MRT4577_18651C.1.pep
MAVLQGIPALELPINCSGQRRWLELIKDYDLEIQYHPGKANVVADALSRKGQVNNITTRLMSQELCWEMERLNLGFLNNVEATVMEVESTLEEEIRKGQESDEKIKEIKTLISLGKAPDFTEDEQGTVWFKKRICVPEIEHLRQLILREAHDSAYSIHPGSTKMYQDLKEKYWWYGLKRDVATHVALCDVCQRVKAEHQRPAGLLQPLKVPEWKWEEISMDFIVGLPRTRDGYDSIWVIVDRLTKVAHFIPVKTTYSGAQLAELYMSRIVCLHGVPKKIVSDRGTQFTSRFWKRLHESMDTKLNFSSAYHPQTDGQTERTNQVLEDMLRACALKHGRSWDKSLPYAEFSYNNSYQSSLKMAPFEALYGRKCRTPLYWNQTGESQVFGPEILQEAEKQVQIIRENLKTAQSRQKSYADNRRRELMFEVGDFVYLKVSPMRGMKRFKVKGKLSPRYIGPFKILERKGEVAYQLELPDRLSDVHDVFHVSQLKKCLRVPEAQLPMEELNVNEDLTYSEYPVRILETSRRITRSKVINMCKVQWSHHSEDEATWEREDELRVEFPQLFSEVS

SEQ ID NO: 279541 - protein, 111 aa, Zea mays
  unsure (1)..(111): unsure at all Xaa locations
  Clone ID: MRT4577_186520C.1.pep
GKVPYVVYLFPDEDKQHMVLARLSDEKILQCDMKLMQITQQHDHHLTPANTITHVDNNMQLVTSRDDTSIPVWKPCIPVLIHYISEPHMHSTPSIALHTNSKXLAAHSLDK

SEQ ID NO: 279542 - protein, 246 aa, Zea mays
  Clone ID: MRT4577_186521C.1.pep
MGSKAPFCLTLLLLLAAACGPAAHAHDAVELPHHGSALKEQISSTKIPARLKSGSGLCSACENFTSEAVTYLSKEQTQDRIMEFLHDACSQSFSFEQKCVELMDSYATLLFAKITEIRPEAFCKRYGLCRDTALLSGVGSDSTCVFCHHLLDEIMSKLKDPDAEFEIIQILVKECNKIEGHVQQVEQIVVERSEGWHCGYFCYHAWIPRQCEDEPEGRVLGGDPLSEKDSPMARCFTSWRTTRERW

SEQ ID NO: 279543 - protein, 41 aa, Zea mays
  Clone ID: MRT4577_186522C.1.pep
PSWFIGLGCCNWGGKGGFTPVTIQVGIGSFSGFTYRSLLSP

SEQ ID NO: 279544 - protein, 226 aa, Zea mays
  Clone ID: MRT4577_186523C.1.pep
MGSKAPFCLTLLLLLAAACGPAAHANDAVLKEHISSTKIPARLKRGSGLCSACENFTSEAVTYLGKEQTQDRIVEFLHDACSQSFSFEQKCVELMDSYATLLFAKITEIRPEAFCKRYGLCRDTALLSGVGSDSTCVFCHHLLDEIMSKLKDPDAEFEIIQILVKECNKIEGHVQQCKRLVLQYIPLMFLEKNDGCALAQACPASSRKTFSSMLKGALWSDAWLEG

SEQ ID NO: 279545 - protein, 53 aa, Zea mays
  Clone ID: MRT4577_186524C.1.pep
CHFDYIIMLVRVCNVVSDFLLTYRLVYSLTLSLVYIIFTLSINLYYLNCFSSN

SEQ ID NO: 279546 - protein, 240 aa, Zea mays
  Clone ID: MRT4577_186525C.1.pep
MGSKAPFCLTLLLLLAAACGPAAHANDAVELPHHGSALKEHISSTKIPARLKRGSGLCSAYENFTSEAVTYLGKEQTQDRIVEFLHDACSQSFSFEQKCVELMDSYATLLFAKITEIRPEAFCKRYGLCRDTALLSGVGSDSTCVFCHHLLDEIMSKLKDPDAEFEIIQILVKECNKIEGHVQQCKRLVLQYIPLILVNGEKFLEKNDVCALAQACPASSRKTFSSMLKGALWSDAWLEG

SEQ ID NO: 279547 - protein, 331 aa, Zea mays
  Clone ID: MRT4577_186526C.1.pep
MGSKAPFCLTLLLLLAAACGPAAHANDAVELPHHGSALKEHISSTKIPARLKRGSGLCSACENFTSEAVTYLGKEQTQDRIVEFLHDACSQSFSFEQKCVELMDSYATLLFAKITEIRPEAFCKRYGLCRDTALLSGVGSDSTCVFCHHLLDEIMSKLKDPDAEFEIIQILVKECNKIEGHVQQCKRLVLQYIPLILVNGEKFLEKNDVCALAQACPASSRKTFSSMLKGAFWPDVEQEVGPSTYSLLFNSIGSVPTSRLRRKASRVRHTDGFQSAFLSHAPLAARRGLWTCCTCQRCCRAPASWLSLEGTYFFNQDSCPSQEGQRTMLGL

SEQ ID NO: 279548 - protein, 47 aa, Zea mays
  Clone ID: MRT4577_186527C.1.pep
RECRIQDLCLLSYGIESIQSSPNSLLSAFNILAYCSVSLTHLSINRD

SEQ ID NO: 279549 - protein, 100 aa, Zea mays
  Clone ID: MRT4577_186528C.1.pep
DKCSELSLSIRHHCRITRERASYIVERREYLYVNTDVQDQADGYTCSIFLLLIRYLLDAPCACYEAEHHRTVRESLSALFSNSDRSVITSCGIVHNHVQL

SEQ ID NO: 279550 - protein, 155 aa, Zea mays
  unsure (1)..(155): unsure at all Xaa locations
  Clone ID: MRT4577_186529C.1.pep
MRPVTMVGSTASSSSVRVEASALYTRLRRLLSLASRSSVHWQARLPSARASLASACAACASAMALFASRLSSTSWHRSSPFSASIAANFSVSLWLLLSAADFSRTASACCTRRRSTSAANSAVRAPDATWSAKSAAXSAAATPASPAGTRSPPHP

SEQ ID NO: 279551 - protein, 1442 aa, Zea mays
  Clone ID: MRT4577_18652C.1.pep
MVNQRQGPNNRNQRGQQAPPPPPPPNPNMEQFIAAQMQILQGLTAVVQQLQQNQQNQQPQQQQYAPPARDKHRDFMSHHPPTFSHAVEPLDADDWLKVIGKKLDITQCNDREKVLYASGRLEGAASDWWDAFTAAHPNADTITWQEFQENFRAHHIPSGIMKLKKKEFLSLTQGNMSVSEYRDRFTQLSRYAPEEVDTDEKRQERFLEGLIGPLNYQLQSHTFPNFQTLLNKAIGLESKRKELSDHKRKFQGQSSRNTRPNNAQGSQFCSGNQGGNNYQVQRSGQQGQRNNQSQNQQRSNPQTNQRSGGNSQNRQGGTNNTQARNNAPVQPNGCFKCGELGHYANNCPRRNQQTPQKGNNQRNDQNTPARGSAQNKTPQNQSRGRVNHVTAESVPEDADIVYGIDFTVDPVVLGSNGIDVILGCNWLKSCDGVIQCANGTIMLTSPQGERIQVNIDKSTDEKGKTVINHLEEKPLENIKVVCEYPDVFPEELPGMPPDRDIEFSIELVPGIAPISKRPYRMDVKDLVELKKQIEELLEKGFIRPSSSPWGAPVLFVNKKDGSRRMCVDYRSLNEVTIKNKYPLPRIEDLFDQMKGAKIFSKVDLRSGYHQLKIRAEDVPKTAFTTRYGLYEFLVMSFGLTNAPAYFMNLMNKVFMEYLDQFVVVFIDDILIYSPNEEAHEDHLRLVLQKLRDNQLYAKFSKCDFWLKEVAFLGHIVTNGGIKVDPGKIREILDWKQPKDASKIRSFLGLAGYYRRFIEGFSKLVKPLTSLLEKGKEFKWDEACQNCFEELKKRLTTAPILVMPDIHKGFDVYCDASHLGLGCVLMQEGKVIAYASRQLRKHEKNYPTHDLELAAVVHALKIWRHYMIGNKCKIFTDHKSLKYIFTQKELNLRQRRWLELIKDYDLEIQYHPGKANVVADALSRKGQVNNITTHLMSQELCWEMERLNLGFLNNVEATVMEVESTLEEEIRKGQESDEKIKEIKTLISMGKAPDFTEDEQGTIWFKKRICVPEIEHLRQLILREAHDSAYSIHPGSTKMYQDLKEKYWWYGLKRDVATHVALCDVCQRVKAEHQRPAGLLQPLKVPEWKWEEISMDFIVGLPRTRDGYDSIWVIVDRLTKVAHFIPVKTTHSGAQLAELYMSRIVCLHGVPKKIVSDRGTQFTSLFWKRLHESMDTKLNFSSAYHPQTDGQTERTNQVLEDMLRACALKHGRSWDKSLPYAEFSYNNSYQASLKMAPFEALYGRKCRTPLYWNQTGESQVFGPEILQEAEKQVQIIRENLKTAQSRQKSYADNRRRELMFEVGDFVYLKVSPMRGMKRFKVKGKLSPRYIGPFKILERKGEVAYQLELPDRLSDVHDVFHVSQLKKCLRVPEEQLPMEELNVNEDLTYSEYPIRILETSRRITRSKVINMCKVQWSHHSEDEATWEREDELRAEFPQLFSEVS

SEQ ID NO: 279552 - protein, 132 aa, Zea mays
  unsure (1)..(132): unsure at all Xaa locations
  Clone ID: MRT4577_186530C.1.pep
HASAHASGAAERVVGDIRLGGVGSGRKESLARCLIGISEGRGGEVAGGRGSARGSGGRRKMGADRGRRPCGRNLSDTPARTTFILWIEDGCXTIWRKSSKGINAGLPSFPFHDFLSSLAIQNGRFYWKPITY

SEQ ID NO: 279553 - protein, 34 aa, Zea mays
  unsure (1)..(34): unsure at all Xaa locations
  Clone ID: MRT4577_186531C.1.pep
MPPFPRGLKTHYVDLVPGSVRRWPQLWGXSMLPT

SEQ ID NO: 279554 - protein, 104 aa, Zea mays
  Clone ID: MRT4577_186532C.1.pep
QRKRASPSPCIYLFQSFSFLVVHRLAPLNLRPTSSSPWRVSVVSVKTDTHRRNAFRMGSLPIYIHSPHQQDADPHQRLCVSLVAAPPRILQCKGQIQTPRELQT

SEQ ID NO: 279555 - protein, 247 aa, Zea mays
  Clone ID: MRT4577_186533C.1.pep
MSLRRSSAAALAALLALAVLLGTSADDGGQPIVARISKDTSTPTPLYTIAIKVGGVPLLLDLGGPMLWLANCPTPHRIIPCVSHDCDEVSTTYRPPGCPKPSLRGDGPCACPAYPRNPVDGRCRSDDATTITLAANTTDGQNPLLPVIFRAVGSCAPGELLESLPAGAAGVAGLSRLPLSLPTQFASLLKVANEFALCLPSGGDGVESLSVGGPFQLLAAPPVELAERLRENPLPLPQHPYNGGYYF

SEQ ID NO: 279556 - protein, 72 aa, Zea mays
  Clone ID: MRT4577_186534C.1.pep
PRVRGFMEDGESGHKQGDMLLVVHKGAHAERMDNEASIRQRLAVARGAYYAITGSAERTCAQAERMNSAGEP

SEQ ID NO: 279557 - protein, 41 aa, Zea mays
  unsure (1)..(41): unsure at all Xaa locations
  Clone ID: MRT4577_186535C.1.pep
MAPEXLSYDAKHYDSKMQELLSTGETEEFFTSYDEVFESFD

SEQ ID NO: 279558 - protein, 61 aa, Zea mays
  Clone ID: MRT4577_186536C.1.pep
AATASDLVSRSVHVDHRRHELPVAFAGGGAGERRSSAIGLLYTELWCNILIVVCGAGQRSP

SEQ ID NO: 279559 - protein, 58 aa, Zea mays
  Clone ID: MRT4577_186538C.1.pep
LDTREDGRDIQNVLLDLVGRRTVPQVFVNGQHVGGADDTVNALSNGQLEKLLGKSQSQ

SEQ ID NO: 279560 - protein, 79 aa, Zea mays
  Clone ID: MRT4577_186539C.1.pep
TSIPTAIGLDKLKHTSAEEGAVTEVNQEQQCLHGTITIVMIPVETIGPSWLRPYSGDLSIYKAGHQDANSPPPPETAVT

SEQ ID NO: 279561 - protein, 86 aa, Zea mays
  Clone ID: MRT4577_18653C.1.pep
SSPPKCPSVPPWVCPHVPPGQFWGGPPREIFSALFGPPPPPMFQTPPEKVSPPPPRAMPKKTRLKEPTPCWQGMGFYKIFFFPPDP

SEQ ID NO: 279562 - protein, 53 aa, Zea mays
  Clone ID: MRT4577_186540C.1.pep
PFNLLKWCFLNLRIGPLPNSKYFLSPPPEICCFQFLKIVFFIFVFPLCNFANW

SEQ ID NO: 279563 - protein, 184 aa, Zea mays
  Clone ID: MRT4577_186541C.1.pep
MGAWMSRVWFLMFPAREYKLVVVGLDNAGKTTTLYKLHLGEAVTAAPTIGSNVEEVVFKNLRFEVWDLGGQESLRTSWATYYRGTHAVIVVIDSTDRARINIIKDELFRLLQHADLEGAVVLVFANKQDLKDAMAPAEITDALSLHSIKDHDWHIQASCAITGDGLYDGLGWIAQKVAGKATAS

SEQ ID NO: 279564 - protein, 76 aa, Zea mays
  Clone ID: MRT4577_186542C.1.pep
PYIRRLLGSAKPIAFEIMHRERANKFFVKRSHMTARDLVVDPAASTSSTLLLRRCRPCCFHQRRLLVCLISTHHLI

SEQ ID NO: 279565 - protein, 79 aa, Zea mays
  Clone ID: MRT4577_186543C.1.pep
MGLSDGEWQMVLNIWGKVEGDLAGHGQEVLISLFKAHPETLEKFDKFKNLKSEEEMKSSEDLKKHGCTVLTALGTILKK

SEQ ID NO: 279566 - protein, 64 aa, Zea mays
  Clone ID: MRT4577_186544C.1.pep
TLARVRPPTVFFLGGVGPSSMLHFYPIKVAAPKFSPNPFLIISIGFIVVVAMLHFFGKLSPPSN

SEQ ID NO: 279567 - protein, 67 aa, Zea mays
  Clone ID: MRT4577_186545C.1.pep
AHIHRKRLILMLMTVCISSIIGLREDTHDTEDRRYTCFIFGRRVRSISMERHFNECADDVGIKIGFT

SEQ ID NO: 279568 - protein, 74 aa, Zea mays
  Clone ID: MRT4577_186546C.1.pep
SPLSDLDAHRCGRCRRRLVVCCGHGCYVTSFLTVVILGVGLNAKPDLTIETWAHQKALERLQQQELAAADTQAE

SEQ ID NO: 279569 - protein, 53 aa, Zea mays
  Clone ID: MRT4577_186547C.1.pep
ANSRPFIFYLCTLLMTNTVADSPTLTTAEIPWGGHSENVCTTICSCSIIFTIP

SEQ ID NO: 279570 - protein, 115 aa, Zea mays
  Clone ID: MRT4577_186548C.1.pep
MRAMSSAVNGMLRARLRGAARVRGGGGEGAGRWTTPGHEERPKGYLFNRPPPPPGESRKWEDWELPCYVTSFLTVVILGVGLNAKPDLTIETWAHQKALERLQQQELAAADTQAE

SEQ ID NO: 279571 - protein, 105 aa, Zea mays
  Clone ID: MRT4577_186549C.1.pep
GAFFFFFFVFFFFLQHHLSSDKSIARTQQQWRLHKHKRTRSRAPQVNLNRHIHRNRSLSLDGSSSRRKPSEEVAAVVGEQGSRHGSQQGGRRHRRRARRRGRRGP

SEQ ID NO: 279572 - protein, 96 aa, Zea mays
  Clone ID: MRT4577_18654C.1.pep
APTEHFFGFKNPLPKKNLFTPQTLKGTGRRNTALAVNRNGGAFVHKLGKKTFFFKNPAKITVGRKIHHSFFHKPSCPQIVFAVSQKKGLHIGGLPP

SEQ ID NO: 279573 - protein, 99 aa, Zea mays
  Clone ID: MRT4577_186550C.1.pep
CADGRSRFTEASGRCRFTEGRTRGGSLPLTALICSKDMPLISWVFYLQVNGSNYMVEMAWVKDIYGVSTAEAMDLLEHFLAMNPDNDGRVKAHDFWAQF

SEQ ID NO: 279574 - protein, 143 aa, Zea mays
  Clone ID: MRT4577_186551C.1.pep
VTQPRRQQQQKETLRRGSSSSRRAGEPPRQPTGRSPSSEESSPPRRAVKMPPRHRSMTPRRRTVQVLRMTTAWWSETQNPPQLYYSWIITATVLLNAHFRMVPRTNKTTPVHPLVWPKVCSVVNIHYSTGIKEKKKNAGRVLP

SEQ ID NO: 279575 - protein, 64 aa, Zea mays
  Clone ID: MRT4577_186552C.1.pep
SVCRGVDLNKHCFGFITLLGGPFTLVKGDDSHLVRRLAYTIVQKLGSTKLSTRSSQNRTCYACV

SEQ ID NO: 279576 - protein, 181 aa, Zea mays
  Clone ID: MRT4577_186553C.1.pep
MALASRAAAAAVACVLLALAASAAGAGSNSPAPAPAVDCISQAASLIDCIDYVQKGSSARRPSAACCGEVKTAVASPVIVGCLCSLAGSNSSNLGFPIDMKRVLALPGACGASNAAFSKCNISALSPTEAPAPSAAGGSSSGGAAASSPRAAAASSPPMTATALLAAVAAPLLAYYCCYLF

SEQ ID NO: 279577 - protein, 155 aa, Zea mays
  Clone ID: MRT4577_186554C.1.pep
VTQPRRQQQQKETLRRGSSSSRRAGEPPRQPTGRSPSSEESSPPRRAVKMPPRHRSMTPRRRTVQVLRMTTAWWSETQNPPQLYYSWIITATVLLNATTPRPPSCLFPASEMSCHYVITKEQGEGCQFPRRAACVRPRDDFPHYWREGASTGHCN

SEQ ID NO: 279578 - protein, 108 aa, Zea mays
  unsure (1)..(108): unsure at all Xaa locations
  Clone ID: MRT4577_186555C.1.pep
ILCASXGGAAVGANLCGRSGYSNENLASRKGERLPVYSTCTLVRRSLWTGVTRQEGRSHKPPAKASRLYFPLQNTKVFWGLLSLLFSRRFQGNEQPFFHPEKNRLEIS

SEQ ID NO: 279579 - protein, 64 aa, Zea mays
  unsure (1)..(64): unsure at all Xaa locations
  Clone ID: MRT4577_186556C.1.pep
NTXTDPSTFNYTTINFCLIDQTYPSYHLLKNHYKYLTHYQLFYHQIHKINTKSNNNIPIQVISF

SEQ ID NO: 279580 - protein, 41 aa, Zea mays
  Clone ID: MRT4577_186557C.1.pep
NSSWVVLEKIYPVAIMYYTFRSGGAAEAAGGGVSWGKDFAG

SEQ ID NO: 279581 - protein, 874 aa, Zea mays
  Clone ID: MRT4577_186558C.1.pep
MCLVNISHAVWHIHLSAALIMSFTFHHFEVDLKSHYFFVLIYYYLVKTSRAPSHPPRLVTHSTRTHYLIGQSQTNWAPSPPLPLPMAQQLPCVSSPRPLLAVPAGRWRAGVRGRPNVAGLGRGRLSLHAAAARPVAEAVQAEEDDDDDDEEVAEERFALGGACRVLAGMPAPLGATALRGGVNFAVYSSGASAASLCLFAPGDLKADRVTEEVPLDPLLNRTGNVWHVFIHGDQLHGMLYGYRFDGVFAPERGQYYDVSNVVVDPYAKAVVSRGEYGVPAPGGSCWPQMAGMIPLPYNKFDWQGDLPLGYHQKDLVIYEMHLRGFTKHNSSKTKHPGTYIGAVSKLDHLKELGVNCIELMPCHEFNELEYFSSSSKMNFWGYSTINFFSPMARYSSSGIRDSGCGAINEFKAFVREAHKRGIEVIMDVVFNHTAEGNEKGPILSFRGIDNSTYYMLAPKGEFYNYSGCGNTFNCNHPVVREFIVDCLRYWVTEMHVDGFRFDLASILTRGCSLWDPVNVYGSPMEGDMITTGTPLVAPPLIDMISNDPILGNVKLIAEAWDAGGLYQVGQFPHWNVWSEWNGKYRDTVRQFIKGTDGFAGAFAECLCGSPQLYQAGGRKPWHSINFVCAHDGFTLADLVTYNSKYNLSNGEDNRDGENHNLSWNCGEEGEFASLSVRRLRKRQMRNFFVCLMVSQGVPMFYMGDEYGHTKGGNNNTYCHDHYVNYFRWDKKEEQSSDLYRFCRLMTKFRKECESLGLEDFPTSERLKWHGHQPGKPDWSEASRFVAFTMKDETKGEIYVAFNTSHLPVVVGLPERSGFRWEPVVDTGKEAPYDFLTDGLPDRAVTVYQFSHFLNSNLYPMLSYSSIILVLRPDV

SEQ ID NO: 279582 - protein, 331 aa, Zea mays
  unsure (1)..(331): unsure at all Xaa locations
  Clone ID: MRT4577_186559C.1.pep
GDAGGLYQVGQFPHWNVWSEWNGKXTLRSMFQTIASLTTXYRDTVRQFIKGTDGFAGAFAECLCGSPQLYQAGGRKPWHSINFVCAHDGFTLADLVTYNSKYNLSNGEDNRDGENHNLSWNCGEEGEFASLSVRRLRKRQMRNFFVCLMVSQGVPMFYMGDEYGHTKGGNNNTYCHDHYVNYFRWDKKEEQSSDLYRFCRLMTEFRKECESLGLEDFPTSERLKWHGHQPGKPDWSEASRFVAFTMKDETKGEIYVAFNTSHLPVVVGLPERSGFRWEPVVDTGKEAPYDFLTDGLPDRAVTVYQFSHFLNSNLYPMLSYSSIILVLRPDV

SEQ ID NO: 279583 - protein, 77 aa, Zea mays
  Clone ID: MRT4577_18655C.1.pep
MPQPPDVMGPDVSQPPGPPAGQAQPSVLWSAQYVDPVIERLNVFFLAAWAPVYAIFQTWGFLPCAKRCVLVAHNCLS

SEQ ID NO: 279584 - protein, 131 aa, Zea mays
  unsure (1)..(131): unsure at all Xaa locations
  Clone ID: MRT4577_186560C.1.pep
GRVGFRKECESLGLEDVPTSERLRXHDHQPGKPDWSEASRFVAFTMKDETKGEIYVAFNTSHLSVVVGLLERSGFRWEPVVDTGKEAPYDFLTDGLPDRPVTVYQFSHFLNSNLYPMLSYSSIILVLRPDV

SEQ ID NO: 279585 - protein, 95 aa, Zea mays
  Clone ID: MRT4577_186562C.1.pep
GKACLLGAYDNQSSVRERSHGGRTLRAQKIVKRCPSCATDISDFLADPQINRDIMDVIESLQRKGDTTTKDDAASYGYGADKAEEFRGGDLQGGT

SEQ ID NO: 279586 - protein, 70 aa, Zea mays
  Clone ID: MRT4577_186563C.1.pep
CHTVVALVNSDTPGKEGERNGLLGGHVAASDARVGFYYNWHARGGGARAANRADNLIQPLASLSTHASVC

SEQ ID NO: 279587 - protein, 43 aa, Zea mays
  Clone ID: MRT4577_186564C.1.pep
DVSEYAWARRVGLGHVLVRSFEVLAVQGTHRPSRRVTVHDGRH

SEQ ID NO: 279588 - protein, 265 aa, Zea mays
  Clone ID: MRT4577_186565C.1.pep
ALSTKGHEAPPERKKRKTPPPEWTGAKASDATEPSSKKKLVLFGRACRPDDEARVPETLAAPCCAGGGEQSSKGAAQVKNAGHQSINDALGHKAKTLDEMRELYPHLVDESMALLDPAVLERVLPRIDDNEAQALDKKIKRARRQLTKAIRESAMMKNMETSVVFLCEATRLQMEKPRMDKQDGLDICAQERLARVEREIVELRQIVIDSHYQATIQSNLLHDNSSLKGVRCKSEESHPQLAVAENQIPHKILQIEDRCAIWLPP

SEQ ID NO: 279589 - protein, 46 aa, Zea mays
  Clone ID: MRT4577_186566C.1.pep
LFFLLEKKGNTVFFKVLLIDMDLRQHTGTHLAYFMTKNRAEAGYEN

SEQ ID NO: 279590 - protein, 70 aa, Zea mays
  Clone ID: MRT4577_186567C.1.pep
KCCQQLRQVEPQHRYQAILGLVLQSILKKKPKNGQVGGLLAAKKAKQLRAMWGLKKPTQCPYVAAGGVPH

SEQ ID NO: 279591 - protein, 51 aa, Zea mays
  Clone ID: MRT4577_186568C.1.pep
YQSVSLHKKEPEKKNSIKPQKVFTINYSPFSIPFTRLFKYPIISLQCHSLV

SEQ ID NO: 279592 - protein, 99 aa, Zea mays
  Clone ID: MRT4577_186569C.1.pep
MRDMPVVRRQEPTVVRTEDDVVSGGEDSDGEFEFPSVSRESAAGVGGAASADELFAGGHARAFYPVFGRVLDEAAAPAPTAPLGRLFQLEQARYSSVAS

SEQ ID NO: 279593 - protein, 57 aa, Zea mays
  Clone ID: MRT4577_18656C.1.pep
LSSFFFFCYGKTPFRDTRMRILFHGLDELGMLQGQLSTWLLYNLNLKCQWISIPGII

SEQ ID NO: 279594 - protein, 50 aa, Zea mays
  Clone ID: MRT4577_186570C.1.pep
VIRRSGACGCCSLRCVVIVSSCWCIVSWLAHFSSRALLLQQDASAWVFLK

SEQ ID NO: 279595 - protein, 93 aa, Zea mays
  unsure (1)..(93): unsure at all Xaa locations
  Clone ID: MRT4577_186571C.1.pep
MTKRTNKAAIDDXYGTSHGASLXRKQIKNMEHSEHXQYFREFCGKIVVKRKAVGIRGCKDCHKEKAGGAYTMNTDSARTVRSTIRRLREQTEA

SEQ ID NO: 279596 - protein, 65 aa, Zea mays
  Clone ID: MRT4577_186572C.1.pep
MASEAQRSRWDGSSPWGWCPEDEMKGAAYLSWREVLEVDVQDQPLEVALWSQREACFSTRHGSSM

SEQ ID NO: 279597 - protein, 93 aa, Zea mays
  Clone ID: MRT4577_186573C.1.pep
MAYSCSHLHLLLLTAPMILVCLLLATLLAFCSAPAPTLGARVLIPDGAGSVTKAQQGGTGSGSNVTANEYLAPHNQARASVGVAPLRWNAGLA

SEQ ID NO: 279598 - protein, 80 aa, Zea mays
  Clone ID: MRT4577_186574C.1.pep
LPRLLLVLLGAGAGAGPRPLGGGVVLASQCAVVGVPVRAVALVVVLDVAFLLPCLASAVGAVFPAPGGLGGSPLCMSPWC

SEQ ID NO: 279599 - protein, 60 aa, Zea mays
  Clone ID: MRT4577_186575C.1.pep
PPRPTTTGKEDHPTFNFCVLNGLGSLSQTMQACNTTAGFQIVATNGQRPFCDPPCIFFKQ

SEQ ID NO: 279600 - protein, 279 aa, Zea mays
  Clone ID: MRT4577_186576C.1.pep
MSRERETLRNHHNLGYGLCVSVCCVHRRSLHRYMRALLADNRKLQKAMASHEHKIDQPYYGRPPIPPEAPAAGVRPLARRDASYALLCHAFRALTLALIAVGVVALVLWLVYQPSSLKAYVDSAQLTRFDLDNSGTQTHQLRYNLTVGVSIRNPNRKQAVLYRRLDAVALYGGERLGYVDFPRARQERRSTMEVRPSFRGQAALAGAGAAAALFGREKGEGFFSINVKLHTRVRLKVAVVDSAEYRPDVDCYVRVPDPGNATAVALGFTPTQCHVDDFS

SEQ ID NO: 279601 - protein, 63 aa, Zea mays
  unsure (1)..(63): unsure at all Xaa locations
  Clone ID: MRT4577_186577C.1.pep
XXXALXXXLXXVSRXTTETLLLIXXVHSMXGRRRXYMPHXAXXHRSXLCKNXSMSHCVXMMFH

SEQ ID NO: 279602 - protein, 107 aa, Zea mays
  Clone ID: MRT4577_186578C.1.pep
MASASSSFRLALFLVLLAFVSLARHATGEASPSRRLMELYKPPPSDLLRYHDGAVLSGDIPVSVLWYGRFTPAQKAIVTDFLLSLSAAPTSPAPSVSQWWGTIDRLY

SEQ ID NO: 279603 - protein, 61 aa, Zea mays
  Clone ID: MRT4577_186579C.1.pep
LCLRLAYSPSPGRVRVPEGLEDSGHPVSESRPLSRIVDTTDFQGVWPEPLTTTSLYILNTY

SEQ ID NO: 279604 - protein, 67 aa, Zea mays
  Clone ID: MRT4577_18657C.1.pep
KRIPLPPNHIGPPSGETKGGFLSGYPKWPRSNQIKMWFPGPPGVKISARFKGSPWGFFFCTEIFSAP

SEQ ID NO: 279605 - protein, 52 aa, Zea mays
  Clone ID: MRT4577_186580C.1.pep
PPTTPLQHALYLIPHSYTDCAQPTIRSKYHITNTIVNHHGHFTTYYIHTLSN

SEQ ID NO: 279606 - protein, 47 aa, Zea mays
  Clone ID: MRT4577_186581C.1.pep
PKKKKKKKKKKKKKKKKKKKKKKKKKKKKKKKKKKKKKKKGKRVLGV

SEQ ID NO: 279607 - protein, 83 aa, Zea mays
  Clone ID: MRT4577_186582C.1.pep
LLLTFKVHVDFGPPPVCGIQLKKIFVLSAPLFYLILKKSLVSVTALETMIPSNFPKKKKKKKKKKKKKKKKKKKKKKNRQGAR

SEQ ID NO: 279608 - protein, 64 aa, Zea mays
  Clone ID: MRT4577_186583C.1.pep
SPERQLANVGCPSMRVSAVASHVCPVTAMSGDRRYLVVRWPDRCTIWLQAGVCKLERPLGASSK

SEQ ID NO: 279609 - protein, 264 aa, Zea mays
  unsure (1)..(264): unsure at all Xaa locations
  Clone ID: MRT4577_186584C.1.pep
SKQSNIATPDNAAEERNELESDPDPYAQPAEQVELSKDNENSQLVKTEETSDQSNFVVLRRTTEDSVAREIDPPVAIKQEQPVEEIKGVDATEAEEDFRTTQAVAIEKLASVNKIATVEPTYDIQRMDDLEATEEKKHAEAINEGDQSNIAVSEEQTPTYNGETPEDHHVESNEGTMGNETDNIILAHGIKDEIQKSAELKDGPCDLSETVLTTRRSENMIDEDNVQTYGNDTVEASNSIHQVKEEPDAGTEHNSSQNXSECCG

SEQ ID NO: 279610 - protein, 49 aa, Zea mays
  Clone ID: MRT4577_186585C.1.pep
TPRLKVVDSCYFFSPAVTYGHVTYVWSHQNEGCHAKCRVVAPCSALSNK

SEQ ID NO: 279611 - protein, 114 aa, Zea mays
  Clone ID: MRT4577_186586C.1.pep
SPPPSSRGLYLRSTPGPPRWPGFLFFVKVPFQPRQFELAMAFKALFFGPRPGPKFFAQAPLLIQAITPIRACSPCPIVPLGFSPKKKKKKKKKKKKKKKKKKKKKHQKKKKKSG

SEQ ID NO: 279612 - protein, 77 aa, Zea mays
  Clone ID: MRT4577_186587C.1.pep
TGPRVGISQKPPVWRNQSYSPPQGGTGFDFFFPGPKFNLGQEVQSFPPCFPVKANQSQMEALIFVGTLIKAFSRVGF

SEQ ID NO: 279613 - protein, 73 aa, Zea mays
  unsure (1)..(73): unsure at all Xaa locations
  Clone ID: MRT4577_186588C.1.pep
VETEETRSTARGDDPRECLHGVQRKRPIPFSREXRGNDPQAHRKQERLHAYDPKDRPAAQERLADPCISSLSG

SEQ ID NO: 279614 - protein, 49 aa, Zea mays
  unsure (1)..(49): unsure at all Xaa locations
  Clone ID: MRT4577_186589C.1.pep
TGVSTPFNFFSSTFLINPIGPSSSESSDNSSMTRGLFSGRXAHACSTKE

SEQ ID NO: 279615 - protein, 70 aa, Zea mays
  Clone ID: MRT4577_18658C.1.pep
MGFLVTTLIFVVIGIIACLCTRICCNRGPSTNLFHLTLVITATICCWMMWAIVYLAQMKPLIVPILNEGE

SEQ ID NO: 279616 - protein, 282 aa, Zea mays
  Clone ID: MRT4577_186590C.1.pep
MSAVVCGKRSSSIFADELLPPSPSSPHSSHQPAAKRSRRSPSHRGGSDGLRPEALVDYLLALFPDMDPQLLEKALEASGDDLDSAIKSLNLLRLESAEAILSSTGFKPENCLQTAIQPSLEGIPNGGVDTATEHPPSVDNYQTSYNGSEWVELLVTEMRNASDINDARARASRALEALEKTIVERAGAEATQNLHKENMMLKEQLTVVLRENSVLKRAVAIQHERQKEFDERSHEVQNLKQLVLQYQEQVRTLEMNNYALTMHLKQAQQNSSIPGRFNPDVF

SEQ ID NO: 279617 - protein, 68 aa, Zea mays
  Clone ID: MRT4577_186591C.1.pep
CPSHPRSNYVLYRMDRLFLVPKTRSLTTKNSINIETFAADLISRVEQASAQILKTMYPNQKSQGQSLG

SEQ ID NO: 279618 - protein, 103 aa, Zea mays
  Clone ID: MRT4577_186592C.1.pep
GARYGVRSVSSTSVWASALLVSPRWPPAHFLDPIFSVKAWFIPVLAFACRIRHGILFPWVHQGMLGFVLNLRSWPDIYPRVECLCDNMVMLVRIQSPCPFNSN

SEQ ID NO: 279619 - protein, 166 aa, Zea mays
  unsure (1)..(166): unsure at all Xaa locations
  Clone ID: MRT4577_186593C.1.pep
SLTPPALRRRRRVTSPTCATSDNYPLGDMLLGIHVTHRIDVFCSRHIENRCYPMRIIGSDAYXPSSHATTTTXININLGFQXGYICSLFATAXLILTRXKMNDASGIKLHVVKPAEGLNRIVGELPSEHPLXETRALRXLLRHTPTQEDAGALLGCTITAVRQLFR

SEQ ID NO: 279620 - protein, 94 aa, Zea mays
  unsure (1)..(94): unsure at all Xaa locations
  Clone ID: MRT4577_186594C.1.pep
KIRFSLXGRGSFRWGAQNXQGVRGTGKKGGIIVFPARKFPPLSVGRGNSLKAMGFFVGEPVWAPNNWPDGPFPGKKEVLEKIPPPGGNPTLEAR

SEQ ID NO: 279621 - protein, 41 aa, Zea mays
  Clone ID: MRT4577_186595C.1.pep
MATTAASSLLKSSFAGSRLPSATRTTTPSSVAVATPHTGRS

SEQ ID NO: 279622 - protein, 118 aa, Zea mays
  unsure (1)..(118): unsure at all Xaa locations
  Clone ID: MRT4577_186596C.1.pep
ERASSDHNHILIKLDYPHEVXSCFYGYYNACAEEGPRVLRSLTLVSSRGRYGPFGDEVGAYFTSATTEGKVVGFHGRSGLYLDAIGVHMQHWLGVGVGDARTARASAPSKYYISRYLF

SEQ ID NO: 279623 - protein, 138 aa, Zea mays
  Clone ID: MRT4577_186597C.1.pep
RPGQKKDMVLLRIEAASDQPICIHRPLLGFQEIWCAVATGLSLWVGHHFGSVVATSGAAASATRPDRPSATTVVHGVLGHRSASSNLQALELETPPIGRPLPAIDLHPQSTHRKVALDISCTNSTTKIAFNTRMVRLR

SEQ ID NO: 279624 - protein, 337 aa, Zea mays
  unsure (1)..(337): unsure at all Xaa locations
  Clone ID: MRT4577_186598C.1.pep
AFFSGPVSLCCFCPHPFRXFVGDVVNLKFDEEPDYAKCTSLFHSVLSVVGSNPDVRPINTDGAQKXLIHQFGQKRGRFFIEEEADEQPKKKIRVGMPATQWISVYNGRVPMKQRYHYNVSDSRVGQHIEKGNADGLFISCITSCSDLWALIMDAGTGFTSQIYELIPHFLHKEWVMDQWERDYYITAVAGANNGSSLVVMSKGTKYTQQSYKVSNSFPYKWINKKWQDGFYVTSMATAGSRWAVVMSHNAGFSNQVVELDFLYPSEGIHKRWDRGYWITAAPATCDQAAFVLSVPRRRLTDETQETLRTINFPSKHVKDKWSKNLYLASVCYGRTIS

SEQ ID NO: 279625 - protein, 53 aa, Zea mays
  unsure (1)..(53): unsure at all Xaa locations
  Clone ID: MRT4577_186599C.1.pep
SLXVPXPXVGSWLPXPXCXRRALRLXVLVSLPSFFSPPLGGSWPLSXRPXMVG

SEQ ID NO: 279626 - protein, 51 aa, Zea mays
  Clone ID: MRT4577_18659C.1.pep
VCASDLHLNTIVPVHDSYSVMCKKSMSQQYSIVASLHLHMVCAAPKHLDAW

SEQ ID NO: 279627 - protein, 206 aa, Zea mays
  Clone ID: MRT4577_1865C.1.pep
GRDPPARSTGRLPSRFVSIFSPPHHTRVNQPNPRRLSPSSPIPRRPAIPAARRPKPYAYCSTPGIDSVITLSEMPSASKSKAKERSAAKVAKEQPKVAAKPMGNATLASSYNNLSGKFHVLEPSSSLLGSQGIDKFRNTDEIDEHSRSSHGTGDFDCASNNGSCSGDSEDTKEKSTSTASRVDSVPGCDIDKREKIRQKNENERKS

SEQ ID NO: 279628 - protein, 85 aa, Zea mays
  Clone ID: MRT4577_186600C.1.pep
INKVVELDFLYPSEGIHKRWDRGYWITAAPATCDQAAFVLSVPRRRLTDETQETLRTINFPSKHVKDKWSKNLYLASVCYGRTIS

SEQ ID NO: 279629 - protein, 94 aa, Zea mays
  Clone ID: MRT4577_186601C.1.pep
KKIKKNKKKKKGGGRFGGSRFPSPCLRRFGFFLGPPNFISLAGVFPRRAWETPGVPPFFRFAALPLFAGWRFSEGARPVRLSHQLPPLFGDWAP

SEQ ID NO: 279630 - protein, 80 aa, Zea mays
  Clone ID: MRT4577_186602C.1.pep
TLFKHLKVKTSPMSISTFYRFNNLAHHTHVQKVRSQKLDTKSSGVGQRNVWRGRGFPQHGRVEGVEGGRGSDIMLVGLKP

SEQ ID NO: 279631 - protein, 178 aa, Zea mays
  Clone ID: MRT4577_186603C.1.pep
SSNSVAVAALKGPLVSIDEMEAIKKMNYRGWRSKVLDITYPKKSGRKGLEETLNRICAVARKAIREGYTILVLSDRGFSSDRVAASSLLAVGAVHQHLVANLERTRIGLLAESAEPREVHHFCTLGGFGADAICPYLAIEAIWRLQNDGKITPNGDGQPYSKEELAAKYFYASNYGMM

SEQ ID NO: 279632 - protein, 53 aa, Zea mays
  Clone ID: MRT4577_186604C.1.pep
KRARAFKLTVFNTKAFYFPISPRKVFWVFKKWLGALNPWSPGPKKIPGRKNPF

SEQ ID NO: 279633 - protein, 86 aa, Zea mays
  Clone ID: MRT4577_186605C.1.pep
DEYIDIQTNQQSVSELQEGGSDGRRAARLHRTNASHPVKKKPRGGDLTPQQKPRRGETVSSYRARSLYGTSGRHLASDEATAGPIC

SEQ ID NO: 279634 - protein, 144 aa, Zea mays
  Clone ID: MRT4577_186606C.1.pep
PLYLTLSNTSSKADYNARTGCLRRYNRLAFHHNRELKQQLDELQKKYPKTKIMYGDYFKAALQFVVNPGKFGFSTALQACCGAGGQGNYNFNLKKKCGEQGASVCSNPSSYVSWDGIHMTEAAYRKVANGWLNGPYAQPPILKS

SEQ ID NO: 279635 - protein, 72 aa, Zea mays
  Clone ID: MRT4577_186607C.1.pep
LLPLCFEHPQHTLHISRSLHLYMMSRGLQAPGLHRTRPRLSPDRSTYVVTSTAESTPGDFIKVLLAGKCQHP

SEQ ID NO: 279636 - protein, 99 aa, Zea mays
  Clone ID: MRT4577_186608C.1.pep
RSLWQQVLAATGREARAPPTRRWGGTACRAAGAPGCRARACRRGSGAAGTTAWSTAAATISCCGARPRCSGPSQAPWPAPLPPRRRAPRCRAPARTPRV

SEQ ID NO: 279637 - protein, 71 aa, Zea mays
  Clone ID: MRT4577_186609C.1.pep
VVSKLFALQATSEIPGNVANVQKLLSHPAFDLWNFHAKDGSGYKFLGEIVLQLDKINPQVNAKYLFSWVFT

SEQ ID NO: 279638 - protein, 77 aa, Zea mays
  unsure (1)..(77): unsure at all Xaa locations
  Clone ID: MRT4577_18660C.1.pep
PTSPTKILTSEQGLKYEFILREILKDLLXEMSHSXAPVLDPELELVIHLQRDQRKNLSHSLIQTDVLNKVHIMIDAL

SEQ ID NO: 279639 - protein, 127 aa, Zea mays
  unsure (1)..(127): unsure at all Xaa locations
  Clone ID: MRT4577_186610C.1.pep
PESTLXLKTLPFLSLLFYTLQXLHXMEHFSNPNTKSPPQSTLGILLTTYSSIHLLHKLIQHIRHSKPFSPYPPNSISHTPAPYTHPSPNIPNPTHTILSIPSATACPFQRPSTNPTRSSKFQTYLAH

SEQ ID NO: 279640 - protein, 103 aa, Zea mays
  Clone ID: MRT4577_186611C.1.pep
SAAIVSWVGRWPSRLRVLRRLLRGMRLWVGVPGLGGPVWLLLRCPPRLGWVWRWSVFFPFGLCRLLGFLGGFPSFVRCGFGTCGSAHRPSRFVRFFGFGGNFV

SEQ ID NO: 279641 - protein, 52 aa, Zea mays
  unsure (1)..(52): unsure at all Xaa locations
  Clone ID: MRT4577_186612C.1.pep
QAIETIGIYASVLKAQEIAKGXGYSDVIYLDADHDKCLEEVSSCNIFGVQRQ

SEQ ID NO: 279642 - protein, 114 aa, Zea mays
  unsure (1)..(114): unsure at all Xaa locations
  Clone ID: MRT4577_186613C.1.pep
PSHRRIPNSSGFERPCPSSEKGGKALGTCGTKRHRMDVRDNTHGXILKPTILTLLRRXSLKRISGLIYKDTRAALYILLENVTPNTTTYTAHARRKIATDINCAYLLKHHCQTL

SEQ ID NO: 279643 - protein, 77 aa, Zea mays
  unsure (1)..(77): unsure at all Xaa locations
  Clone ID: MRT4577_186614C.1.pep
FPALXFFACWXACXXFXXAXXPARXPPPLXXXXXCPGLVFLGRRXGXSPPRRFSLXXVXARPGAPSPVPXCLRGPXL

SEQ ID NO: 279644 - protein, 93 aa, Zea mays
  unsure (1)..(93): unsure at all Xaa locations
  Clone ID: MRT4577_186615C.1.pep
IPGSTHSSVGLVRSKTHHSKLPSNYSAWISTKILSLLSLFDLSASATYAFIIPQRSFAPSTIIPQFLRPLSSMGFXHLSLHAYKLQHALASSV

SEQ ID NO: 279645 - protein, 281 aa, Zea mays
  Clone ID: MRT4577_186616C.1.pep
LYGSLTTYENLFGPNLKVAAPGEFIGSIAIPLPVGSVLVLNGNGADVAKHCVPAVPTKRISITFRKMDPAKRPFGFEDDPELLNLAPLGTVVQETGISSDEGKGKLPDVQITNMGKASRGKRSKGRTAAGKYGSGILGEQSPGHAQAPAVEVQSLRNPHGQRPVSASSAERERNSAGRSRESRHQSSTLVVHSQVDNSRQWPRRSAQERWHSNGMSFSEDGVGSAERRPRVEHRQISLINQTISDDMDSLSLSGRESGDQPRASVRTVYNKPRRTRLSLDD

SEQ ID NO: 279646 - protein, 161 aa, Zea mays
  unsure (1)..(161): unsure at all Xaa locations
  Clone ID: MRT4577_186617C.1.pep
MTNTXHIKPQFQRPHLPDENTKSEAATKNSAAAIAAEAAEKLFSAAWWQPNKTXXXTTTRSGRGKKSXPNPRGHGKTQRSQHLHQSQNARGPHNXQRPHPSTHTPSAVGPQPTLQNPTAASQGQYQMLWNSSSQHYLQSTRGGISSYGYGSITPLPPGTTP

SEQ ID NO: 279647 - protein, 252 aa, Zea mays
  Clone ID: MRT4577_186618C.1.pep
MAACDDDVAPSTASAYLDPSYWDARFGKEEHYEWFKDFSHFRHLLAPLLSPSLSVLEVGCGNSRLGEDLLREGVAGGITCVDLSPVAVQRMRDRLAALGTKGVDAVVADMLDLPFEQESFDLVIEKGTMDVLFVDSGDPWDPNPTTVENVMKMLNGIHRVLKPEGIFVSIAFGQPHFRRRFFEAPEFTWSIEYSTFGDSFHYFFYTLKKGKRSLESSSYQNTLPSPVAPRINMVHEELESEDFIFLTNLDGL

SEQ ID NO: 279648 - protein, 38 aa, Zea mays
  Clone ID: MRT4577_186619C.1.pep
FLQTHHSGLNECYQHKAAPHEVTNDGDHYGPKDTPNIR

SEQ ID NO: 279649 - protein, 98 aa, Zea mays
  unsure (1)..(98): unsure at all Xaa locations
  Clone ID: MRT4577_18661C.1.pep
GCFGRWLFFSSXFPSLCVSAGAALILRLGKWRVSHDPSVTGHVMSCHGSLLTRGGCDFSRCRGRWMALAGRGHLDCDYRCPKGGHGPTQPEPDSVRPV

SEQ ID NO: 279650 - protein, 83 aa, Zea mays
  unsure (1)..(83): unsure at all Xaa locations
  Clone ID: MRT4577_186620C.1.pep
QQETGPSKLMPLDXINPXVAGHAAAFAITEVPDCPLGGGVRLTASPILLETGAVVCIRETWFNXVGPCLLPRLDHTFGLGIWG

SEQ ID NO: 279651 - protein, 75 aa, Zea mays
  Clone ID: MRT4577_186621C.1.pep
PAGKLLCTQIQRWQRRPQGYTMDMGLCCMRNRLGLHEHKLGHRSVLHGRREVLDHQPYIRRWIVIRVEVFRARRL

SEQ ID NO: 279652 - protein, 170 aa, Zea mays
  Clone ID: MRT4577_186622C.1.pep
MAGLVLAKCLLLFSLSAALLSLLGTGASAIGLPQPHAPVNFTIGVQGMVWCKTCRYIGYNANMDASPLKGVEVYLQCRHGPGRLKKVQGASGQGGYFVIQSAQMASFTNDECKVYAESSSSTACSLVDEPAAGEGLPLKFDSFVKHGDGLQALYSVGNFFFRPSNPNKCY

SEQ ID NO: 279653 - protein, 66 aa, Zea mays
  Clone ID: MRT4577_186623C.1.pep
ISPCNKILTPSTNVMLPESNQKHKWTFRYDSICSSLNQPRYCMQSEARIPVTTGVQEEAGEWYKGK

SEQ ID NO: 279654 - protein, 38 aa, Zea mays
  Clone ID: MRT4577_186624C.1.pep
SSTPNIKYAVDNTCLHISSWLNSEITHNKSLLLTCPLS

SEQ ID NO: 279655 - protein, 348 aa, Zea mays
  unsure (1)..(348): unsure at all Xaa locations
  Clone ID: MRT4577_186625C.1.pep
MEREEIGVSLENSISYLSDDCLLSIFNKLESGSERSAFGLTCKNWFKVRNLGRKSLTFHCSFNPAIDKEHAKCIPKILAHSPCLNRISLAGLTELPDSALSTLRMSGSSLKSLSFYCCSGITDDGLAQVAIGCPNLVVVELQSCFKITDVGLESLSKGWRARALKSXNLGSCMGISDQGVSGVFSNCSIICTLSITGCRRLSGAGFKGCSSSFCCLEAESCMLSPDGLXGNLAFAKSLCVLNLRMCRYLTDDXAIASGCPLLEEWNLAVCHGVHLPGWSAIGLYCNKLRVLHMNRGRHICDQSLLALGNGCLCLEVLXLNGCVKITNNGLADEVISIGPSIENLFRLH

SEQ ID NO: 279656 - protein, 59 aa, Zea mays
  Clone ID: MRT4577_186626C.1.pep
ELSGLRPRHTVSFRVARPKILTLTREHETLSIYSNLYSRVMNDDKKMSSSHKKKKKKAA

SEQ ID NO: 279657 - protein, 294 aa, Zea mays
  unsure (1)..(294): unsure at all Xaa locations
  Clone ID: MRT4577_186627C.1.pep
NRLXSGSXGSAFGLTCKNWFKVRNLGRKSLTFHCSFNPAIDKEHAKCIPKILAHSPCLNRISLAGLTELPDSALSTLRVSGSSLKSFSLYCCSGITDDGLAQVAIGCPNLVVVELQSCFNITDAALESLSKGCRGLKSLNLGSCMGITDQGVSAIFSNCPNICTLIVTGCRRLSGAGFRGCSSSFRYLEAESCMLSPDXLGYLSLASGSGCPLLEEWGTLLFSMGVHLPGWLYCNKLRVLHVNRCRHICDHSLLAIGNGCLVLHVNGCVKVTNNGLADEVMSIGPSIENLFRLH

SEQ ID NO: 279658 - protein, 140 aa, Zea mays
  Clone ID: MRT4577_186628C.1.pep
MQLTNLFCLASVLTSVSAITVSYDPGYGEAGRAMTAVSCSDGTNGLITRYGWKTQGQIPKFPYIGGAQAVAGWNSPSCGTCWKLTYKGKSINVLAIDHTAAGFNISPAAMNALTNNQAVQLGRVDATATQVAVSNCGLKK

SEQ ID NO: 279659 - protein, 237 aa, Zea mays
  Clone ID: MRT4577_186629C.1.pep
ARNSARGLSFSQRSCVVFAKLTFICPHLLILDEPTNFLDLESVDSLIGACNKYKGALLLVSHNRDFLTRCAKEFLSVVPGQFLLFDNLKAAERATYTFIEEMEDGGSVNNVANLIKKNPGGGSVHSSQKTGDFQSDVKEEKDAITGMKVLTIGGSTPMAPITKKPAVSAVAFKANDKVQALWTDGKWYKAVVKKVLPGNKYQVTYTEYGNTADVPAASVKAAPAAPAAGAKAVPVKK

SEQ ID NO: 279660 - protein, 43 aa, Zea mays
  Clone ID: MRT4577_18662C.1.pep
ATQGGFFFSKKKKKKKKKKKKKKKKKKKKKKKKKKKKKKKKQH

SEQ ID NO: 279661 - protein, 90 aa, Zea mays
  Clone ID: MRT4577_186630C.1.pep
GAGSISDACLFHTAPQINPTFYGGKNGWRVPILLLGRNTIGIHQQPLSVSTVYKRPGGVYGSPLAVHVVSEYGSSCPADFYEKIIYRIVL

SEQ ID NO: 279662 - protein, 82 aa, Zea mays
  Clone ID: MRT4577_186631C.1.pep
MQNEGGKTGDLYVPRKGWATNRNITAKDHAFDQKKIGHWDAKGLYKGHLTTLAFSGFARAKGNANSSLNRLGKKKADIKQKI

SEQ ID NO: 279663 - protein, 48 aa, Zea mays
  Clone ID: MRT4577_186632C.1.pep
HTINDILTNLLLHKILPNSNDMSLTHSYLLAETQAGTAPPDANDPQHP

SEQ ID NO: 279664 - protein, 64 aa, Zea mays
  Clone ID: MRT4577_186633C.1.pep
RPPFFFFFFLKGQKLRPSWGGLCFFKVQIGKKKLHLCTNKWEAHLEQLFKFFKRELSKKVLPLF

SEQ ID NO: 279665 - protein, 46 aa, Zea mays
  Clone ID: MRT4577_186634C.1.pep
PDLSFLPLFQGKHSEMKLKQSKRETHRGHSLSKGEGWQVGVRNAST

SEQ ID NO: 279666 - protein, 80 aa, Zea mays
  unsure (1)..(80): unsure at all Xaa locations
  Clone ID: MRT4577_186635C.1.pep
PCCXALWEQXXFXXGSLKHSGGAPNXIXLKLELHAANLGTTPFSPRPLPCGFSSRXCCXXYNYXHSNLRGLTTHXXYXXF

SEQ ID NO: 279667 - protein, 819 aa, Zea mays
  Clone ID: MRT4577_186636C.1.pep
MFTVGTSDIKILKFADYIRKEEVYGLPGSELTDHQGSALKENETEPGAGPLELIVELGVVGISLIDHKPRELLYLHLQKVFVSYLTGYDFGTTSRFKLILGELQLDNQLPLSTMPVVLSTESRPDSNRSVFKANVAVSNVTSNGIQVYPHVYIRVTDQTWRLNIHEPIVWALFDFYSNLRFVTTSNSTTVTEVDPEIRIELIDISEIRLKISLETAPSQRPRGVLGIWSPILSAVGNALKIQVHLRKVMHRSRFMRKSSIIPAITNRIKRDLIHNPLHLIFSVDFLGVTKSTLSSLSKGFAELSTDGQFLQLRSKQVWSRRITGVGDGLVQGTEAFAQGLAFGVSGVLRKPVESARQYGVIGIAPGIGRAFVGFIVQPLSGALDFFSLTVDGISASFMRCVNILSNKSVPQRIRDPRAIHRDGIVRDYDKFEAAGQMALYLAEASRYFACTDLFREPSKYAWSDYYEDHFILPSQRIALVTNKRVMLLQCLDLDKMDKKPSKILWDVPWEEVLSLELAKAGYQRPSHVIIHLKNFRRSENFVRLIKCNIDNEREPQALSLCCSIRKMWRSHQAAMKVIPLKVPSGQRHVYFVSDDDKKESHSLSRPLLSSGGTSTDVEQQFINNTVHFQKMWSSEPEIQSRCKLVAKQIADDGRVFSIWRPLCPNGYVSIGDIAHVGIHPPHFAAVYKNINGNFALPLGYDLVWRNCAEDYKSPVSIWLPRPPGGYVALGCVAVPSFKEPTLDCAFCVDERLAEDAAYEEQIIWASSDAYPWGCYIYQVQSASMQFMALRVPKEQSELRPKKILESFLQQASETQTSRA

SEQ ID NO: 279668 - protein, 77 aa, Zea mays
  Clone ID: MRT4577_186637C.1.pep
DEFLDLVSSREEYGVAFVVVGAGLGCWSDAVLLAVVDLGGRDRADGAAAGQRGDGHGGEGRHHGDRRHQCALCARRG

SEQ ID NO: 279669 - protein, 112 aa, Zea mays
  unsure (1)..(112): unsure at all Xaa locations
  Clone ID: MRT4577_186638C.1.pep
HYEGFFFSIIYLVLLNNFFIYLNLFFLFFFFLIFYETFFFFVYILFFFLFFFYFFLFLFILFYFFIFIFFIFLLFFLIFFIFYXYLLYFICLYYFIYFIYYXYFLFXFYYFN

SEQ ID NO: 279670 - protein, 297 aa, Zea mays
  Clone ID: MRT4577_186639C.1.pep
MSVEELKELKNQLTKLQEAGYIRPSSSPWGASVLFVQKKDGSQRMCVDYRSLNDVTVKNKYSLPRIDDLFDQMRGARKLRDNQLYAKFSKCEFWIDELPFLGHIISKGGISVDPSKVTAIVGWKIPSSVTEVRSFLGLAGYYQRFIEGFSKIAKPVTSLLEKGKEFKWTWDCKDSFNQLRFKLMAAPVLVMPDLQKGFDIYCDAYGQGLGCVLMQEGHEIRKGQIGDAKIQEIKDLITQGRGLEFMEDEQGTIWFKNRICVPEIESLCETILKEAHDSDYSIHLGSIKMYQDLKQKY

SEQ ID NO: 279671 - protein, 95 aa, Zea mays
  Clone ID: MRT4577_18663C.1.pep
GKVGGGRWGGVPQTPVADSAKGRPWGPWVPILTGGGSPSRGDYPRGPKRIFSPGKFRGSISPPPIKKNGQGFFLRARGAPFLGPPKKPPNFFGWF

SEQ ID NO: 279672 - protein, 127 aa, Zea mays
  unsure (1)..(127): unsure at all Xaa locations
  Clone ID: MRT4577_186640C.1.pep
KRPNEPRIKNGKSKQQRSEGPGPGKGPRRQXRARGGSPGAGTQTGTRAPRGPPPTRKPRRKPTGGPPGRAAVRGRGARRGAPRAGGGAGAQAGPPACPGPRPATGPPPPKARAAGPAGPPTTGTGPA

SEQ ID NO: 279673 - protein, 182 aa, Zea mays
  unsure (1)..(182): unsure at all Xaa locations
  Clone ID: MRT4577_186641C.1.pep
YACRFRSGIPGSTHASGRVVEPKRAVSREDSVKPGAHLTVKKIFVGGIKEDTEEYNLRDYFEKYGKIETIEVMEDRQSGKKRGFAFVTFDDHDTVDKIVVQKYHTINGHNCEVKKALSKQEMQSAGSQRCRGGGSGNFMGRGGNFGGGGGNFGRGGNFGGRGGYGXGGGGGSRGSYGGGDGG

SEQ ID NO: 279674 - protein, 126 aa, Zea mays
  Clone ID: MRT4577_186642C.1.pep
MARRRRQPTPMRNQAQQRAREGKGEGRGGSLPQGAPLEPLGGGEGTTMARVNGGGTGTARRTAGERGQRKSGRERRNWSVSRVADVEAELTVAEGTAGLRRRRGNGLGTAADNSGSSLACAQRGRG

SEQ ID NO: 279675 - protein, 118 aa, Zea mays
  unsure (1)..(118): unsure at all Xaa locations
  Clone ID: MRT4577_186643C.1.pep
MAADADAAEVERLYELGERLSSAKDKSELAADYEAIIAAVKGQSVKAKQLAAQLIPRFFRSFPALATRAMSAMFDLVDXGGARDVLGQLLTSEENVERDAVHKALMSLIREDVKTYTV

SEQ ID NO: 279676 - protein, 61 aa, Zea mays
  Clone ID: MRT4577_186644C.1.pep
MYTLPVRATTSSIVASLATPAPSSSSGSGRPRLRLIRNAPGLGGPATVVGHEPHHHSDSNK

SEQ ID NO: 279677 - protein, 382 aa, Zea mays
  Clone ID: MRT4577_186645C.1.pep
MERTLITSNLCLSAHASRSSRRVHYIPTSASAAAHNSSYRKKSAPSLPPSAAASATVVTALPSTDNVQSTAPKMTPQIAKKSRICFWTLNSKPHNGLEGLTGLTELDDSIEAHRLFILLYVHWFLLLMRTLYWPDSLQPLFKHVEQGSEIREKIICFLRDKVFPLKAELLKPQAEMERFITDLVKKSVQDVTGSEFELFMGFLRSLSIFGDSAPRESFQELIEIIQAQADLNSQFNVSDIDHIERWISCMYMALPIFMRGASASKFLNYFVKQIVPAFEKIPEEKKLDLLKTIASSSPYATAQDSRQLLPSVVQLLNKYMPGKKVDDINHNYVECLLYTYHHLAHKTPNTTNSLCGYKIVTGQPSDRLGEDFTEHYKDFTER

SEQ ID NO: 279678 - protein, 539 aa, Zea mays
  Clone ID: MRT4577_186646C.1.pep
MAAAAADDAAEVERLYELGERLSSANDKSEHAADYEAIIAAVKGQSAKAKQLAAQLIPRFFRSFPALGTRAMSAMFDLVDMEELAIRIQAIRGFPLLGKDTEFVSKIADVLGQLLTSEENVERDAVHKALMSLIRQDVKNSLQPLFKHVEQGSEIREKIICFLRDKVFPLKAELLKPQAEMERFITDLIKKSVQDVTGSEFELFMGFLRSLSIFGDSAPRESFQELIEIIQAQADLNSQFNVSDIDHIERWISCMYMALPIFMRGASASKFLNYFVKQIVPAFEKIPEEKKLDLLKTIASSSPYAAAQDSRQLLPSVVQLLKKYMPGKKVEDINHNYVECLLYTFHHLAHKTPNTTNSLCGYKIVTGQPSDRLGEDFSEHYKDFTERLTGTEETVRAASKRLTQGMADFNKAISSAKTDEEKTKIKGDQQTSTRTMRSYNNILAMTQSLHSKSPLFIGDKKITLSWMEQPNKAAATKAGGKRSQPSTNGNDPANKKGRGGMQNQLVNRAFEGLSHVGRGSGRGRGRGGRGRGRGWSGYH

SEQ ID NO: 279679 - protein, 231 aa, Zea mays
  unsure (1)..(231): unsure at all Xaa locations
  Clone ID: MRT4577_186647C.1.pep
SRPAGNDTAIPAPSTRLAMFSPAVGRVARSANTFSAAPYAALNACARSALSTSTAPQQPFRPSHQRRYSSSKPSTPANNKKKPAELDQNATAELQGAGQKTKGQKKLKQPSTATLGNNVPFVPPTNHLREDDVKLSAFFGLHRPISISRAFPNSTSTAEFDAFFDVDRASQVERIEATKNVLSGFLERMHAEIDAQEEQRADATQSDQQVYHLDXQPTQHSVESWAARLVP

SEQ ID NO: 279680 - protein, 64 aa, Zea mays
  Clone ID: MRT4577_186648C.1.pep
RCCRPPPFFFFFHHLKDLPHNRYITVITFDTHTLEIERKTFTKYTLHSRTQVLHGRMRCIYYKS

SEQ ID NO: 279681 - protein, 57 aa, Zea mays
  Clone ID: MRT4577_186649C.1.pep
QSTQAGSQLHTAHVCRTDYYCMTGSYDFYIVYPPKGKMKPLGPGLPLCKYDCTGHIT

SEQ ID NO: 279682 - protein, 152 aa, Zea mays
  unsure (1)..(152): unsure at all Xaa locations
  Clone ID: MRT4577_18664C.1.pep
QQFPLXPFVAQKIRGQQIQQLVVANPCGYFXQHQFFPFNQLGAFNFAGYLPPQFPFSQLVCAYPQQFFPFNPLAAFDFAGYFQQQQLLPFSQLGYVSPAAFFTQQQLLPFYLPAMPNAGPLFQLQQLLPFNPPAFANPTVFYPQPPLGGAPL

SEQ ID NO: 279683 - protein, 71 aa, Zea mays
  Clone ID: MRT4577_186650C.1.pep
KAKFSEGRPPCLEFHLQTTAGCGATCVLVGVASPQSSSLVCLELACHPRRDQNSQKKKMKFKKWFLKRSLL

SEQ ID NO: 279684 - protein, 86 aa, Zea mays
  Clone ID: MRT4577_186652C.1.pep
KGVPLLPAPLKGGKRNLGGFTPPPQRALRGGVRGGLPEVLSKGGGLLAFLGKVAFQTGGGYGGNPFKAFGAGCWGVPLNFGFTFVR

SEQ ID NO: 279685 - protein, 83 aa, Zea mays
  unsure (1)..(83): unsure at all Xaa locations
  Clone ID: MRT4577_186653C.1.pep
LRXGAVALDAYLGNLQEALFKMNPDTTQMDMLFCSTEDGLPLLPAPMEITRDFYTEGCSCSQPMYVFTVXVXEAMATVLGQVY

SEQ ID NO: 279686 - protein, 68 aa, Zea mays
  Clone ID: MRT4577_186654C.1.pep
KQIHSCPLQFLSTLSSSTHLLCFPSFSPPTHLQLNSPPIPCSTLTFHHFTDINYILNYSPLPKRPTAL

SEQ ID NO: 279687 - protein, 122 aa, Zea mays
  unsure (1)..(122): unsure at all Xaa locations
  Clone ID: MRT4577_186655C.1.pep
RECRRPSSISILVPPTEPQXHTYDXATTPSSXDXFYIRRRRREDRHQXAGFLIIQTERTEPFPAHPDLQLQISPPPPATKTTELGFWKRALDDTTTPATSTAVAAATDPSLAYHTSAPTYRR

SEQ ID NO: 279688 - protein, 101 aa, Zea mays
  Clone ID: MRT4577_186656C.1.pep
NRRTKKQQEHLARLNQTMAKKRSGAAGGSVVVAEEHDDASSDDVEPGLLLPQHPAEPSSCPALPMAAAAAAAPPPWLIHPGQTSTGCVALGAARLCSTASY

SEQ ID NO: 279689 - protein, 62 aa, Zea mays
  Clone ID: MRT4577_186657C.1.pep
GLLMADRLLRVGQSRRSRPYQAHLAPGLLLWGGGAGGPPYVLEVVAFLAGIKSGERVTMFSE

SEQ ID NO: 279690 - protein, 105 aa, Zea mays
  Clone ID: MRT4577_186658C.1.pep
NSFSTHSSCTPITNANNNKPHITSPNTMQIYFKNPPYHYTTSPITISTYHPTHTKPHPQNQPHKHQLTKLISSIYLSSIHHLSQTNHHSSITSYTFNNLHSFHPH

SEQ ID NO: 279691 - protein, 81 aa, Zea mays
  Clone ID: MRT4577_186659C.1.pep
VLYRCGLCQRSLAVETASSNASNFDVMWIPSHLWLYLATANNLFLTKGLVFSSVKPSPISVNVQLPVTKKIKETQKKKKKG

SEQ ID NO: 279692 - protein, 110 aa, Zea mays
  unsure (1)..(110): unsure at all Xaa locations
  Clone ID: MRT4577_18665C.1.pep
MAEPAKNEAHVVEIPVSVDGGEASGGEEAFLDKAAAAAGEGHPLGEIAASEGHLLLLKLWQREEDRLGRRACALEALMDAARRDAFYLCAAFLAFHGLCLALLFAAXVVA

SEQ ID NO: 279693 - protein, 110 aa, Zea mays
  Clone ID: MRT4577_186660C.1.pep
PLVDRSTAKAIPLTSLSILHFLPRRRCASHDSGYGRTSGRSATPAYNFAPTCSTRRGRLVGRHGWILTGPRVVAVLVHETKEHRGGDVLRRRIPGFPDALQTRLQCLSMA

SEQ ID NO: 279694 - protein, 58 aa, Zea mays
  Clone ID: MRT4577_186661C.1.pep
LFNTTIHAIGRAADASPPAYPTSGLLLVLGVIIVQRRSIRVARRLHNLCCSAQPFQAR

SEQ ID NO: 279695 - protein, 122 aa, Zea mays
  unsure (1)..(122): unsure at all Xaa locations
  Clone ID: MRT4577_186662C.1.pep
GGGGLSRGGLCLFQKARGKKGPGARPPPQDPEEGLGGGARRFRGFPLPRAPPEKKGPQGGPGGRRRKKAPLFRLIDPPVSWSXPCVTGGCESDIERPPFCARVRMFALVLCPNKRGSVIFRM

SEQ ID NO: 279696 - protein, 68 aa, Zea mays
  Clone ID: MRT4577_186663C.1.pep
LFPEIDRLDVFLYRVVVLSLPEFHVWMWTARWAFRAVRLCRAKAPRCLAAVSLVQTCVVTRHEPNSEL

SEQ ID NO: 279697 - protein, 43 aa, Zea mays
  Clone ID: MRT4577_186664C.1.pep
KQGSRPIIRLNHNHRKCPPCRSLIRTYRVLQTIFSLSFEYLFE

SEQ ID NO: 279698 - protein, 120 aa, Zea mays
  Clone ID: MRT4577_186665C.1.pep
NNVPRAVVSRCQKYVFSKIKDIDTVCRLRKICVKENLDVELAALDLIALNSDGSLRDAETMLDQLSLLGKKITPSLVNDLVGVVSEEKLLDLLEIAMSGDTAETVKRSRELMDSGTDPMA

SEQ ID NO: 279699 - protein, 93 aa, Zea mays
  Clone ID: MRT4577_186666C.1.pep
GRVGLPRNPSIATAFPHARKGKIWAPRRTPLHAASVSAPSVPPRTSSPPPTAPQPLPPTENTSKITTPTTGTSLLIRIKACSRFSSWIKAFHH

SEQ ID NO: 279700 - protein, 102 aa, Zea mays
  unsure (1)..(102): unsure at all Xaa locations
  Clone ID: MRT4577_186667C.1.pep
KKKKKKKEKEKLKKKKGKKKRXXXLGGPYIKSQFTAPSIHRHSSPKPNQNPSTPTLLTTKPLENPSLSPTKTPPITPPFFKLKKPQKTPPPTPFPTFTQPKT

SEQ ID NO: 279701 - protein, 178 aa, Zea mays
  Clone ID: MRT4577_186668C.1.pep
MGAEEDAAARRERLRALRAAKDLLSTPDGAPTPSTDGEHQNGNHEMAEEPELPGHQDAPGEAAKEDGSPTEEAEEVEDDGELPAMKFRNYLPHDEQLRGGKLAPVSLPKFEDPISAETAEPKEVENLFGNIAPKNPNWDLKRDVQKRIDKLERRTQKALAEIALEQQREKEALEESQD

SEQ ID NO: 279702 - protein, 197 aa, Zea mays
  Clone ID: MRT4577_186669C.1.pep
PQRQASRSLHDDRVAVVDLWYVSLPAASVFGSALPLFCFFFFFGSEQQDNPNDQVCFFCFVVFCPSRTPSMELETSIITFGPITTTSGIPQSPRRSSRSRRSVVRIAARCFRLRLRSSTFLFFFFFGSEQQDNPNDQVCFFCFVVFCPSRTPSMELETSIITFGPITTTSGIPQSPRRSSRSRRSVVRIAARCFRPR

SEQ ID NO: 279703 - protein, 263 aa, Zea mays
  unsure (1)..(263): unsure at all Xaa locations
  Clone ID: MRT4577_18666C.1.pep
PSPAVSAPHLSATTYPISGLIPTYSVTSASXRDATPPGASSALAGAAXSPSPSPSRXSAPSXCTSNAPTSASTAADAATPSSXPSKTTSXTGATSTPTWPRAWRRSSPPSGLPRSPTPCSPSSPTRSSSPRRSLPWQWPATRRYSPAACQGRSRRARKSSAPSVSPRFRWALSSRVAARPHSAHARSSPVSSSGSRICVVASTSSSPRSRATRASSPPTSGRSSPPSRCSKRKAPSPMATSAGSPSHTAPSCLSPARTRSTPS

SEQ ID NO: 279704 - protein, 91 aa, Zea mays
  unsure (1)..(91): unsure at all Xaa locations
  Clone ID: MRT4577_186670C.1.pep
PTRDLLXDQASKQAFIYRAKGASNHNHTLNDTRTAQIRSIEEKNREGTITVGNQDHLTDTPPLRMRIALKQMAMTAMGIPPAGMIMLISRC

SEQ ID NO: 279705 - protein, 77 aa, Zea mays
  Clone ID: MRT4577_186671C.1.pep
VLSNDFNDVVFPIASQLSPVFIMDRYRTLWIGNNEEILFGYTSINPRSPDYIYIYSLYLDQSIYNSKQSCLLSNADK

SEQ ID NO: 279706 - protein, 349 aa, Zea mays
  unsure (1)..(349): unsure at all Xaa locations
  Clone ID: MRT4577_186672C.1.pep
LESRATYESRIVMPMSMEEYEIGLSYTIMKMEQQNTNSKEGVEVLQQAPFHEDAKLGKGHFTSKVYHLQSKIPSWMKGFAPASALAVHEDSWCAFPXQNRLAVFPLDRLCNVMKCKYXWLRMFSQLVPHCVSXTAARVPSILTRPHXVIKCPLFSKCSLTIDTVTRPDNGCSENAHGLSGEQLAAREVEIIDIASVSRXLEQGDRRSECRPDXFKSQRTERGPLLKGWMDSCHPVMTTYKLVTMDAPIWGLGERLEDCIIAGERALFLACHRLCFAWIDEWYGMTVEQIREMERQXHAAQEDAEEGREQARGQQEDAQRRASGRGELVAVGHQICHRLGMCKCNVSTIN

SEQ ID NO: 279707 - protein, 282 aa, Zea mays
  unsure (1)..(282): unsure at all Xaa locations
  Clone ID: MRT4577_186673C.1.pep
MVQIKEFRIVMPMSMEEYEIGLSYTIMKMEQQNTNSKEGVEVLQQAPFHEDAKLGKGHFTSKVYHLQSKIPSWMKGFAPASALAVHEDSWCAFPKSRTXVLIKCPLFSKCSLTIDTVTRPDNGCSENAHGLSGEQLAAREVEIIDIASVSRDYWSKAIGAPSVDLTAFKSQRTERGPLLKGWMDSCHPVMTTYKLVTMDAPIWGLGERLEDCIIAGERALFLACHRLCFAWIDEWYGMTVEQIREMERQTDMLLKKTLKKAGSNKHEGNTKTLKDELVAVGS

SEQ ID NO: 279708 - protein, 268 aa, Zea mays
  unsure (1)..(268): unsure at all Xaa locations
  Clone ID: MRT4577_186674C.1.pep
MAPTAPTQRPTMRHSSAFLLPSTAPSSPAPGPDDAAVALVVLNQPLPRFAPLLWSRAAVRVCADGGANRVFDGMPALLPGQDPDEVRASYKPDVIKGDMDSVRPEVKEHYSNLGTRIVDESHDQDTTDLHKCIAFIAENYSATNKSNQLSILVXEHLGEGLITRWETSMCFISSQASISSSYXDCLIFLLSKMHTHEIHVEKSIEGPHCGLIPIGMPSTSTTTTGLRWNLDNTSMSFGGLISTSNIVEEDKVTVTSDSDLIWTTSLRK

SEQ ID NO: 279709 - protein, 82 aa, Zea mays
  unsure (1)..(82): unsure at all Xaa locations
  Clone ID: MRT4577_186675C.1.pep
PVDPAVGGVQINSPGPTLEASLCGCHKKDKLIVANAGDSRCVISRKGQAYSLSSVLXXXLEXVWGGGGFFFGXXXAGRGGGG

SEQ ID NO: 279710 - protein, 166 aa, Zea mays
  unsure (1)..(166): unsure at all Xaa locations
  Clone ID: MRT4577_186676C.1.pep
RNNVLVLCTSFKECILRGCLSVCVLGAVLCCSPTYYVGRLTSFTLXHFYRYVYHGDKDPRHLXNVQPYTTLLHMALTLMMKDETLDQTLVHAAETNHLMFKFADVSYDDQQEKIYEAPATDVDVMTDPLMPVYETRIDENFSXYVPDYCELDPRIRLGLYLTTVTS

SEQ ID NO: 279711 - protein, 145 aa, Zea mays
  unsure (1)..(145): unsure at all Xaa locations
  Clone ID: MRT4577_186677C.1.pep
SILVLGALGGRYDHEMGNINVLHLFPSINIVLLSDDCLIFLLSKMHTHEIHVEKSIEGPHCGLIPIGMPSTSTTTTGLRWNLXILVLILRNAGLATEVDVYNVITSXDNTSMSFGGLISTSNIVEEDKVTVTSDSDLMWTTSLRK

SEQ ID NO: 279712 - protein, 71 aa, Zea mays
  unsure (1)..(71): unsure at all Xaa locations
  Clone ID: MRT4577_186678C.1.pep
GVRRRQGHLSPPHFLPSRDSHVQRQLANAQHLPRRXXLKTARDKLKAAEEVTQRPERRXXPKAERSAMAVT

SEQ ID NO: 279713 - protein, 62 aa, Zea mays
  Clone ID: MRT4577_186679C.1.pep
PPSVSDAAIRKCRALAQTLHQSRGFGNKFRFSDQPTAVAGSAGGADPFASAGAATDDDALYS

SEQ ID NO: 279714 - protein, 49 aa, Zea mays
  Clone ID: MRT4577_18667C.1.pep
FKGEGINHTLCPIILVEQMNLFKSWIFHIVLTIYIQGLNPFKANSYVHA

SEQ ID NO: 279715 - protein, 89 aa, Zea mays
  Clone ID: MRT4577_186680C.1.pep
PRVRRQLLAAVGAHATVIELEEAGEEAAASAAASAVVPALFVGGAPVGGLDGLMGLHLSGLLVPRLREVGCALRLRPVRGGVFTCWWSG

SEQ ID NO: 279716 - protein, 57 aa, Zea mays
  unsure (1)..(57): unsure at all Xaa locations
  Clone ID: MRT4577_186681C.1.pep
GCHFXPTGLNTXGEXCXNAQXGFPXRPFXXDKXGFXXRXXAGGRXFKXWGXXLQILR

SEQ ID NO: 279717 - protein, 103 aa, Zea mays
  Clone ID: MRT4577_186682C.1.pep
FFFFFNLQLHAFASITPYDNFYEKNGPDLLDDRLYIVQHARGPFGNKRKQSDAGIFYSKMLLKKGLGQRLIRFWLGKIPRGLTPTRLGAKCLFINKDARPTGS

SEQ ID NO: 279718 - protein, 134 aa, Zea mays
  Clone ID: MRT4577_186683C.1.pep
GPSRPAGILLTDAITGAAGQPWHMPLLTYHSQLTCAAAALDSARTSRHDYPDTIHLRRFHSTTGCTHRRPHTYAPGKLGPSPDTGLADGHGDHHESPAPDLALRRELEHLPSQRRMPQERLYSIYGMLHSMSEL

SEQ ID NO: 279719 - protein, 31 aa, Zea mays
  unsure (1)..(31): unsure at all Xaa locations
  Clone ID: MRT4577_186684C.1.pep
LLXFPPPXXLRXVTSSLQPNXXLAXXASKNA

SEQ ID NO: 279720 - protein, 73 aa, Zea mays
  unsure (1)..(73): unsure at all Xaa locations
  Clone ID: MRT4577_186685C.1.pep
KKTPLNPPTLFSXKNSFKQKNPAPKISISSLXTRPSPNFYFSLFHTVPFLGKLKVSKTIVPFCFVVAPLFKKW

SEQ ID NO: 279721 - protein, 151 aa, Zea mays
  unsure (1)..(151): unsure at all Xaa locations
  Clone ID: MRT4577_186686C.1.pep
RPARXXGXXXXSPPPGVXLXVXXXPLPGWCPRXFXXXAXXXPWXXXXSFXLXXCSXXAPGGXXGVFXWSLCXPXXAFXWPXWXXXLLSXSACRALAGLAVXLPSLCXCXPSXXXRRGCRLCSXAXXLCALXPCPXXSRPLFFSXPPPPGRP

SEQ ID NO: 279722 - protein, 113 aa, Zea mays
  Clone ID: MRT4577_186687C.1.pep
VRSTRAKYTNWSSLVVSILVNSHPRMESHDGSIHESISQTPYLAISVSFQFCCMQTRDELVYIYRKKGLSPGPGCVACMQFARAVSHPRGCLAMGPVCVGRSHKKRKVARSRK

SEQ ID NO: 279723 - protein, 43 aa, Zea mays
  Clone ID: MRT4577_186688C.1.pep
MAKVHLYVAAACAVELVLFTPALAGNPDMLQDVCPDDYPSPMK

SEQ ID NO: 279724 - protein, 107 aa, Zea mays
  unsure (1)..(107): unsure at all Xaa locations
  Clone ID: MRT4577_186689C.1.pep
STTPCGTTTLNCLTTYKPPSPSIKTAGPQELLEAEDLMTAKKPIRXDAVYAIAFGTAYDYLMSGYPSNADNDTIFDAXITALHEDPDRDRAHALNKEEWARSQNGSA

SEQ ID NO: 279725 - protein, 64 aa, Zea mays
  Clone ID: MRT4577_186690C.1.pep
LYMLGHHTGHCTRRSPNSCYHIYLCAQASARRIVSLRSCYFAWNLTFHNFLKFKHKVNYIELIA

SEQ ID NO: 279726 - protein, 91 aa, Zea mays
  Clone ID: MRT4577_186691C.1.pep
GGPPILKPRPLFPKRGASPSLEIPPKFLAQQVPPLYLPLGGGRPQPGGPVPPKRPLEAPQGTPPPPFIKGGGALEPGGCPRLYSPPVGGCP

SEQ ID NO: 279727 - protein, 141 aa, Zea mays
  Clone ID: MRT4577_186692C.1.pep
GKSQCSQLAPKPYVAYTWRRISAWPIPSSPPTTCRQPPPTTRHRAWRHLRAQSHAASSTSPSLTTHPNPTPPNRTRTRAPATTMTTPEDIVKLLDPLTPEQLVELLRTAAEASPATMADARRAVEAYPARLKLFLHGLGWG

SEQ ID NO: 279728 - protein, 180 aa, Zea mays
  unsure (1)..(180): unsure at all Xaa locations
  Clone ID: MRT4577_186693C.1.pep
NPPFFLPEKGIGGVYSKKTPLPPGGAFNGSQRVVFLPGPLGSFKETKNLGSKGQGFFPWFFLGNFXRFPGFPQRFGLFFFAPPKKCPRSKKEFSQGFKQFHPPKKPPQKIFSPPLKMGAPLFGGRPKKNGGWFLTQNFFFFFPPKGFWGKLFPPRGKKPLFPINLALSSHPKKKKGGSPF

SEQ ID NO: 279729 - protein, 53 aa, Zea mays
  Clone ID: MRT4577_186694C.1.pep
APAPMMPGPVADTRCTLLAQGRQGAKTHEAQRSGLNPTGALPAIGTPMYQTRV

SEQ ID NO: 279730 - protein, 190 aa, Zea mays
  Clone ID: MRT4577_186695C.1.pep
MGGNGGVFPPLPVRGQPASVNQQQLGGGPHTWVGNDANTLLVVATLITTLTYQLGTSIPGGYWQQDTTAASRDGKEQVTYRAGDPIMRDLHRPRYWVFMGASWVGFASSMMMTLSLLVRMPVDSRHVRWSFVVAYSSLVLTFVVSQPKTHLSLDLLIWAAVLVFLWIIVSLHPDRRARVIQELCCGGRET

SEQ ID NO: 279731 - protein, 51 aa, Zea mays
  Clone ID: MRT4577_186696C.1.pep
TQRPHHPTTLLYTATQAELRLHDAPAKDNATGRAAHPATQKRTHISNPTTH

SEQ ID NO: 279732 - protein, 95 aa, Zea mays
  Clone ID: MRT4577_186697C.1.pep
GKKIHQRTGTIPLWVFRQAFRRETPILGVKPGRIKKGSPRKVPMEIGSNQGEALAIRWLLEASQRRPGGNMVFNLSSDLMDAAKGGGGALRKREA

SEQ ID NO: 279733 - protein, 135 aa, Zea mays
  Clone ID: MRT4577_186698C.1.pep
IRHEGEKQNVIDQDPEGKYEALDKYGKDLTAMARQGKLDPVIGRDDEIRRCIQILSRRTKNNPVLIGEPGVGKTAIAEGLAQRIVQGDVPQALTNRRVSYSFMYYAFMFFRVKHIFGFSSKLLKNLFHIYHDILS

SEQ ID NO: 279734 - protein, 48 aa, Zea mays
  unsure (1)..(48): unsure at all Xaa locations
  Clone ID: MRT4577_186699C.1.pep
AAADLLSMRTSARAAPRHRHLLAPRGHXIFARRVRQRQHERCLHRRRD

SEQ ID NO: 279735 - protein, 131 aa, Zea mays
  Clone ID: MRT4577_18669C.1.pep
SNCFVDPLCVTPWLPKRSLFSLRQRPFQPVGSDYALRLVSGDEASTLGIHFDDQHNLQLEQYVSCSHLPVCDCRSSGGRGLHSSVVLCSCLCEADPPGSLSLGRYSSTMRCMREVVSFRTIRWKFPDAYQS

SEQ ID NO: 279736 - protein, 132 aa, Zea mays
  Clone ID: MRT4577_1866C.1.pep
AGRVGMISSAIDLIASAIAPRCSSTSRYSTSSTVPLRDVAPCTKYFYEAIFHRTRNPSRTSISTLPTPRSARIATYVHATSTIFDTPSTTEMHIICADECKPKMNYEEKHNKIQWFMKKKEDVGQRGRQILP

SEQ ID NO: 279737 - protein, 130 aa, Zea mays
  Clone ID: MRT4577_186700C.1.pep
WMLPSLRRYINYVRRKFKPVLTKEAERVISSYYHLQRKSGTHNAARTTVRMLESLIRLAQAHARLMFRNEVRQLDAIAAILCMESSMTASPIVDIVGNALHSNFTVDGSREYKTQEKKILKKLGITQGSP

SEQ ID NO: 279738 - protein, 242 aa, Zea mays
  unsure (1)..(242): unsure at all Xaa locations
  Clone ID: MRT4577_186701C.1.pep
TYHTLSLLPCTLYFDGSVCNEGKWIGIMLVSPRNPTFEFSSLLKTHCTNNXEACLFGLELLDYMGVKHVKVFGDYXLVVQQILEEYQRLNDTLNGYLEKFWDIIRFFDEFGIWHIFRVKNCRANVLAQNALDYRIKRGKFHNFENPMXRCWAKYQGHRPSGLGHRTVRNTVGPSSGTRDINLVNSAGNAADAVDCRTPLINYLRYPSVRTDRNVQRTTFKYVLIDDELYRQNLNEVLLKCLS

SEQ ID NO: 279739 - protein, 225 aa, Zea mays
  unsure (1)..(225): unsure at all Xaa locations
  Clone ID: MRT4577_186702C.1.pep
MEPRTEGDASRNLRQGRLLEPPPVPAVRTSPEGVQRHTGQDVIASRSQSAAASETGSSLPCEDGNATAETIGSSTHPVHIGVQNQDIEQEQVHETGKRYKRLTSDVWNYFTKKKEIIEENGKKCEQIWGYCNFPNCKRRYRAEGRQGTTAFKNHLRSAHSIVRGQQQLKFEKDLGNNITHIQPFMYDQEVSVKKLIMAIIMHDYPFXIVEHGYFVDFIKSLHPSF

SEQ ID NO: 279740 - protein, 784 aa, Zea mays
  Clone ID: MRT4577_186703C.1.pep
MEPRTEGDASRNLRQGRLLEPPPVPAVRTSPEGVQRHTGQDVIASRSQSAAASETGSSLPCEDGNATAETIGSSTHPVHIGVQNQDIEQEQVHETGKRYKRLTSDVWNYFTKKKEIIEENGKKREQIWGYCNFPNCKRRYRAEGRQGTTAFKNHLRSAHSIVRGQQQLKFEKDLGNNITHIQPFMYDQEVSVKKLIMAIIMHDYPFNIVEHGYFVDFIKSLHPSFPIKSCNAVGKEVMDTYLGEKEKLYAHLKTVHCRFSVTMDMWTSCSNKSYMCVTVHWINDDWCIQKRIIGFFNVKGRHTGKKLSETFTEAMVRWNLDKKLFSLTLDNASANELAVKDIISDLKDGQASLVCDGLFFHVRCACHILNLVARDGLKVISKTIDKIKALVLAVKGSPLQWKELMKCASESELDTKRGISLDVSARWNSTYLMLRDALYYKDAFARLKSSNRHMYVKIYPSPDEWDMALKIFQCLKKVYSLAEILSGTSYPTANLFYRGFCDIKVLLDDWCSSDDATISEMAIAMSQKIEKYWEHSNLALAVACFLDPRYKKKVIEYYMKKFHGDGYHVELEKIVNVVRGLYCFYSSSTPAPAKSTSPEPANSASDILMASVSDELDSFLYGTNEPTLVRSNELEKYMADPLLRLGGPFDGPFDILAWWKSKREVYPILSQIVRDVMAIQVSTVASESVFNAAGRFVDPYRNRLEPEMVEALICTKDWIAAERKDSKIVGSIVSDLEIETLSTVMANKIRAVDDKDIEWKDQEHDGENEYIDSDLDVMDDHNEL

SEQ ID NO: 279741 - protein, 67 aa, Zea mays
  Clone ID: MRT4577_186704C.1.pep
LRKEDNLRVARDMEKPQVQPLTKPDTCHKPAEPPKLKAASPGFGKATTVWELAHAFYTPKSDTAPQT

SEQ ID NO: 279742 - protein, 97 aa, Zea mays
  Clone ID: MRT4577_186705C.1.pep
MAFIHGNWLGFPTTEDFPPTGVVSLGWLDERRRQLDLEVQPEKREEPDNMRLLLAKIRVDLLTKGYVELPELYLDYTPPKVVARSPPKHIPTAVASG

SEQ ID NO: 279743 - protein, 118 aa, Zea mays
  Clone ID: MRT4577_186706C.1.pep
FLKGGIVPGVKDAFLPCGAVFLSYRSPCPCVFFPLPMVSPWFHGWFSDPFGGDPWGHKRVLPGPFSFFLAFGGPPCCRGECWAPQFLVPGVLPLGGWVWGSPPLGIGPFYSPPGVLWG

SEQ ID NO: 279744 - protein, 111 aa, Zea mays
  Clone ID: MRT4577_186707C.1.pep
MAAAEKPAAVRRAEELVEREMGGRDASHDAAHALRVRDLALSLAAEEGLSAPDRLLTVELAALLHDVGNFLRLHIILYRFHLLYLSNLFEHHYFLCRRLQVYQVRELLVFC

SEQ ID NO: 279745 - protein, 74 aa, Zea mays
  Clone ID: MRT4577_186708C.1.pep
KRKTRVKRSIKVPGISSKVPDIPPEEFLWRKYGQKPIKGSPYPRGFYKSSPVRGCPARKHVEGAPADPAILVVT

SEQ ID NO: 279746 - protein, 34 aa, Zea mays
  Clone ID: MRT4577_186709C.1.pep
REAVIKGMDHKGLPIMLFSTDYASYEASFDAGVP

SEQ ID NO: 279747 - protein, 86 aa, Zea mays
  unsure (1)..(86): unsure at all Xaa locations
  Clone ID: MRT4577_18670C.1.pep
MKWPPTFGVPSTDLVCPFPFTAPHSFAPLSSPYTHXHFXFLGHYPIPLIAAKTTWAGGQGWMDRHLPLPISLPCVVGKLLFFGVFF

SEQ ID NO: 279748 - protein, 227 aa, Zea mays
  Clone ID: MRT4577_186710C.1.pep
MAAAEKPAAVRRAEELVEREMGGRDASHDAAHALRVRDLALSLAAEEGLSAPDRLLTVELAALLHDVGDYKYTKNNVEDMSVVEMFLQEVGLDEGQKDEIVAIIKGMGFKNEVSNKSIVEPTLEFAIVQDADRLDAIGAIGIARCFTYGGSKNSALHDPRILPRDSLSKEKYMSKEEKQTSINHFHEKLFKLKDMMKTEAGKRRAEKRHRFMEEFVAEFYEEWSGRA

SEQ ID NO: 279749 - protein, 73 aa, Zea mays
  unsure (1)..(73): unsure at all Xaa locations
  Clone ID: MRT4577_186711C.1.pep
QNAIPGVNCRIPRTIESKIYRDPSLASIFLMHNGKYIIHKVNDSELGVLLGDEWIKQMTNRXRRWSMDYQRAT

SEQ ID NO: 279750 - protein, 76 aa, Zea mays
  Clone ID: MRT4577_186712C.1.pep
SSESAHATIMTSHCMASSAALLDAHPRASGGHRPTGSGGKEEEQRRRAARRRRRRRSRTTSTRRYTKGKNGTNLVV

SEQ ID NO: 279751 - protein, 74 aa, Zea mays
  unsure (1)..(74): unsure at all Xaa locations
  Clone ID: MRT4577_186713C.1.pep
YVKFFDRFSLTLCVXTNNSKYLDFFRTGPSEIXLIRRTXFALHYCENLQTRSYXYVKYRIFGPIVDKERNGILN

SEQ ID NO: 279752 - protein, 211 aa, Zea mays
  Clone ID: MRT4577_186714C.1.pep
LTARGCFLLPRAPPPAPRPPLAGGSPPGALPSPFHAAAAFLLSLTWITTVQSASSGAGSQSGVVDEPEAVEWAMQDFYALRKDVELAVERVNEVRQDAGLEQLLEEIASLENKSGDITLWDDPSKAQELLVALTELKEKVKLLNDFKSQVEEADTIVQLTEELDSIDTGLLEEASKIIKALNKALDNFEMARLLSGPYDKEGAVITISAGA

SEQ ID NO: 279753 - protein, 55 aa, Zea mays
  Clone ID: MRT4577_186715C.1.pep
HTYITNYFLFKSIIKCGLSTNPCVHLQTYYHIPLLINQPLFNLTKKNVRIFFFSL

SEQ ID NO: 279754 - protein, 60 aa, Zea mays
  Clone ID: MRT4577_186716C.1.pep
GGAAARSMGGIFKYLGRFSNQNVLMFFPYQMDNYGPFGAIVFCGGIQLERINYWSTSFAW

SEQ ID NO: 279755 - protein, 180 aa, Zea mays
  unsure (1)..(180): unsure at all Xaa locations
  Clone ID: MRT4577_186717C.1.pep
LKKXXXQRPDXXKGXXQAXAKNXXXKEXKXEXAXTXXXEXXEEXXEQXKPXPXXXXGAGXGXXAPPKXXXEXEXXXQXXXXXSXGXXXNXRXXTXEDPEXXEKDXKXXXXPXRXGADAXXXAXKKKEPNKEGXPTXXXTTAXKDRXXQAAAKHEXQPXXADEAPGQTAEAHAPKEPEPAR

SEQ ID NO: 279756 - protein, 78 aa, Zea mays
  Clone ID: MRT4577_186718C.1.pep
SYSLTSHTHFLTTLPTSIPFLTPIILNVTDHIESLTYLPASQIIPSPNFLNTALNKATCTKVIQTDHIRIHSILSPKL

SEQ ID NO: 279757 - protein, 85 aa, Zea mays
  Clone ID: MRT4577_186719C.1.pep
KKSLPLPDDPFSGNPSPGAFPPKENMGSFISIGPELPKNPGGRVNFPPGLFKSFPGGGPNAQSLAVFPKHLFLGPKFPKSIFPPP

SEQ ID NO: 279758 - protein, 47 aa, Zea mays
  Clone ID: MRT4577_18671C.1.pep
AIQHHRTFSIIEMTRIHWSTRLTGTRCPEQRILQELDLERALNSVRT

SEQ ID NO: 279759 - protein, 80 aa, Zea mays
  Clone ID: MRT4577_186720C.1.pep
QHINHNRLPTITWKIYNFLMHTPLSANTSTKTIHPQYSQTSIPTFLPPYLSLPQNPTILKPNSSTLHYPTLNTIKHLNFI

SEQ ID NO: 279760 - protein, 196 aa, Zea mays
  unsure (1)..(196): unsure at all Xaa locations
  Clone ID: MRT4577_186721C.1.pep
VSSFLPTAVPLLQNTVKQKSFIGSSHLGSHAVLEYQFLPEQPSDAYERGSQLRFYDALAEVLNSRVDSFSIGSHFTHVVEQAPSYTFHSQSSGSSCLSNIIASMXSNPNIIASMAQIHGQXGIPQVVRFESSLASPKRLGYHDEEXCHVDRKTQELYLWIYYFFLLLYYYIHILFYLYIIIFYICCICLILLHHNE

SEQ ID NO: 279761 - protein, 105 aa, Zea mays
  Clone ID: MRT4577_186722C.1.pep
PWFWFRVFVLAVPVTRFSVCVAPPGGDASFGSVFKVTGLDRSPFYSPPPWWGAWPFLCPWGFCFVSPLASLPLWVFLFGAGILFSLGSLGMCWFLPKRLLSSMNM

SEQ ID NO: 279762 - protein, 131 aa, Zea mays
  unsure (1)..(131): unsure at all Xaa locations
  Clone ID: MRT4577_186723C.1.pep
GSGFPGWTTPFRLLSPEGLDLSXEDLMERLATGVSMVASLQLAICYPTLVVGPNMLIMGSKNVLVVVAKTDYSSQHAARTKGSLRAQSRFVVAAPVVVGDSGAEVVPKEEKKAADPEKESAKELGLSLFNN

SEQ ID NO: 279763 - protein, 78 aa, Zea mays
  Clone ID: MRT4577_186724C.1.pep
NPVVKYKKKKKKKKKKKKKKKKKKKKKKKKKKKKKKKKKKKKKKKKKKKKKKKKKKKKKGPQGAGPPKKKGPPRGGEF

SEQ ID NO: 279764 - protein, 88 aa, Zea mays
  unsure (1)..(88): unsure at all Xaa locations
  Clone ID: MRT4577_186725C.1.pep
MAPKAAKTPAAKQPATDAPAAVNARTANKPMAIKRLPTAKSISQXCGYMKGNRIAKKSVETYKIYIFNALTHVHPDMIVSFKAMYIMN

SEQ ID NO: 279765 - protein, 267 aa, Zea mays
  Clone ID: MRT4577_186726C.1.pep
MATKMVLCRFVALAAVACLLRPGAPVELHRKLSGWSDDAGATWYGAATGAGSDGGACGYQNAVDQPPFSSMIAAGSPSIFQNGKGCGACYQVKCTGHASCSGSPVTVVLTDECPGGACLDEPVHFDLSGTAFGAMAKAGQADQLRGAGHLRIQYTRVPCNWRGLDIAFKVDAGSNPNYFAVLIEYESGDGELESVELMQRGGGGGGAWAPMQQSWGAVWRYNSGDTLQAPFSVRLTSGSGRTVVASNVIPAGWTPGATYRSVVNFDN

SEQ ID NO: 279766 - protein, 99 aa, Zea mays
  Clone ID: MRT4577_186727C.1.pep
PRQCLGGFCSHRAPQERFGGPLVVGPLGPPFPGVVPSLDNNLLQGSVCLADTPLVLLMGGSFCWSNPLLHRRKQKILSPQLMKARCLRYATLLIVTVAK

SEQ ID NO: 279767 - protein, 73 aa, Zea mays
  Clone ID: MRT4577_186728C.1.pep
ILLQGVWIYSSRRNWNLLNKITYLVWNLAFHHFLMFGYKSISDSWGGEWEMILYIIRICFYSATYRTLFGSLM

SEQ ID NO: 279768 - protein, 367 aa, Zea mays
  Clone ID: MRT4577_186729C.1.pep
MACNRGVKEQEDPSAASAAPAPAAVARARAARPPRPRSRKGLGVRHLLKPCRFLAAVQRANARVREAGEATLVAALAAAQKESERENEVVADVCGGWKSEDGSLNCGYSSIRGRRVNMEDFYDIKSSRVDDKQINFFGVFDGHGGTHAAGYLKQHLFENLLKHPAFIGDTKSAMSQSYKKTDADFLDTEGNIHVGVGSTASTAVLIGNHLYVANVGDSRAVLSKAGKAIALSDDHKPNRSDEQKRIEDAGGVVVWSGTWRVGGILAMSRAFGNRLLKQFVVADPEIQDLEIDGDTEFLILASDGLWDVVPNEHAVAFVKDEDSPEAAARKLTEIAFRRGSTDNITCIVVEFCHDKMVDGSPPSTNKS

SEQ ID NO: 279769 - protein, 835 aa, Zea mays
  unsure (1)..(835): unsure at all Xaa locations
  Clone ID: MRT4577_18672C.1.pep
MSEDKKAVAETKLSLSEEKNLGFLESIAKTNTEKITKKILEGLSEDTGDSDSYDVESGGEDSEDRPWRPSHAAREDIKEIIMRPIWQRFGLRKPKVEINEAAEKCRKAFGIVCSFIGTRDLVQEHVAYRIWPLVANWEMPKEAISNPHEGGLVRLKYTFRFGDQFIKPDDDWLKCVEATSDELLGPYSKAEDNELSAAFGSRKKKRLNRVFDAIGFMYPDYRYPSRGQKRKSATSGKGDASVAASEPAPKRKKVKVLTYRPHFIEPAIVPEFGGETYSATEAKEPAATQKAEDPVAMPKASPAKSGEPKAINIEEAEVERTKILEVISPSAEVTVPKAQKDLTTTPKRKRTVNILDVLETIKTSSSTPKKIVEASKTQIEAKLSEAEAARSQAETEAGPSEPAKEKSLEIGEEETGKEAAKQILSEKTAIPIPEASSEALDYIVRHASGKRLSEEEKREAQYYAQKLKYPKGALIFNGSGEEDFLYCLPDSKKISVCQEMGKSFGFPTLEDGLSVLSKDELADNLAYNSLNGLILSNALRAQKSAEDEGCTIALNNLRSEVIELSNKGLEKDKILNSLLNKIKEDEATFKAQAEAQRSKIEDLWKLLAEVKLKCAIAEADRDAIVELRSSKERCYGKSIACVQRIKTSFANIGAYSNEXTTSYWAIPKXIEWISGEAEAFEEVLSGRGDVCAFFGARGVASILEKAGCEHVKIQAQAEAAFSIDDTKDPSAEASLIGGKFFTDVWENGGQGMAHAIIKKSEKDTHDTREAAKAAEKAAELERRIAELSPPPEPFESLTDPEAKKEDEITKMAEAIMDEVVSQLLNEAAEAVLKEE

SEQ ID NO: 279770 - protein, 71 aa, Zea mays
  Clone ID: MRT4577_186730C.1.pep
MLLVRKKLENLHEELSNTRTDGDGALLREGSAAFLNSIVNKKIPFTTHQAEDCMAVSATSDDAASAQKGSS

SEQ ID NO: 279771 - protein, 185 aa, Zea mays
  Clone ID: MRT4577_186731C.1.pep
AFGNTLGGIGIPVPPTNFFRIDELLKTVVKNVSFPPRGQCLVSMAGALPFPGMASPCGAFFMGKPPQMSLVMRFKQNKQTAMVFVPYNQSPKPFLLQSISSGEAQVFGDVPHPFFRVPPLSPFGNFLKGGGGWFSPPQTLPGYQPKVLCGYKGRLPPFFFKINKGLGFSSFLVFGSCPGPSQIFF

SEQ ID NO: 279772 - protein, 69 aa, Zea mays
  Clone ID: MRT4577_186732C.1.pep
SLFPISFNLHLAFLVCNPHLSGGSLPKWSGAPSPNSFDGCTEEPAFRARSRSTARRMTSSGTTGRTMPA

SEQ ID NO: 279773 - protein, 140 aa, Zea mays
  unsure (1)..(140): unsure at all Xaa locations
  Clone ID: MRT4577_186733C.1.pep
VTEWPXELMAYAFLVVSPPDMSQCFEEMAAAASNKTSSKPGLNYPDLEEQALQFILDCCESNIEKYTKFLEGGAGSPEVPMNAKQANRTLLLKQLARDLCISERRILYRTQYILRRRLRDMRGGELRALSLFNGLRKLFK

SEQ ID NO: 279774 - protein, 184 aa, Zea mays
  unsure (1)..(184): unsure at all Xaa locations
  Clone ID: MRT4577_186734C.1.pep
MRECISIHIGQADIQGGNACWELYCLEHGIQTEGQTNGDKIIXGVDDAFNTFFSETGAGKYVPRAVFVDLEPTEIDEVRTSAYRQLFHPEELISGKEDADNDFARGHYTIGKEIVDLCLYRIRKLVDNCTGLQGFLLFDTEGGRNVSGLGXLLLQRVSVDYGKKSKLGSPVYRSPXVSTSVVEP

SEQ ID NO: 279775 - protein, 273 aa, Zea mays
  unsure (1)..(273): unsure at all Xaa locations
  Clone ID: MRT4577_186735C.1.pep
LPPEIPGLGFPVEIWRETAARSRRRRRRTSTXVPDELLELVFLSLPSSLHLVRAACTCKRWRRIIAEGAFLGRFRSLRASPVVAGHYRVDERTHGSCPPGCNPVFSLSPSADTVDMLPRHFSLDFLPDCDGGSWDIADSRGGLILLSXHARRGRGGAXLFHDLLVCEPLTRRSRVVPCPDRLEGYLCCGAFLLDGDGDETGERISLSNFRIMVALRLDGIARACSFSSGSEGFWTMARITADSHVRPESSLYFARNFARYVYWRTVEAEIIVL

SEQ ID NO: 279776 - protein, 114 aa, Zea mays
  Clone ID: MRT4577_186736C.1.pep
PVVHNHRVGLLLGGSPRGFEAQITASQTMASKRVRQGLSGNTLGPLVHCRASSQPPSHVNPLLLIDKTVTVVLAPVRVHPPQTLCVCFEGECSLVKGLVRRVARDRLYFCLAHV

SEQ ID NO: 279777 - protein, 65 aa, Zea mays
  Clone ID: MRT4577_186737C.1.pep
ILINWAKPTFIQQPLQFVWHTIHDSSYWTQDQIILMYQGLDDSRSPPCQIRHGLGLWLILVQVQT

SEQ ID NO: 279778 - protein, 68 aa, Zea mays
  Clone ID: MRT4577_186738C.1.pep
PYRAVQLMVSNTSIIICSWPSMESSHVQIYVLSFSIGKSIFMYLIHRMSEQMFSLVADMARLVWAMVP

SEQ ID NO: 279779 - protein, 44 aa, Zea mays
  Clone ID: MRT4577_186739C.1.pep
WCNRVRAARGSNLLRRPFTDNLVGVSPEVLLTSVQLGRQGRPIL

SEQ ID NO: 279780 - protein, 746 aa, Zea mays
  Clone ID: MRT4577_18673C.1.pep
MTQDKKAVAEMKLSLSEEKNLGFLESIAKTNTEKITREILEGLSEDTDDGEKTVPTPEENEVVIFRSLFKAGLRFPLNRFVVEVLKIYQAARSQGLEPNAKSFCSMHELLYETKPWGKEQYHNNFGCYSFVARSGSSSPVPTFRKRWSGYWMKEWFYVKNDLKAQEDIKEIIMRPILQRFGLRKPKVEIDEAAEGCRRAFGIVCSFIGTRDLIQEHIAFRVWPLVEKWEMPKETVTKTGEGELVRLKYTFRYEGKFVEPDDDWLKCIEATSDELLGPYSRAEDNTLSAAFGNRKKKRLNRVFDAIGFMYPDYRYPSWGQKRKGRTSRKDDASATPSEPVPKRKKVKVLTHRPRYIEPATVPEYGGETSSAAEAKETAPMQKTEEPAATPKTPLAKLGESKVDNVKETEVERTKILEVTSPSAEVTVSKAQKDLTVTPKRKRMVHVLDVLEEIKTSSSTPGKTAEASKTRIETKQTEAEAAKSHAKNKAGPSEPVKEKSLEAGGEEVEKKLRNKFCLKEPSLQLPKHLPKYLTILYDMLRGKDSKDISVCREMGKSFGFPTLEGGLSVLSKDELVDSLAYNSLKGLILSNALRAQKSAKDEGCTIALNNLRSEVIELRNEGLEKDKILNSLLNKIKEDEATSKAEAETERSEIEDLRKQVAEAKLKSAITEADRDASNYWKNYWEKTIVELRSSKERCYGKSVACVKKIKTSFTNIGAYSNEDNFVLGNPEGPIEWISGEAEAFEEV

SEQ ID NO: 279781 - protein, 57 aa, Zea mays
  Clone ID: MRT4577_186740C.1.pep
LLKVIEHIWESHCPLDVCYSYRYRSRIMVHYDSLGHTYTYVQTIHTENPTPSSMTRQ

SEQ ID NO: 279782 - protein, 120 aa, Zea mays
  Clone ID: MRT4577_186741C.1.pep
ITDHSLQGLPISHRPAGQLTARHPPRPRGPPSSTVIPSQNPPPQGMEKPVPKTKEPPQPNHPKKTPGNQKRKARGQKWRAPPTKNIAPPPPKAKNKKTRPQLNKKTSTTAKKGVFFIPPP

SEQ ID NO: 279783 - protein, 242 aa, Zea mays
  Clone ID: MRT4577_186742C.1.pep
MEAVGVTPAPVAAPEKKKLLDLKDPFPAAANGGAKASPAAKWAMKKKLVGGDAGYVLEDVPHLTDYMPQLPTYPNPLQDNPAYSVVKQYFVNPDDTVTQKIVVHKTSARGTHFRRAGPRQRVYFQSDEVNAAIVTCGGLCPGLNTVIRELVCGLYDMYGVSSVVGIEGGYKGFYSKNTVALTPKSVNDIHKRGGTVLGTSRGGHDTAKIVDCLQDRGINQVYIIGGDGTQKGASEIYEEVRR

SEQ ID NO: 279784 - protein, 189 aa, Zea mays
  unsure (1)..(189): unsure at all Xaa locations
  Clone ID: MRT4577_186743C.1.pep
LLDLKDPFPAAANSGAKASSASKWATKKKLVGGDAGYVLEDVPHLTDYMPQLPXVRESPILLVCHVGFLTTYPNPLQDNPAYSVVKQYFVNPDDTVTQKIVVHKTSARGTHFRRAGPRQRVYFQSDEVNAAIVTCGGLCPGLNTVIRELVCGLYDMYGVSSVVGIEGGYKGFYSKNTGCVTPKSVNDIH

SEQ ID NO: 279785 - protein, 48 aa, Zea mays
  Clone ID: MRT4577_186744C.1.pep
MTFMHTPQARSSERRAPSAALRIFSACTLKQNQGEYYDIKRGSECLTN

SEQ ID NO: 279786 - protein, 116 aa, Zea mays
  unsure (1)..(116): unsure at all Xaa locations
  Clone ID: MRT4577_186745C.1.pep
MGGCALPFDTEHDFNMTRFMAPGLSNLXFYILNIXSTRGKTEKSVRGLNHYACLHTMYVAILTPFAIAKDXPLIXAGGWQKAFAEGGXPMFAWRICEQSVFYHXLYNPVSYLVFRL

SEQ ID NO: 279787 - protein, 75 aa, Zea mays
  unsure (1)..(75): unsure at all Xaa locations
  Clone ID: MRT4577_186746C.1.pep
RSRRPRGPRHHRPARXDTNIKKRASCFRTLTKGMGYDQIRDAPPRTRKKYWRIACADRVNLSWCIQLLHGGTGNG

SEQ ID NO: 279788 - protein, 46 aa, Zea mays
  Clone ID: MRT4577_186747C.1.pep
FPARRAHLFLAALILLTGLGLLKISSAPALIGRSYIPGSNSIDTDP

SEQ ID NO: 279789 - protein, 88 aa, Zea mays
  Clone ID: MRT4577_186748C.1.pep
QPTVWRLYKAGSAFWFVSTSGDPNDITSKFKIERLEGDHAYEIYSFKFCPSVPGALCAPVGTFEDADGTKVMAVGDDIEPYYVRFQKV

SEQ ID NO: 279790 - protein, 138 aa, Zea mays
  unsure (1)..(138): unsure at all Xaa locations
  Clone ID: MRT4577_186749C.1.pep
AYSVTVTHSLLEHTVWPTAGXEAXYFFCRVPCIERPTYPSXHRLVSXVISSLTASLRFPGALFVVVNELQTNLXPYPRIHFMLSSXAPFXSAAMAYLLPLSVAXXPXAPFXPSSMLATLXPLLFLVPARAVALSGRFQ

SEQ ID NO: 279791 - protein, 99 aa, Zea mays
  Clone ID: MRT4577_18674C.1.pep
YRRSNGWPAMTCSVGKFARSSSLSHTYRRCVLRLTKSYPINSPFIFQWSCGKSFVDAMDSCCAITFVSAGVEEWSVGCVSCGHQKNYGSSRRCGCLLEP

SEQ ID NO: 279792 - protein, 58 aa, Zea mays
  unsure (1)..(58): unsure at all Xaa locations
  Clone ID: MRT4577_186750C.1.pep
RNEFKTRVRINFYRVITXKKKKKKKKKKKKKKKKKKKKKKKKKKKKKKKKKKKKKGGA

SEQ ID NO: 279793 - protein, 92 aa, Zea mays
  Clone ID: MRT4577_186751C.1.pep
GLGFFFFFFSENPKNQPWPKIKNQQRGWLISPRAGGPWQGLNKPSEKESKKSWGGNRKIFPPSGGHYRDILVFPRPGPKHIKGGDKGPKPWA

SEQ ID NO: 279794 - protein, 65 aa, Zea mays
  Clone ID: MRT4577_186752C.1.pep
KKKKKKKKKKKKKKKKKKKKKKKKKKKKKKKKKKKKKKKKKGGAVLKDQILIPGVGKVKFFFWGT

SEQ ID NO: 279795 - protein, 43 aa, Zea mays
  unsure (1)..(43): unsure at all Xaa locations
  Clone ID: MRT4577_186753C.1.pep
LYIPPGLXLTGRRDPMILAKRTQHQANQPAKPNNIYIYTINQQ

SEQ ID NO: 279796 - protein, 81 aa, Zea mays
  Clone ID: MRT4577_186754C.1.pep
NPGALIRQHMHLAPSHLPAFASGPTPCSMTSFPPPPPGCSAAYTTNLKDDNSNPHTTMLLTLTIPHLQLLMSKDSFTKNLT

SEQ ID NO: 279797 - protein, 92 aa, Zea mays
  Clone ID: MRT4577_186755C.1.pep
MAASRAASATAAFVLLLALLLCTGTSPVTAAVDCTAACVEPCKSFAQGICSTGASSGTCPPDAVATCQRAAILACGLSCFTGCSAGTFVPCA

SEQ ID NO: 279798 - protein, 65 aa, Zea mays
  Clone ID: MRT4577_186756C.1.pep
PTLPPPPPPPRPGPITRPLDPGAYAERVDSAPHSLTRSSVRWSSIRVSMDTRSSSIVNMHTFVPN

SEQ ID NO: 279799 - protein, 76 aa, Zea mays
  Clone ID: MRT4577_186757C.1.pep
RLGRGASCVGLSPLRLVCLWTGPNGLCSWGWNNDNFRFCHGINCKYFSSLQLMEHFVAAFGLGAQKPVFMASLGGP

SEQ ID NO: 279800 - protein, 101 aa, Zea mays
  Clone ID: MRT4577_186758C.1.pep
LQSADALGVAPKEPLFRIRMSDGCRERNRASSVALAIAAMTIRLVCRAIMSAADVCPLGAKVTAPEHISAAGRWCFLNPHQRPPKKTHPVLGNKPPSDLKP

SEQ ID NO: 279801 - protein, 64 aa, Zea mays
  Clone ID: MRT4577_186759C.1.pep
IFNALPPWNPPQKGSKRIWNFCCIVKFCNPCSFQAPLIVLSVYRETNVPNKICGSQSIKIIVCS

SEQ ID NO: 279802 - protein, 124 aa, Zea mays
  unsure (1)..(124): unsure at all Xaa locations
  Clone ID: MRT4577_18675C.1.pep
FKLALPQSLIALILLTYFKVRSSYIALIWLVSPAFAYGFFQATLSPLRLPKHLNVLTFVVHFFAPLLSSAPLAIRISYVIFPTILPIYNNPTLLPHXLKSXIPPLSISFFICSTFVYLLLYLHI

SEQ ID NO: 279803 - protein, 50 aa, Zea mays
  Clone ID: MRT4577_186760C.1.pep
FPSFFFFIKLFSTSRYCILLFRGSTDQYYAFSLYTIIIILKHILSLFLHL

SEQ ID NO: 279804 - protein, 98 aa, Zea mays
  Clone ID: MRT4577_186761C.1.pep
STLAKPGQKTSKGYPDGDDVAQRQAYVTVLKEFCPLSVPQMSMMPLCAITPMSFLNSLFIENWISQGFIPAGSVQLWPIHAVFYLSFEMKELDAGFEP

SEQ ID NO: 279805 - protein, 76 aa, Zea mays
  Clone ID: MRT4577_186762C.1.pep
SGRLYGILSLVPPRAFFVVSFGCSRGRLSRNASTHLVAKRSASCRHADRQVNMLCCCSISCIHYGTLCRREYRARP

SEQ ID NO: 279806 - protein, 133 aa, Zea mays
  unsure (1)..(133): unsure at all Xaa locations
  Clone ID: MRT4577_186763C.1.pep
KKHGAEPGGQKFHQAGKKKTDKAGGPPPPKGQKTGTIPDLAPKPHSXKPEKAPRPKGKKKKNHGPEKKGXPPRGPPIWPRPRPPPSAPPWAPTPPPPGGPHPGTPKKGPPGERPRGXPAKTGPGPEEGPSCPK

SEQ ID NO: 279807 - protein, 85 aa, Zea mays
  Clone ID: MRT4577_186764C.1.pep
TTEPLRHHDDLCRIMDSHRDAILRLSLALVAATAPHATSAKKKTAAKSGQTAEAIDIQDDFCSTLCQGKKETYLPVCNELCELSH

SEQ ID NO: 279808 - protein, 120 aa, Zea mays
  unsure (1)..(120): unsure at all Xaa locations
  Clone ID: MRT4577_186765C.1.pep
VAIRNSSDASRVNRNFLMGFEVIDHIKASLXAACPGTGSCPHIATLAARDSTALFEXPYWDVPLGPRDLLGASIQSSNNDXRDCNNTLPTIISKFKRHGLNVXDDASLSCGHTIGMSRCT

SEQ ID NO: 279809 - protein, 96 aa, Zea mays
  Clone ID: MRT4577_186766C.1.pep
LDIARSLQNEATKQKTDLLKEVESIRMELQRAREDRDTKSAQVDSLLVDIGTYKEMTGKSVIELDSAMAKTSALEETCSSQRKMIETLEIKLAAAN

SEQ ID NO: 279810 - protein, 55 aa, Zea mays
  Clone ID: MRT4577_186767C.1.pep
SVGVPYQSFSLFVSRCPFLVPLLLACSLEIQSSPQLFFLAVVCSFRCVCVCLCAL

SEQ ID NO: 279811 - protein, 54 aa, Zea mays
  Clone ID: MRT4577_186768C.1.pep
MVHVNYYRYYGKTCKKPRRTYEKERLDAELKLGGESRLRCKRQLWRDHYALSRI

SEQ ID NO: 279812 - protein, 82 aa, Zea mays
  Clone ID: MRT4577_186769C.1.pep
ERLLSPEQVKKGVGGSASTSKLSMVSKMSVAPPPPVMFHNLSIVVLELKPTLCFCLSVCVYSRSHFETVKLKKLKKKERKKL

SEQ ID NO: 279813 - protein, 72 aa, Zea mays
  Clone ID: MRT4577_18676C.1.pep
FQDLSTPLVSVADNRNQTYRDPKTLGPPINKFYNGIHGHWSPNSNKPSTPMLNDHLNIKIPTIRNLNFLKMW

SEQ ID NO: 279814 - protein, 150 aa, Zea mays
  Clone ID: MRT4577_186770C.1.pep
MASATGVSSSEMAVDHATGPGAVDKPRFDALTPNEMSGGRPQFRKVPVPQHRFAPLKRCWMEIKDVKTLRGEHLSRAIGRLSGKGGKTKYAIENSTRTRIVIADTKIHILGSFVNIKVARDSLCSLILGSPAGKVYSKLRAVSARLAERY

SEQ ID NO: 279815 - protein, 220 aa, Zea mays
  Clone ID: MRT4577_186771C.1.pep
MASATGGSSSEMAVDHATGLGTVEKPRFDALMPSEMSGGRTQFRKVTVPQHRFAPLKRCWMEIYTPVYEHMKIDIRMNLKARRVELKTRQDTPDVSNLQKCADFVHAFMLGFDIADAVALLRLDDLYVDSFEIKDVKTLRGEHLSRAIGRLSGKGGKTKYAIENSTRTRIVIADTKIHILGSFVNIKVARDSLCSLILGSPAGKVYSKLRAVSARLAERY

SEQ ID NO: 279816 - protein, 220 aa, Zea mays; identical to SEQ ID NO: 279815
  Clone ID: MRT4577_186772C.1.pep

SEQ ID NO: 279817 - protein, 113 aa, Zea mays
  unsure (1)..(113): unsure at all Xaa locations
  Clone ID: MRT4577_186773C.1.pep
RPGESVKSNQEGYXXSSDGSCLXKTRSERSIDQWVFAKSKSEESMDQWSEIPSDVESFREGPRCAGIQSDENLLRPPITAADLRSQLHLHRCQRRNRGMSLKIRSSIYLTVSN

SEQ ID NO: 279818 - protein, 220 aa, Zea mays
  Clone ID: MRT4577_186774C.1.pep
MASATGVSSSEMAVDHATGPGAVDKPRFDALTPNEMSGGRPQFRKVPVPQHRFAPLKRCWMEIYTPVYEHMKIDIRMNLKARRVELKTRQDTPDVSNLQKCADFVHAFMLGFDIADAVALLRLDDLYVDSFEIKDVKTLRGEHLSRAIGRLSGKGGKTKYAIENSTRTRIVIADTKIHILGSFVNIKVARDSLCSLILGSPAGKVYSKLRAVSARLAERY

SEQ ID NO: 279819 - protein, 135 aa, Zea mays
  Clone ID: MRT4577_186775C.1.pep
MKFLKVGRVAIITRGRYAGKKVVIIQPVDNGNKPHPFGHALVAGIERYPSKITRRMSKTRQEKRNKIKPFIKVINYNHLMPTRYTLELEGLKGAVSNDTFKEVSQREDAKKTVKKVLEERYTSGKNRWFFTPLKF

SEQ ID NO: 279820 - protein, 377 aa, Zea mays
  Clone ID: MRT4577_186776C.1.pep
MARGLRGVRDDLSELGRHLLDIACFLHPLLNPAHTDSPPPTPTGRRRPRRSPSPHPAAPPSPSLLAGILSDLAEIGGSFRGGFSRSSPAPDHPAPDALESQQAASSPSPRPPPPAAADQIADDVVGAARALAARPEAWIDFPVLALDEGSVISGIQRDHMESIEKLVPDLASLRGRLCPSYMDEDIFWKIYFRLLESNINEHSSEEDIRSVPNSVHHNNEIESDSPPHVCEIESVKSNQEGYQSSDGRAFPKTRSERSIDQWVFAKSKSEESMDQWSEIPSDVESFREGKRYLSSEELSDVDSANVVVMDKYMDSLLSDRRNLPYASSSVRRDSVRRKPASSADYSRRPPQPTPPASLSKKESWDVIEDSEFDILDS

SEQ ID NO: 279821 - protein, 216 aa, Zea mays
  unsure (1)..(216): unsure at all Xaa locations
  Clone ID: MRT4577_186777C.1.pep
MPVSCPDVPLLDSPLLKTHSMASATGVSSSEMAVDHATGPGAVDKPRFDALTPNEMSGGRPQFRKVPVPQHRFAPLKRCWMEIYTPVYEHMKIDIRMNLKARRVELKTRQDTPDVSNLQKCADFVHAFMLGFDIADAVALLRLDDLYVDSFEIKDVKTLRGEHLSRAIGRLSXGKGGKTKYAIENSTRTRIVIADXKIHILGSXGNIKVARDSLCS

SEQ ID NO: 279822 - protein, 83 aa, Zea mays
  Clone ID: MRT4577_186778C.1.pep
MASATGGSSSEMAVDHATGLGTVEKPRFDALMPSEMSGGRTQFRKVTVPQHRFAPLKRCWMEIYTPVYEHMKIDIRMNLKVRR

SEQ ID NO: 279823 - protein, 128 aa, Zea mays
  Clone ID: MRT4577_186779C.1.pep
FALAACPPLSVRKLWPGQITKSDIPGASLRRVPYLLTSRKAEGGGVLGGGTRSHHRVRACCPLLFVVPAGICGHSGGRYITHRFGAGPGPGEQAERGVHHGGGVPAHWRRRGALAFGRVPGRRFFLRG

SEQ ID NO: 279824 - protein, 130 aa, Zea mays
  unsure (1)..(130): unsure at all Xaa locations
  Clone ID: MRT4577_18677C.1.pep
GPPQGHAKGGPHPRSVRGAEAPGPVQARRPXAPIAPTARGPRGSPXPGEQGPAPASGRTPPTAPPPARRPPPPAPPGAAPPPGAAPXGPPGPPPRPRPPAPPPPPPAPPRSAPPPPPPPPPRTPPLPPPP

SEQ ID NO: 279825 - protein, 506 aa, Zea mays
  unsure (1)..(506): unsure at all Xaa locations
  Clone ID: MRT4577_186780C.1.pep
AWGRVTTYGALHDISQSKXLLRDLTSNLTFQEAYDMTGRVLGITVCSPRKNXPPRCLNYLTAPHVVIWSAVTASCAFPGLFEAQELMAKDRFGNIVPFHAPFATDPEQGPGASKRRWRDGSLEMDLPMMRLKELFNVNHFIVSQTNPHISPLLRMKELVRAYGGRFAGKLARLAEMEVKYRCNQILEIGLPMGGLAKLFAQDWEGDVTMVMPATLAQYLKIIQNPTYAELQMAANQGRRCTWEKLSAIRANCAIELALDESIAVVNHKRRLKRSMERTAAASQGHSNYVRPKTPRRIPSWSRISRENSSESLAEEISAVAASSMQQGAALVVGAPPTTLSQHVRRSSHDGSESESETIDLNSWTRSGGPLMRTASADRFISFIHNIEIDTELSRPCAVEGDAAGILSESTFPNGSRPNNSSSVSMPGRCTENSGTESCNTVNTRASTLTSMAVREGDLLPPESTTDGVLLNIVKRDALQDGVIELVESSCAEGYAANCDTVSGLDC

SEQ ID NO: 279826 - protein, 78 aa, Zea mays
  unsure (1)..(78): unsure at all Xaa locations
  Clone ID: MRT4577_186781C.1.pep
SAVMVALDKXIFTPLRKSSDEFYAAMRHNLSSVKDTFEEVKQLEEKANAVMAVAXAAIAAALNTINNETHAELEHQIA

SEQ ID NO: 279827 - protein, 254 aa, Zea mays
  Clone ID: MRT4577_186782C.1.pep
MQPPPQLPAALPVGFRFRPTDEELVLHYLKPKIAGRAHADLLLIPDVDLSACEPWELPAKALIRSDDPEWFFFAPLDRKYPGGHRSNRSTAAGYWKATGKDRLIRSRPAGTLIGVKKTLVFHRGRAPRGHRTAWIMHEYRTAEPQLPQGQNGSFVLYRLFNKNEEESEASDAADSPSTSSPPIAPEVKTENLSQPTSAKMSPHIATVSSNEPTSNQGDVNLLDVLTQLPDLHPEQAFDGFPTITSSMRPYTDHP

SEQ ID NO: 279828 - protein, 66 aa, Zea mays
  Clone ID: MRT4577_186783C.1.pep
IGTIVIRHRYRVSVSTTTLCKEEEALGGGDITSSAWGRPGTYSVFGLRDRVIHLLLTPHFFIWFVE

SEQ ID NO: 279829 - protein, 58 aa, Zea mays
  Clone ID: MRT4577_186784C.1.pep
SYIFFGNKLLTIHHKINIQLHLKLTRTKTETHTLHYNITSQNIHTMQFILTQYTRIES

SEQ ID NO: 279830 - protein, 57 aa, Zea mays
  Clone ID: MRT4577_186785C.1.pep
RWSSPTPPCPDDWSYVSGSLLTIRSGTGTLLTVIVNCDGFMVGKIHAYMLVAIMFAL

SEQ ID NO: 279831 - protein, 59 aa, Zea mays
  Clone ID: MRT4577_186786C.1.pep
VLRLPHRYIKSVVDLIGMMTEDGPSSDFNCNLVDPIVNGPFDEAVDCTTVSRVIETSSE

SEQ ID NO: 279832 - protein, 27 aa, Zea mays
  Clone ID: MRT4577_186787C.1.pep
SLETKHPLSDKKKVLVSIFYNFGTKIE

SEQ ID NO: 279833 - protein, 188 aa, Zea mays
  Clone ID: MRT4577_186788C.1.pep
MEEDRGVTVLSSRIERWQLRRGDHIYAWRTGYSHHGIYESDEKVIHFTSASAQSSGFFSSSSSAAFSSHSKCREAMRGGGVVVCCLDCFLEGDNLCLFAYSVSMAFAALSNIGAQDTCSVVDEDPPDTVLRRANDFLDYGGFRSYNVAGNNCFHFAYYCKTGREYLSPVRMIADPSQEHQRSPACTIL

SEQ ID NO: 279834 - protein, 58 aa, Zea mays
  Clone ID: MRT4577_186789C.1.pep
NFNRAQVSARALQTPIRTRLGERGTPARAGPGKKSRAGRAIIGGAPFFFFFFFFFFFF

SEQ ID NO: 279835 - protein, 92 aa, Zea mays
  Clone ID: MRT4577_18678C.1.pep
VLGNFSSRAKMERRSLAKFGQTWASLGLTGRSPETPSDESEMRYSSEVGLEQIMIIRALVSRSASQSWSAELVTFRSIARDALGRVENVILV

SEQ ID NO: 279836 - protein, 64 aa, Zea mays
  Clone ID: MRT4577_186790C.1.pep
DNSAEARMGPHIRSSRRQRYRHKRHHHPSADRRSRHRLRRRRTTLVPTGVVVTVVITVVTGPGT

SEQ ID NO: 279837 - protein, 162 aa, Zea mays
  unsure (1)..(162): unsure at all Xaa locations
  Clone ID: MRT4577_186791C.1.pep
GRRPAVPVEVILDPGLTTTLDXDDQLRLGGRRGMDSRLVFLVRAAELGAPCIGGHGHLGPGADHGSHTVEACAVASTGGGGGGERWTCSWTVKKLRERARGRRQMWDGECLTLLSSAAHRRRLLLVAVERRTHASVPDRREHPGAGGRRRAGGGLGEVGLGL

SEQ ID NO: 279838 - protein, 199 aa, Zea mays
  Clone ID: MRT4577_186792C.1.pep
PLFFFFFSFFFFFFFFFFFFFFFFFLGNTTSSMGPQSKTIQTNKYIGRGPQGALRKRKKRAPRKKANRPRQRKTSGPGTKHNKDRDRKSKNPGQPRGNTPEAEALSMYRRASPPCYGSQGDRAPNQLGNRSPRPRRNGQGRRDGHFARKGGHLPQESGGGEQSEPGQGGREPKGHGGQGQDPPGAGGAARPERGEPEGP

SEQ ID NO: 279839 - protein, 80 aa, Zea mays
  Clone ID: MRT4577_186793C.1.pep
EMREEWEKGASLWVRGDRPSTKTPCLCGSQCSGSDGKSLGCLCRNRRSWGRHPSRIALRDHPLIIPFTAEGSSGRLEVPM

SEQ ID NO: 279840 - protein, 122 aa, Zea mays
  unsure (1)..(122): unsure at all Xaa locations
  Clone ID: MRT4577_186794C.1.pep
GGKQTTKAPGTPTGKPGTEPSNTAGQKKGGAQRDTPKTGARGPPAEPGASKGCTRPTRPPPXRPRRTQKRQPQSTRLAGKLMNHSRPLTKPIREAIPDFYSSSRKQQGLESPPVNAQSPRAG

SEQ ID NO: 279841 - protein, 86 aa, Zea mays
  Clone ID: MRT4577_186795C.1.pep
KKAVKTIKTNQNQYGKHIYRLLSRYCRTKNVCINICVRPYHHRTGIKLAISILHDGEIARVRVIKYYRCMYDACVCVSIYHVMVCI

SEQ ID NO: 279842 - protein, 157 aa, Zea mays
  Clone ID: MRT4577_186796C.1.pep
TKKEKSGKKEKKTTAAHKKKKKTNRAKTKKKKKKRRKKKKKKGKRKKRKKKKNREKRKKKKKRKRKKKGKEERNKGKKKRKEGERKRRERERKRKKARKKTPPPHKGETGKETPTGQHCQGEGQSRPSPTNHATPPLAYATHIYTARWRRWRSVGRP

SEQ ID NO: 279843 - protein, 72 aa, Zea mays
  Clone ID: MRT4577_186797C.1.pep
AYYLIKTHHILQTQNSADGASDSCFSIPSQSARLSPLNIAAKKDKAPPPSAKPPKAGGGKQKKKKWSKGKLK

SEQ ID NO: 279844 - protein, 48 aa, Zea mays
  Clone ID: MRT4577_186798C.1.pep
AGTLDAGLVEGLTQYKKCVVQDDGSVSCKQIALVRRTDRRTLGQVRSV

SEQ ID NO: 279845 - protein, 70 aa, Zea mays
  Clone ID: MRT4577_186799C.1.pep
CHGQVLAGRNTACGPCIPIGRPMQEHGAVHGLDGFLGRNRYEVPNVTQLTTHQLKAQRPWCLQSALTPIT

SEQ ID NO: 279846 - protein, 406 aa, Zea mays
  Clone ID: MRT4577_18679C.1.pep
MGNCWGAKISSDSPSRGASSPSGTASKLASRNGAAAALSGCSSHASSASMLPTPRSEDEILESANVRAFSFNELRTATRNFRPDSVLGEGGFGSVFKGWVDEKTLAPARPGTGMVIAVKKLNQDGYQGHKEWLTEVNYLGTLSHPYLVKLVGYCLEDEQRLLVYEFMPRGSLENHLFRRSSYFQPLSWNLRMKIALGAAKGLAYLHSDEAKVIYRDFKTSNVLLDANFNAKLSDFGLAKDGPTGDKSHVSTRVMGTHGYAAPEYLATGHLTTKSDVYSFGVVLLEMLSGRRALDKNRPNGEHNLVEWARPYLRSKRRIFRILDPRLGGQYSLARAQKAAALALQCLSVESRHRPSMDEVVTALEQLQDTKEGGNHHLQKRPGSRSLDNNGGKAAGKGKPAPHVKPV

SEQ ID NO: 279847 - protein, 200 aa, Zea mays
  unsure (1)..(200): unsure at all Xaa locations
  Clone ID: MRT4577_1867C.1.pep
EAADSSKGAREPITKRAEGEERRGEERRGRVWPTKAPKKLHGAAKAGNETRRATALEEAGPDDKTGPNSCGTAENKSPEKLARNRVGQEPALQDGDRNLDEXRATCKDAERKIFFTTPAHXNREEAAKGXAGXEEEAKQNSAAXXDSHDQGHRXARPEGTTDQKEEEDKQDKQNKEPEEHEERQDERKHPDGDRRTLADQ

SEQ ID NO: 279848 - protein, 99 aa, Zea mays
  unsure (1)..(99): unsure at all Xaa locations
  Clone ID: MRT4577_186800C.1.pep
PTPRVRPRLRDEFLSVAAALIEGVAGACLAAPRGADXYAECAETTMDTVVMMLALDALDQDDTCCAPSALNAMRCTASLSIFLLMDMYWNVQTPPTSHE

SEQ ID NO: 279849 - protein, 98 aa, Zea mays
  Clone ID: MRT4577_186801C.1.pep
AGRVPSLIQCPGRHLLGLCFPSHGALAAQPLSSSISSRPPHLPRCELAPALQLAIAPPCSSSGCASSTSTSPPAVHTLEPCALLQVSSSVKHRQHNIF

SEQ ID NO: 279850 - protein, 59 aa, Zea mays
  Clone ID: MRT4577_186802C.1.pep
MAACTMAISSTAMAGTLIKVGSFGEGRITMRKTACKPQVADPLHFLTLSQPERLMGHSL

SEQ ID NO: 279851 - protein, 114 aa, Zea mays
  unsure (1)..(114): unsure at all Xaa locations
  Clone ID: MRT4577_186803C.1.pep
QKKRKQPSPPXGHTXPKANPPDGDGEHEHAGAAGKPAGAPGAQHGDPDRGAGGAGAGGAGEPGPAGRAAARRRRRGPTGGAGARPGGSGPQAPPAGAARRAGGHGHDQRRGRRR

SEQ ID NO: 279852 - protein, 157 aa, Zea mays
  unsure (1)..(157): unsure at all Xaa locations
  Clone ID: MRT4577_186804C.1.pep
MVCENKAHVTASGDGLCVPQPSRADPLNWGKAAEELSGSHLDAVKRMVEEYRRPVVTMEGASLTIAMVAAVAAGSDTRVELDESARGRVKESSDWVMNSMANGTDSYGVTTXGFGATPHRRTKEGGALQRELIRFLNAGAFGTGGHDHVLPAAATRA

SEQ ID NO: 279853 - protein, 95 aa, Zea mays
  Clone ID: MRT4577_186805C.1.pep
YLYPSGTKSSKWHKHFYNRLKGYILAANTSTTTCDCLGQHSKGLPCMKILMIQSSMVLEEGIFPALATKFRSEMCPLIMTSQLYVCSPAHILRPP

SEQ ID NO: 279854 - protein, 134 aa, Zea mays
  Clone ID: MRT4577_186806C.1.pep
GKKKNLLGPHIKLPFPGGGRFFLSVWRPGFPLFKRAVGPPAINVVGGAVWAPRLFYLIFRVAFFSGIVTGLHFPPEYIFSLLCPRFYIPPLKGKMVSTRAPVGISRLTPPFQARLGGGVAKKKKKKKKKKTPPQ

SEQ ID NO: 279855 - protein, 56 aa, Zea mays
  Clone ID: MRT4577_186807C.1.pep
IKKKKKKKKKKKKKKKKKKKKKKKKKKKKKKKKKKKKKKKKKKKFSLGRNPLRGNF

SEQ ID NO: 279856 - protein, 113 aa, Zea mays
  unsure (1)..(113): unsure at all Xaa locations
  Clone ID: MRT4577_186808C.1.pep
GKFLKRFEIYLHQLTPNAIVRLSVYIWALRSXGKDANAQGFCXVHELHYQTKARADGLHKNFGCYNFAYRKDTRASVIGYRTKWPTGWTNEWFYVKADEKKREKLITMVMSPL

SEQ ID NO: 279857 - protein, 55 aa, Zea mays
  Clone ID: MRT4577_186809C.1.pep
LIRFFAQALGSPLTITITIPLNLLHRCFVLSRPGHHKKILPNLSEMREGGKARYN

SEQ ID NO: 279858 - protein, 103 aa, Zea mays
  Clone ID: MRT4577_18680C.1.pep
RAKYFKPSKPFVGGEKSPTPLGKFSFPKVLPEISPPKPNPFSLPGFWQKQNFSPRQTKSPPFKPLGKKRFFPIGAPLKFCPKPENFPHLNFLKNPFLVKPGKL

SEQ ID NO: 279859 - protein, 47 aa, Zea mays
  Clone ID: MRT4577_186810C.1.pep
GYGIPYTFVTRVLSFTNKMGNWQFINIFIVQSSCRTLACPHNKFNLL

SEQ ID NO: 279860 - protein, 47 aa, Zea mays
  Clone ID: MRT4577_186811C.1.pep
EVLSRRSPLGVENVAASRWAFLLNFPLTHGGEERRAGAFVNFPAGSG

SEQ ID NO: 279861 - protein, 127 aa, Zea mays
  unsure (1)..(127): unsure at all Xaa locations
  Clone ID: MRT4577_186812C.1.pep
PAGMGLFDSPSQCDVKVAPFDLDLLPIDVDDVEKLAPQSILGSFLKSERSQLAKPLLSNSTSGNLNKSEQHSLSADDKMDFQDFLGGXDTIDIAGTSKLEVENARLKAELASAIAILCGAGYGYESI

SEQ ID NO: 279862 - protein, 206 aa, Zea mays
  Clone ID: MRT4577_186813C.1.pep
MGSSQADKPLRRIAASFEELAAVAKQQPAVPMDAGAFSRACSNVSVLFGCLGIAFKFAEMDYVAKVDDLVEASKSISTLPSMVERDIQTDTVRKPGSHTRNLLRVKRGIDMVKVLFEQILVTEGNSLRDAASVAYAQVFAPHHGWAIRKAVSAGMYALPSKSQLLKKLNEDEESAKVQMQNFVRSSAPVICYVDDLFTSRNLGIDW

SEQ ID NO: 279863 - protein, 79 aa, Zea mays
  Clone ID: MRT4577_186814C.1.pep
DISSLSFSIINAYWSFGNGYPYQALFLILSFFKDASLNSNPLRSMRSLITIAPTCSSSSPISQNYNNYINCILLCLGHK

SEQ ID NO: 279864 - protein, 84 aa, Zea mays
  unsure (1)..(84): unsure at all Xaa locations
  Clone ID: MRT4577_186815C.1.pep
TIQSSTVSLIFNLETITARFYQIQYSLYTACSSITPFLQRSSISTFQXTTISNQTXTFHYHNHNNKLSPTRPPTHPXXLKRTRG

SEQ ID NO: 279865 - protein, 134 aa, Zea mays
  Clone ID: MRT4577_186816C.1.pep
NGGRERAPPNEGFECSWEGFPQCFVEADPFPPVVFPMRCLYTPQRAVIPQSLPEKPCCSWVPPPPLFPLRPPPFYVKLLPPPPPPRTYKPPLFSPNPAYYLFVPKKKKKKKKKKKKKKKKKPPKKKKKKTPPPP

SEQ ID NO: 279866 - protein, 169 aa, Zea mays
  Clone ID: MRT4577_186817C.1.pep
MGVFEMRIKQQGEPSLVTPAEETPSGLYYLSNLDQNIAVIVQTVYCFRAADGGAGDGVSACDVLRESLAKVLVHYYPLAGRLATSGDGKLVVDCTGEGPVFVEADADCAMADIGDVTEPDPSVLGRLVYSVPGAKNILEMPLLAAQVTKFKCGGLSCWGLAINHCMFRR

SEQ ID NO: 279867 - protein, 55 aa, Zea mays
  Clone ID: MRT4577_186818C.1.pep
GGNGNYEAFSLIPSIKFIFYNTRTSYFCCSHKSAEQQKVNRKFNLYTTVLYFLLQ

SEQ ID NO: 279868 - protein, 61 aa, Zea mays
  Clone ID: MRT4577_186819C.1.pep
PRGPIFQKKQFQKNLTGRSPRKTQRKKPPDWTCLSDRNTPYLKSFKFCFLQFLQKKLVVFK

SEQ ID NO: 279869 - protein, 497 aa, Zea mays
  unsure (1)..(497): unsure at all Xaa locations
  Clone ID: MRT4577_18681C.1.pep
MPHVKPAAGLPPYHHRALPGPGQGPVPTGHGMMHREVRDQYGPPGPRMHLPPLGHGPAPFPYDMLPPLPPPEVLEQKLVAQHGEMQKLVIENGRLAASHASLRKELAAAQQELQRLQAQGEAAKAAEEEEMRGLLDKVGKMEADLKARESVKVELQQAHAEAQSLVAMRQNMXADVQKLSKDLQRNLGEAHQLPALLAERDVARQENQHLRSTYDYERKLRVDHSESLQTMKRNYDSMVTELEKLRAELRDTSNLDKSGFFYNSTTQKADGISSHLSVGQIAYDTGYGSTQARATPTGLADLSGVPGGAGLRSGFDPSRGNAYDGSHVANLSSSKTGTHDASRGATGFDSLKGSGYDASKAHVTGQASATAAHGGIAGYYGSNQAAHAWGQSASPYGSVQVPPSYASGSNTSYGAAAAAAVRPYGSAQAQPSYGQTQAPSAYGHTQLPSSYSLAQAQSPFTAAQGSSPYGLAAQPPAYGSGRAGSNAGSYEAPQGRK

SEQ ID NO: 279870 - protein, 47 aa, Zea mays
  Clone ID: MRT4577_186820C.1.pep
LHVPPPPRRSSAVERLTSAQLGSSRRTCNGLCMPTGHRVMSLDMLCY

SEQ ID NO: 279871 - protein, 85 aa, Zea mays
  unsure (1)..(85): unsure at all Xaa locations
  Clone ID: MRT4577_186821C.1.pep
ALRTVSVAVISSVSLLQXXSLMREPLAILSLSFVGFASMPSDPQIIDTDGPTSHSKFLFMRCMLYCIHAFCMCVLRCRRVAYLLS

SEQ ID NO: 279872 - protein, 170 aa, Zea mays
  Clone ID: MRT4577_186822C.1.pep
QEQGITGSHLLQPTNHCIIGIRNLATRRMGSVARCPLPARYMLKPSHVCTIFSTKQSSTNTDYSHPQSTRLRIEPNQCRAGRRQRPPCRRGGSGGAPYADPKRTAARSRVRTARIRLRLAAYPSGSSAATWRGERRRRRRRGTWCSRFFFRARSSGTVREVGGGAPLAGL

SEQ ID NO: 279873 - protein, 75 aa, Zea mays
  Clone ID: MRT4577_186823C.1.pep
RHYLITNFICAHTFLNRLILLFLYIRYLCIISHHVSETAICFHTQARMHGYIIQIALLDQIMVPSHNVRVDVRVA

SEQ ID NO: 279874 - protein, 128 aa, Zea mays
  unsure (1)..(128): unsure at all Xaa locations
  Clone ID: MRT4577_186824C.1.pep
EKKPAKSFSMFSPNGRFILVVMLDNSLKLYNFSAVXFLMVFSGHVYRQYCIQYTFSVTNGXYIVSGSEDNCMYIWYLQXRNILQKLESHSDTVISXSCHPSXNKTASGGLYIDRTVRLWVQYSYSTFR

SEQ ID NO: 279875 - protein, 81 aa, Zea mays
  Clone ID: MRT4577_186825C.1.pep
RCLIPGFHQDLGFGPLKTGPWKLPFRTIFWAPFHIWGLPGSAALFWGSFLFPWGPAPFSPFKAVCFPKSNKFQITKTLKNK

SEQ ID NO: 279876 - protein, 39 aa, Zea mays
  Clone ID: MRT4577_186826C.1.pep
CLRTVAKNVNPSVACSLSGKCGVSIPYPMCMSTNCDTVK

SEQ ID NO: 279877 - protein, 125 aa, Zea mays
  unsure (1)..(125): unsure at all Xaa locations
  Clone ID: MRT4577_186827C.1.pep
AEEQKQAGVGDSTEWIASSLTRRSGIGTGLAWADFLTVVVVSEQLKTRLEXVAQQQANTKYVEQEQMVVFPNGIRYYEMRVGVVDVLWPGDMVVXNVHGRLEGSGGEAYMDKLGDGERPLYRFQA

SEQ ID NO: 279878 - protein, 75 aa, Zea mays
  unsure (1)..(75): unsure at all Xaa locations
  Clone ID: MRT4577_186828C.1.pep
KEHKDILCLFPCSRLVGVIFIGSTHSDDTGSPRRRPPYSSYASGHHQSSGRPSPPRGSGARGFGGXFGGLPRWIY

SEQ ID NO: 279879 - protein, 87 aa, Zea mays
  Clone ID: MRT4577_186829C.1.pep
NSPKYGYISWRKGAKLSNKIPPRGLCQSKEKLTAQHPYANYLRRTKCAHAYSLLTHKITRALILFQHIHRKIKVGEDSISKKKKLDC

SEQ ID NO: 279880 - protein, 47 aa, Zea mays
  Clone ID: MRT4577_18682C.1.pep
RHMGHRPAVSWPSPLLNLIFPASILLPLSRHRGQGGRESPLEGGGEV

SEQ ID NO: 279881 - protein, 50 aa, Zea mays
  Clone ID: MRT4577_186830C.1.pep
SPTCVGSRRFSQMGCVPYSTGASNNQQPYYSSYPRCIYWHKTLRGSNYQN

SEQ ID NO: 279882 - protein, 136 aa, Zea mays
  unsure (1)..(136): unsure at all Xaa locations
  Clone ID: MRT4577_186831C.1.pep
KLRECFKTXTFMYKENDKTFKVYKQVSKTLALLLKEECQSRESQSMLGHNLAQIPSKPDSLLFVKMTSEDLPCTATLTGAVVTPGELQIAQPRQAPQSVAKFRKIRISFPFACLNHRRDWLRLVSFSYALIIEEIC

SEQ ID NO: 279883 - protein, 47 aa, Zea mays
  unsure (1)..(47): unsure at all Xaa locations
  Clone ID: MRT4577_186832C.1.pep
KASEEEMELRFRLALVRGGSQGPLKCSSXVWSGSGKEDCVVVGGRKG

SEQ ID NO: 279884 - protein, 251 aa, Zea mays
  unsure (1)..(251): unsure at all Xaa locations
  Clone ID: MRT4577_186833C.1.pep
MAHHLMTLAAIVAAVVLLLPCATGYPWAFCGENNNFKANSSYQSHLSLVAATLPKNASTSPDLFATAVVGTIPRQLWAMGLCRGDVDGTACFNCLTQAFRDLPNHCSYNKDATMYYDPCMLHYSNNQLIPDDDSGDFYTINSTAAVNSDPVRFNRLVAALVNATADYAAHKSTRRFATGXTTAGSASEFPKLYSLAQCTPDMKAARCRDCLAALISQSLDAFQNLTLGRVLWINCTYRYEAAPFFMDRWCR

SEQ ID NO: 279885 - protein, 24 aa, Zea mays
  Clone ID: MRT4577_186834C.1.pep
LSEVEKHIIIMYGGYYGYRDQRYI

SEQ ID NO: 279886 - protein, 40 aa, Zea mays
  Clone ID: MRT4577_186835C.1.pep
HPMTRFGDPWPPPSGTGYEGFWGSRSRPKRRLEKFSYINY

SEQ ID NO: 279887 - protein, 204 aa, Zea mays
  Clone ID: MRT4577_186836C.1.pep
ARNSARGDHGRELELIDDGKNEETPLSVLQVNAMRKLGSVEEVPVPLFPSKGLRLKQKIKDWLEGFQRLPYVSPYENFSHINPGSDVSEKRAVGVLHELLSLFVTCSAERRRLRCLRQHLGLPQKFHLVFERHPHVFYLLLKEKTCFVVLKEAYIAGEDTAIEAHPMLEVFKKYVELMEQSREIIRCRRSGKPIELESKACGDS

SEQ ID NO: 279888 - protein, 283 aa, Zea mays
  unsure (1)..(283): unsure at all Xaa locations
  Clone ID: MRT4577_186837C.1.pep
MGMALPLPPASQGLLRSRRMSFLASPPLSLKAAGGISIPCPWRLDGRRPRAAPASVPRLASVRSVVLDIEGTTSPISFVTDVLFPYARDNVRTHLDATYSTRETKDDIALLRAQVEQDLRXEXLPGXXPVPAPTAXGKGXGVVDALXVANVGGHGIAADRKTTSLKQLQGHIWRTGFECQEIKGVVFDDVPPALERWHASGIKTYIYSSGSREAQRLIFGNTTYGDLRRHLCGFFDATIGTKRDARSYYEIWQTVGVDRPSQILFLTDVCQEATAAQAASLEV

SEQ ID NO: 279889 - protein, 37 aa, Zea mays
  Clone ID: MRT4577_186838C.1.pep
ATKTCISQLLPSMNLDNILIRESMANVRNFDRQIYET

SEQ ID NO: 279890 - protein, 197 aa, Zea mays
  Clone ID: MRT4577_186839C.1.pep
SPCSLMLSCSSVRSSDVVVLWSPVPSSPAIFLPCRRCSSLVLASAQAASMAIEHTSCRGARPQHGAGRPDFISVLSRSDCAPCRLRLDVARRHSARPNPGHGSRRALSYFPILAIEAQSLAVTPSAASDSSCVMSTKCSTKNSNESSCHRLRRMEIVVLTHRCRRSPSSSTPTSREDALVLATRHQLDKMNPMGIWS

SEQ ID NO: 279891 - protein, 95 aa, Zea mays
  Clone ID: MRT4577_18683C.1.pep
HCSYSLRRLSCPPAVSPCNPRGLVRLAASAFVCHPPALISIRPSTVPGGPFPIRHAVPPHQRIGPSSLIPPSVHAPTVESVCPRCIDAPCTSSTA

SEQ ID NO: 279892 - protein, 186 aa, Zea mays
  unsure (1)..(186): unsure at all Xaa locations
  Clone ID: MRT4577_186840C.1.pep
NLAEQLQGHIWRTGFECQEIKGVVFDDVPPALERWHASGIKTYIYSSGSREAQRLIFGNTTYGDLRRHLCGFFDATIGXCTSSITPFRSLMIRMRHCDYGXNXLFGLARVCNGRTKRDARSYYEIWQTVGVDRPSQILFLTDVCQEATAAQAAGLEVLISIRPGNAPLPAETHGFGTVESFAEILT

SEQ ID NO: 279893 - protein, 81 aa, Zea mays
  Clone ID: MRT4577_186841C.1.pep
DRMYSINDHGKKWKTTYAAGKLKDYLHDKTCICIMLTKKSSVQVKKQETLKGTKMKKNIKGGIFPEKLNREGFKGNASERV

SEQ ID NO: 279894 - protein, 80 aa, Zea mays
  Clone ID: MRT4577_186842C.1.pep
YRTDACTTQYDLLGEQHMASSLVLVQNSTVCPPRPYAVDVCLTSSIGALTLWRRSSNGQTCLILMVYLTMNDLLFLQVNL

SEQ ID NO: 279895 - protein, 228 aa, Zea mays
  unsure (1)..(228): unsure at all Xaa locations
  Clone ID: MRT4577_186843C.1.pep
MADSGGVSANNAAAGNDDEEGNTAPFPETVQIGGSPEYRVERKLGKGGFGHVFVGRRLTGGNGRGAGAHEVAIKFEHNTSKGCNYGPPYEWHVYSALGGTHGVPKVHYKGRQGDYYVMIMDMLGPSLWDSWNSAGQTMSSEMVACIAAEAISILQSMHSKGYVHGDVKPENFLLGQPGTPQXKKLFLVDLGLATKWKDPATQQHVDYDXRXDAFRGTVRYASAHAHLG

SEQ ID NO: 279896 - protein, 45 aa, Zea mays
  Clone ID: MRT4577_186844C.1.pep
TGQDPPRSSKLNSDTLDRLPFFFFFFLFFLGGCLLINNKVLMIHK

SEQ ID NO: 279897 - protein, 327 aa, Zea mays
  Clone ID: MRT4577_186845C.1.pep
MELRELGGTGLRVSAVGFGASPLGNVFGDVPRDTARAAVRRALDLGINFFDTSPYYGGTISESVLGDCLRHAAVPRDRVVVATKCGRYKDEGFDFSANRVTRSIDESLARLGLDYVDILHAHDIEFTHLEQIVNETIPALQKIKENGKARFIGITGLPLSIYPYVLDRVAPGSVDVILSYCHYGINDTSLVDLLPYLKSKGVGVISASPLSMGLLTDNGPPEWHPAPEELKMPEFYLENEKSACKAAADHCRKKGKSITKLAMQYSLMNNEISTVLVGMNSLEQVEENVAAALELSTSGIDDELMREVEAILEPVKNLTWPSGIQQA

SEQ ID NO: 279898 - protein, 317 aa, Zea mays
  Clone ID: MRT4577_186846C.1.pep
MELRELGGTGLRVSAVGFGASPLGNVFGDVPRDTARAAVRRALDLGINFFDTSPYYGGTISESVLGDCLRHAAVPRDRVVVATKCGRYKDEGFDFSANRVTRSIDESLARLGLDYVDILHAHDIEFTHLEQIVNETIPALQKIKENGKARFIGITGLPLSIYPYVLDRVAPGSVDVILSYCHYGINDTSLVDLLPYLKSKGVGVISASPLSMGLLTDNGPPEWHPAPEELKSACKAAADHCRKKGKSITKLAMQYSLMNNEISTVLVGMNSLEQVEENVAAALELSTSGIDEELMREVEAILEPVKNLTWPSGIQQA

SEQ ID NO: 279899 - protein, 71 aa, Zea mays
  Clone ID: MRT4577_186847C.1.pep
AKNKFHIALAWKAPHPPILCTPPIGCKHTWSGLKNTRGGGYVGPSKATYLKRTISGVKERKSLQLLWGGKT

SEQ ID NO: 279900 - protein, 68 aa, Zea mays
  unsure (1)..(68): unsure at all Xaa locations
  Clone ID: MRT4577_186848C.1.pep
RGDKVPPAQFAKVAREYSDCPSGNKGGDVCWFPRAKMXGPLQEVAFNTKKGCVPPPFXYTHGFRCILS

SEQ ID NO: 279901 - protein, 65 aa, Zea mays
  Clone ID: MRT4577_186849C.1.pep
VLDRERRPFFFVLDKTTMYDKSTGSLDSYIILIPGLVTPQHSNSGVLGTLTRELLLMRYNLTRYE

SEQ ID NO: 279902 - protein, 80 aa, Zea mays
  Clone ID: MRT4577_18684C.1.pep
SNCTPATTILSFAFMFIAHLFWVTIMAFLSTIVHFWSSYFARVSWQSKFLLADMLMFFFVFGVLHLPRSKECIFYRGIFC

SEQ ID NO: 279903 - protein, 74 aa, Zea mays
  Clone ID: MRT4577_186850C.1.pep
PRPQACMPAPPEEAPGFAGFASSSASLAGHVVLLIFSAWCSHTLPARRLSTWCAPCALCTRRAGSRERVGARVG

SEQ ID NO: 279904 - protein, 62 aa, Zea mays
  Clone ID: MRT4577_186851C.1.pep
TQQQDMTFENAGRHQGKQRWPGAGQFHKRRKGNVPHGRTKTDRSIQPKINHQERSKGRELDI

SEQ ID NO: 279905 - protein, 75 aa, Zea mays
  Clone ID: MRT4577_186852C.1.pep
LNCLPYLQLCCSAQVALAGYDQWIDLRIENKRNEPIRVTGSLSWGKWYANGDKSHEVSAPNVVLQPGETARVSAC

SEQ ID NO: 279906 - protein, 77 aa, Zea mays
  unsure (1)..(77): unsure at all Xaa locations
  Clone ID: MRT4577_186853C.1.pep
LHLVLRLRGGMQIFVKTLTGKTITLXRSPDDTIDTVKAKIQDKEGIPPDQQRLIFAGNQLEDGRAVADYNIHKESTL

SEQ ID NO: 279907 - protein, 60 aa, Zea mays
  Clone ID: MRT4577_186854C.1.pep
NKSLYIIKNKPRGIHINRTGSPLTILSKNQHKLQNYIYIVILSGKEVGTASLLHQHGSSV

SEQ ID NO: 279908 - protein, 92 aa, Zea mays
  Clone ID: MRT4577_186855C.1.pep
QSPPEENLDHQQAKVRNARVEARVAPREGPVRYFRGPPPPPPGVWTFPVPYGAGESQWRAMKIWVQYLKGETERRAKQYKGKKKKKKRTQNK

SEQ ID NO: 279909 - protein, 88 aa, Zea mays
  unsure (1)..(88): unsure at all Xaa locations
  Clone ID: MRT4577_186856C.1.pep
IRDPVRKARVCLGTFYTPEQTERAXXATALKLRGXXVPPPNKNPPPPPRRRWRRLQRRAGAGAPWCTSRRRRRRRRRRAPCRWRPRRW

SEQ ID NO: 279910 - protein, 62 aa, Zea mays
  Clone ID: MRT4577_186857C.1.pep
KDMVSLSNSSLVTAMKLERQLSKGVGLQDDPRGCTISINCTMITVSSIGAHPAVEWVHSRPW

SEQ ID NO: 279911 - protein, 80 aa, Zea mays
  Clone ID: MRT4577_186858C.1.pep
TARARRRGFGCAGAVALFFFFFFFFFFFLVFFKIKGQCGTGVFIYLTRKRVFTSRLITHLFGPQPEWHPWDQIYRGLHKR

SEQ ID NO: 279912 - protein, 40 aa, Zea mays
  Clone ID: MRT4577_186859C.1.pep
SSRLLHLSYQGLVSLRRHYLIAQNASGRGRMWTLGPVAPK

SEQ ID NO: 279913 - protein, 97 aa, Zea mays
  unsure (1)..(97): unsure at all Xaa locations
  Clone ID: MRT4577_18685C.1.pep
RRKGQKQTRPTNSSTTLSDLSYHXCDALSCPFKSLYFPSTANICKXQPYFYLISTAPFYFPILEHFFTNTLNFLPIANAPTXNLILIYLTHFFTFFT

SEQ ID NO: 279914 - protein, 159 aa, Zea mays
  Clone ID: MRT4577_186860C.1.pep
VRLLKKYEEDCKNMAHYRMVSHVVFTRTQGMKQTSVLYQYSFAFLGKERQPTWYQLCRASGSYIVTPEHSLASNQRSLYLLFLGKTYLIQIAPLYRSYDGAHACYHDIIPDKVYISSISLNIRSYQSRLLSRCIDATTLYYERPPYSMNNTLCMQCCGF

SEQ ID NO: 279915 - protein, 307 aa, Zea mays
  Clone ID: MRT4577_186861C.1.pep
MPLSTTSMALTNLCSCPSSRAHQLQLLCFCLALSLHVPYHANSLSFSYSFFNPDDFRPEDDAQVVDGRIELLGDEFRGRARGRVWHKQPVQLWDGTTGEAASFTANFSFSIESVAGKGAASAGHGMTFFLAPYTPNLPQESYDGCLGLFDESQALNYSKFNASGDSRFVAVEFDIRKDIWDPSSQHIGIDINSMDSRGDYTVLPDGSLVDAGVISATVVYDNRTRSLRVTLMVGSVTYTSVATVDLRSLLPEKVAVGFSAATGDEYNANHTVLSFSFASTLATKNGTSMPVTVTSSTKKATLQLGAG

SEQ ID NO: 279916 - protein, 237 aa, Zea mays
  Clone ID: MRT4577_186862C.1.pep
DKATKVSRGCCFVICPSREEADKAVNACHLKQTRSGASSPLQVKYADGELERLEHKLFIGMLPKNVTDTELTDLFSKYGNVTDLQILRGSQQTNKAGCAFIKYQTKDQALAAIEALNGKHKIEGSSVPLVVKWADTEKERQARKAQKAQSQLSHIPNASPMQQHSSVFGALQMGYMPQYNGFGYQPPGTYGLMQYPLSPMQNQGPFQNMVQPLNQGNSIRGVNPEVSPSSVQRSFMA

SEQ ID NO: 279917 - protein, 423 aa, Zea mays
  unsure (1)..(423): unsure at all Xaa locations
  Clone ID: MRT4577_186863C.1.pep
MLVVLIAYVIVWGRLYLALSGLEAGIQGSANSTNNKALGTVLNQLSFIQLVFFTALPMIIENSLEQGFLPSILHSGTMQMNFSSVFYTFSMGTXSHYYGRTILHGGAKYRATGRGFVVQHKSFAENYRLYARSHFIKAIELGIILTVYAAHSVIAKNTLVYIIMNISSWFLVVSWIMAPFAFNPSGFDWLKTVYDFDDFMNWIWYPGGLFSKPEQSWEVWWYEEQDHLRTTGLWGKILEILLDLRYFFFQYGVVYQLKIANNSRSIAVYLLSWICVAVIFGLFVLMSYARDKYAAKQHLYYRVVQTAVITLVVLVLVLFLKFTEFQIIDIFTSLLAFIPTGWGLISIAQVIRPFIESTVVWDSIISVARLYEILLGVFIMAPVALLSWLPGFQEMQTRVLFNEGFSRGLQISRILTGKRTNTV

SEQ ID NO: 279918 - protein, 103 aa, Zea mays
  unsure (1)..(103): unsure at all Xaa locations
  Clone ID: MRT4577_186864C.1.pep
QDDXKTGTPPXAPEEEKKGRXDXXTAKPPGGPNXKPEAAAAAAPAPPXHARGPAPFFVNVSRPAGXAKQGSLGXIXRTIPALLSSSAAAVHSAGAAGEPRAGS

SEQ ID NO: 279919 - protein, 139 aa, Zea mays
  Clone ID: MRT4577_186865C.1.pep
IGQHLPKNYKKGQESPLFKNPLGPEKPLPQKTPFFSPAPGKNPLFLSPRPWGKKPFLSLAPKIAPLKKSPGTTGPGGFFFPNPPTPKGGDNPPPFFFFLKNSFNGPFGKNIPNCPPHRVPLQNPVGWGNLFFSGKRREV

SEQ ID NO: 279920 - protein, 88 aa, Zea mays
  Clone ID: MRT4577_186866C.1.pep
HVTLTPGAGVGVRVTSRVQRAARVVLDAELERQQRETVRVEHCGRDACAGPLRHQDRQSRCHCLDRPGAQVVVVVEWLECQCCHSMGR

SEQ ID NO: 279921 - protein, 65 aa, Zea mays
  Clone ID: MRT4577_186867C.1.pep
YNGTLKKRWAQLERALALIQTQSPTHHLKTTAADLDGPKTSQQPPPQAITRLRFQACMACVDMCV

SEQ ID NO: 279922 - protein, 76 aa, Zea mays
  Clone ID: MRT4577_186868C.1.pep
PVWYFYALKIFFLGYPSFLVFFWALTLFSLATGPFLGPSGGQAPWVFVSPFCVQITHLFWDHFWPRCFFTSRVRVR

SEQ ID NO: 279923 - protein, 176 aa, Zea mays
  Clone ID: MRT4577_186869C.1.pep
LAWILIRSHGFCCQFRGIVLATDVLISMDCAACHLRHAVLATGVPIFIGCAACHLRHAILATDVPISMGSIASNFVTTSSRALLSCRSFTNSKRLIGNTAKSQVAMNPINHCHSSHLGTLIHKIVHHESRPLKRCHELCNRPSKDREGLSRAPVQRGYDPAKISRLDREEDLPTMH

SEQ ID NO: 279924 - protein, 65 aa, Zea mays
  Clone ID: MRT4577_18686C.1.pep
LNPISLPKRGGYLKLWGAYNSWDSICIAYIHNLSSQALTISMPTGSSATKTSIIEIVTIISIYST

SEQ ID NO: 279925 - protein, 215 aa, Zea mays
  unsure (1)..(215): unsure at all Xaa locations
  Clone ID: MRT4577_186870C.1.pep
YADLGGVRPTRTRTRGVGTADRHLVVFNLQNPQTEFKRMQSPLKYQTRCLAAFPDQQGFLVGSIEGRVGVHHIDDAQQSKNFTFKCHREGNDIFSVNSLNFHPVHHTFATAGSDXAFNFWDKDSKQRLKAFSRCPLPIPCSTFNSDGSIFAYAVCYDWSRGAENHNPAAAKTSIYLHSPQETMMSSSGGVMPPSCLGSLVECKFQLTYAPIIGFL

SEQ ID NO: 279926 - protein, 70 aa, Zea mays
  Clone ID: MRT4577_186871C.1.pep
TLGTHIEKVTGYFLRVGHALATKPNNELELLRKNTALPLAETNMPSNRKNTMDLLPSSLLPVNAHTDPND

SEQ ID NO: 279927 - protein, 343 aa, Zea mays
  Clone ID: MRT4577_186872C.1.pep
MASLTGLTANPNPNKSFEILPNPGDSVSSLSFSPKSNLLVATSWDNQVRCWEIVGGNSQPKASISHDQPVLCSAWKDDGTTVFSGGCDKQVKMWPLLSGGQPQTVAMHDAPVKEVAWIPQMNLLVSGSWDKTLRYWDTRQSNPVHIQQLPERCYALTVNYPLMIVGTADRHLVVFNLQNPQTEFKRIQSPLKYQTRCLAAFPDQQGFLVGSIEGRVGVHHIDDAQQSKNFTFKCHREGNDIFSVNSLNFHPVHHTFATAGSDGAFNFWDKDSKQRLKAFSRCPLPIPCSTFNSDGSIFAYAVCYDWSRGAENHNPAAAKTSIYLHSPQETEVKGKPRIATGRK

SEQ ID NO: 279928 - protein, 99 aa, Zea mays
  unsure (1)..(99): unsure at all Xaa locations
  Clone ID: MRT4577_186873C.1.pep
TLSINNNNALVRYVFLQSPCSLFFTLTSGYARPAYVPRARVRYGVSRVVRTLGARNAANCWLPSVCVRSCSXLHVQCDGTCVAREMGCGCRVGWCSRQS

SEQ ID NO: 279929 - protein, 47 aa, Zea mays
  Clone ID: MRT4577_186874C.1.pep
RPPRNDPVSDRQQDVAQGGHDVRLALLHLRQPAFQRLHLPADPAPLL

SEQ ID NO: 279930 - protein, 110 aa, Zea mays
  Clone ID: MRT4577_186875C.1.pep
ERVTTRYSSRCATMSVHQVCSSACSLAKALEGKLFNPWPIIMGLAAEHAGVALEGPSANIGRLLCWHLNAPAGALASSSGPSAAVCSSSFNVNNSISHLAFVCQIGLLHQ

SEQ ID NO: 279931 - protein, 60 aa, Zea mays
  Clone ID: MRT4577_186876C.1.pep
GWRRARRRRMTPAPRRIITDASRCTSIKIDISKCLFYRLLIITDSNIVIKTNVIITIQKI

SEQ ID NO: 279932 - protein, 80 aa, Zea mays
  Clone ID: MRT4577_186877C.1.pep
GGRQRGTRVRERKPVYVPIKKKREFSPVENDNTKCYRNPGFWGDTCGPVITVAPEKLGPPLKEIPPEGPGVPPRVWGVGL

SEQ ID NO: 279933 - protein, 293 aa, Zea mays
  Clone ID: MRT4577_186878C.1.pep
MTEQLNREYDIGDEIGRGRFGVVRRCVSRATGDAFAVKSVDRSLLGDDLDRALAELEPKLARLAGGEGDGNPGVLQVRAVYEDDAWTHTVMDLCTGPDLLDWIRLRRGAPVPEPDAARVVAQLAEALAGCHRRGVVHRDVKPDNVLLDVDPAGEAPPRVRLADFGSAAWLGEGARGRAEGLVGTPHYVAPEVVAGGEYGEKVDVWSAGVVMYALLSGGALPFGGETAADVFAAVLRGSLRFPPALFAGVSPAAKDLMRRMMCRDVSRRFSAEQVLRHPWIQSGGGGRELVRPT

SEQ ID NO: 279934 - protein, 131 aa, Zea mays
  unsure (1)..(131): unsure at all Xaa locations
  Clone ID: MRT4577_186879C.1.pep
WPSVGPKKGVDLGSLGLSLDTLHSPGGRHSLSFVGRGAPPEEGGPXGPLPSQRQSRLPRLLAPWGSERGPPRGGAPPPAGGARPPPAPPRAAGTQPPPGASDHGDKPRRTQPPTTNQTTPQTRKKTFTHHP

SEQ ID NO: 279935 - protein, 84 aa, Zea mays
  Clone ID: MRT4577_18687C.1.pep
LSSLRRDKGGAGRGVGWNGPRSPHLSDHFCPVKMADELRSTSAGQKFHGQVEPLSRNSPSPPCTTLYSTMPILLTMCPRGHIMG

SEQ ID NO: 279936 - protein, 75 aa, Zea mays
  Clone ID: MRT4577_186880C.1.pep
NWGHICWKHVQVVEKERLKRRNCNCTWGRRNTSFCYSRVCMSSTQNCTSFFICFCFFGALCSALAPPPSIYVQWD

SEQ ID NO: 279937 - protein, 54 aa, Zea mays
  Clone ID: MRT4577_186881C.1.pep
DQPTHSTFFSRPNPRTGRSRRDLLRTQHHPASHIKRLNTHNPIEAPLPHCLLRT

SEQ ID NO: 279938 - protein, 90 aa, Zea mays
  unsure (1)..(90): unsure at all Xaa locations
  Clone ID: MRT4577_186882C.1.pep
MGDDSSHAVLLLLLDAHDALAGMRANDGTFSINNDCRVTEGHADPAVVGGTHVNPDDTRTGNVIVGNISSRVCRRTGCSFNXNRRSCHTP

SEQ ID NO: 279939 - protein, 205 aa, Zea mays
  unsure (1)..(205): unsure at all Xaa locations
  Clone ID: MRT4577_186883C.1.pep
LGTSRPAGKRTRTINVQLPVRPTTYSMVAKLDTPAPNSSSGSGRLNVKLRLSRNDRVFXAAPATYCMRDGGHVRSQTQRDTRERKGGHHISDAXRRGEXRGQRIGGEEEQNDELPLPSEEKGGASEGERVHRYXHLVTPSEXNAYQPAAPLSKGCFKGMDPTVERLKSALQRDKTDVYDHNPELVEPLKYGQSPMYMVFRCSECR

SEQ ID NO: 279940 - protein, 167 aa, Zea mays
  unsure (1)..(167): unsure at all Xaa locations
  Clone ID: MRT4577_186884C.1.pep
STATVHSNPIPPNGTSQVPRKIPTGRPGRVVGSVIPFENATAVDPYSQRRVVRNPVLPPATSNLSAYTYHRKSDNSDGELQQELEKDRMKYQPAQRFMDSKLVSHMSPDLRSSYYIPKAFPKADXADRAALHSNMIHGIAPFSGIAAAGGGGYNKVNGVQYGVSRIY

SEQ ID NO: 279941 - protein, 54 aa, Zea mays
  Clone ID: MRT4577_186885C.1.pep
GAEKDIQLNFRFYKLSNQVLQQHGPSVTLQDSQSNDPMQPEHHWCNFIAPHFNA

SEQ ID NO: 279942 - protein, 108 aa, Zea mays
  Clone ID: MRT4577_186886C.1.pep
SAAALFFFFFFFFFFFFFFFFFFFWINKLLGKKETRQKTGDQKRPPNKKRSPYQNQGHLKNKSAGENGLGGGHRSAALKPFFCTFPTGGEDLRGGTGTLGVNGFKIFF

SEQ ID NO: 279943 - protein, 78 aa, Zea mays
  Clone ID: MRT4577_186887C.1.pep
FYFQFETGFFNTFGRWKDQRTTGGFSFKKKKKKKKKKKKKKKKKKKKKKKKIKKKKKGDRDTKKQNYWPRFLQTCKTC

SEQ ID NO: 279944 - protein, 75 aa, Zea mays
  Clone ID: MRT4577_186888C.1.pep
HCSFLAYTNTLSDESDFCGSVPLYFSRLSCYSAHLIHWHFLDDSLQMTILGEIKKKKKKKKKKKKKIKKKKKFKK

SEQ ID NO: 279945 - protein, 178 aa, Zea mays
  unsure (1)..(178): unsure at all Xaa locations
  Clone ID: MRT4577_186889C.1.pep
MLTTGGAGLPKNGRACSLFSSSSSSSFLVKTLLRAQGRAWGPLRASGDSHRPIWVPGXTPPPGVGGSLPGDFGFDRWGLXSDPERLRXNVRAELXHWRGAMLXRGGIFIPGVLTKIGVLNTRLLDTGGEQXYFTGTTTLFIMELILIGWAEGRPXAXIIKAGSVNTDPIFPRNKLTGT

SEQ ID NO: 279946 - protein, 68 aa, Zea mays
  Clone ID: MRT4577_18688C.1.pep
LFRLLFFCRIWKCNFLFMHGHIHNPNNFIIELQLISNLKYGTTNDALMLASLLVCQSKLDKRHQLSYF

SEQ ID NO: 279947 - protein, 193 aa, Zea mays
  Clone ID: MRT4577_186890C.1.pep
MQFKTLLVAAGVASAAPKDTTPKNFEFQGLALRSASPIHFNYLQASQESFELKLKDQKASCYSSKDKPQEATFQLYGDELWLYSVGNPRQQAYVDFSGMGQGKFGYTTGAQPAPKNASRKGWKVDKDGMLTCDGASFVACPMGDNLEKTSWSVWVYNSINNPGGNKNCLPFSVKAVKVEKPIPCSYSAIQPKA

SEQ ID NO: 279948 - protein, 101 aa, Zea mays
  Clone ID: MRT4577_186891C.1.pep
HEAKPSLFRGLVCFGGWAYVGSGAANQDWKSELLLGLSSTMMACCDLSLRAACLFSFGSSKICHGKSESLATLQPCLAMITHGSFRCSSALRWWVCPSWSC

SEQ ID NO: 279949 - protein, 93 aa, Zea mays
  unsure (1)..(93): unsure at all Xaa locations
  Clone ID: MRT4577_186892C.1.pep
MARARTCSSHHLGDSGVGXTSLMTXYVNKEFSNQXQATIGAGFLTKXVQFEDRLFTLXIWDTAGQXRXQSLGVAFYXGADCRVLVYDVNSMRS

SEQ ID NO: 279950 - protein, 78 aa, Zea mays
  Clone ID: MRT4577_186893C.1.pep
QSLLVHLAALLRGEPVLGLLGVELQHRRALTIDVTMVAASHVAGRLTLVVRSRPHTARDKSATTPKVMQRIAPGVPRA

SEQ ID NO: 279951 - protein, 124 aa, Zea mays
  Clone ID: MRT4577_186894C.1.pep
DGNVFVAATAVVACTGAGALARGREVHRWVEQSGIQMDEKLATAVVDMYCKCGCVEEAWRVFEALPLAAKGLTTWNCMIGGFAVHGRGQDALKLFGRMEREGVAPDDVTLVNVLTACAHAGMLS

SEQ ID NO: 279952 - protein, 64 aa, Zea mays
  Clone ID: MRT4577_186895C.1.pep
NSGHPLSPPHKGSPLAPSRFPLVVGTKHSPGPLKAWGNLFLVPFQVSRVRKQFLGSNPFWGREF

SEQ ID NO: 279953 - protein, 113 aa, Zea mays
  unsure (1)..(113): unsure at all Xaa locations
  Clone ID: MRT4577_186896C.1.pep
MVLRRSYACTYDXLILRDKGASLHLPRKLATITXAANLSXTDYYSAXVFGKLXLKKRNVQDLILYGESGGVADPVAGARPAEGAAPAAAPAVRESKEEATDDSDDDMGFSLFD

SEQ ID NO: 279954 - protein, 209 aa, Zea mays
  unsure (1)..(209): unsure at all Xaa locations
  Clone ID: MRT4577_186897C.1.pep
QRIPNAISLSLSLSLSVSPSLSKDRVSTSPAFDTFMNDYILPXSSHMTLRPLRGXAYEYYLYMQYGYHKCDVDRLFIDSYGSSVIVGTIAASLPHKLXRKIGSVTYCIDVLLSXITXNSLHMTALMNARAXCGXLSLSLLFTAYETWITTXHNPILFDPRWXRYRFPLDVYHGDDLAAIVSGLXVHFLAESMRFLPEAPLDGAXACFLA

SEQ ID NO: 279955 - protein, 145 aa, Zea mays
  Clone ID: MRT4577_186898C.1.pep
VISFHRASLEKIMQLLILPQKGHDSVASLIIPCTSKQGLELGSTPNLSLQPHQRKLFRRSVEQNQALGGARFGVCRVHAQTWDRTSTPVLQCNNQGGGPRPRRLWAKERRIWRRKERPAGWPCVVACSYGETRATGRPGQNQLPK

SEQ ID NO: 279956 - protein, 92 aa, Zea mays
  Clone ID: MRT4577_186899C.1.pep
RFVSSTKFGFVCKRIDIAILQDRVRDSYVNKLAYTTHNHSLHNAFTTYNENHASNTNLDHNTHKNLGYLSDTYSTLYTILNTIEFINCIITY

SEQ ID NO: 279957 - protein, 47 aa, Zea mays
  Clone ID: MRT4577_18689C.1.pep
TKLNTIGLYLVRDYSLSSIKMCGALKLFKTNGTYPGVRNLQLQDKSE

SEQ ID NO: 279958 - protein, 122 aa, Zea mays
  Clone ID: MRT4577_1868C.1.pep
PHFSISEKQDPALAAILEKNKSASRGEIVVPAGGFSKLKLLRIFVPLLPSLTFSKNATPHLERIELRFKKLEGFHGVDELGKLQDVVLTVDGHASERTNSILDGLKQRLEGKCNLIVNKYHD

SEQ ID NO: 279959 - protein, 147 aa, Zea mays
  Clone ID: MRT4577_186900C.1.pep
QIVYELSSANPPKMLRLIDSVLNNVKLTEEELVAMDHRPKTEHTNSRPASVSAKLKSRRQRPKGSPKEKQSARKSAKDLTNFVEICCRISTTTEDKYDNVQLVCSKEIKDAENNTSSFQILSKSEPFLLVSANEEYYRKSAFTLDED

SEQ ID NO: 279960 - protein, 64 aa, Zea mays
  Clone ID: MRT4577_186901C.1.pep
AIKAPLARTSHMEFKRWPLHRCVATRQGSTKKTGCMQGIPVASCRKEPTNGYTTAKGLKNWCPC

SEQ ID NO: 279961 - protein, 55 aa, Zea mays
  Clone ID: MRT4577_186902C.1.pep
KKKKKKKPKKKKKKKKKKKKKKKKKKKKKKKFKGNQVYITVACIFNKFLFRVFFF

SEQ ID NO: 279962 - protein, 691 aa, Zea mays
  Clone ID: MRT4577_186903C.1.pep
MTCRLSPQPPCLHCLSTPFSSLSPPKTSIARAHERPRRGLQLVCPCERAVFLSRTVAPVRGLRRWGGGGGFVGPEIPGQGEMKYVLVTGGVVSGLGKGVTASSIGVVLKACGLRITSIKIDPYLNTDAGTMSPFEHGEVFVLDDGGEVDLDLGNYERFLDIKLTRDNNITTGKIYQSVIDKERKGEYLGKTVQVVPHITNAIQEWIERVAKIPVDGKEGPADVCVIELGGTIGDIESMPFIEALGQFSYRVGPGNFCLVHVSLVPVLNVVGEQKTKPTQHSVRGLRGLGLTPNILACRSTKELEENVKEKLSQFCHVPAANIITLYDVSNIWRIPLLLHEQKAHEAILKVLNLERMDSIAREPKLDEWIARATIFDTLHDTVRIAMVGKYTGLSDSYLSVLKALLHASVDCHRKLVVDWVASTDLEDSTAIEAPDSYKTAWNLLKGAGGILVPGGFGDRGVQGKILAAKYAREKNVPYLGICLGMQIAVVEYARHVMNLTDANSTEFDPNTKTPCVIFMPEGSKTHMGATMRLGSRRTFFKIADCKSSKLYGNVTYVDERHRHRYEVNPDMVPEFEKAGLQFVGKDDTGRRMEIIEIHNHRYFVGAQFHPEFKSRPSKPSPLFVGLIAAASGQLDRVLQDRCNGHVGSEKHVLSNGSYTPAIHQNGHPKKLPNGLSNGTYYGNGNGNGVHA

SEQ ID NO: 279963 - protein, 84 aa, Zea mays
  Clone ID: MRT4577_186904C.1.pep
GWAPKEGFFLGHPPLSPTQSGPVAYPGFGFGIRTPPVFVLSPLVPREPSSFIIPMDPPPTELWMGLGPNADKALLGSRGSFLFP

SEQ ID NO: 279964 - protein, 143 aa, Zea mays
  Clone ID: MRT4577_186905C.1.pep
KKKKKKKKKKKKKKKKKKKKKKKKKKNKKKKKKKKKKKKKKKGWGPFLKGSGFFFRGFPNLFFFFWGTLIFLLGRFFKTWGGDNPWVPLLNLFGNSFFFCGGVFFLRGLAVSLFPQFWTFFLELGPPFWGVFYPRGGFFFPPG

SEQ ID NO: 279965 - protein, 70 aa, Zea mays
  Clone ID: MRT4577_186906C.1.pep
QEKRSYTDSTSIQTMACHLRSASVPSSPRSNKANIDEQLQSLKATISSPSVAIQTMVDGLNKIVSIYSCI

SEQ ID NO: 279966 - protein, 86 aa, Zea mays
  Clone ID: MRT4577_186907C.1.pep
ASCQTKTLYMSLLLTIVLFRNSRRALIATAIRVMNRQLGRAFTPRLLQARVMMVCIWDRKKRTRSSMRTPSASYTQARASRSAHAS

SEQ ID NO: 279967 - protein, 51 aa, Zea mays
  unsure (1)..(51): unsure at all Xaa locations
  Clone ID: MRT4577_186908C.1.pep
SRGSGERTMLGIGHGRAVPAVPSSCTDIQIAVGRSRARKSRTCGSXRSSRK

SEQ ID NO: 279968 - protein, 96 aa, Zea mays
  Clone ID: MRT4577_186909C.1.pep
MAGAAASPAAGHVVERFRSRLREEAGGGEPGAAAVVHVYAEALRELTFNCKPVITELTIIAGQHATLAAGGIADAICARVAEVVLLLLLSYQGCYS

SEQ ID NO: 279969 - protein, 108 aa, Zea mays
  Clone ID: MRT4577_18690C.1.pep
PIHASSTVTQTPVLNQTLNEHCYTKTRHPLEFSNITLNSTHYINRSRRGDTKSCRTNAALHASPWFFHSIELKWLPSRLPWDSPSSATKDTGALLSNHENPTSCITDI

SEQ ID NO: 279970 - protein, 57 aa, Zea mays
  Clone ID: MRT4577_186910C.1.pep
GHWGISPSAIVVQGFRGPFGPFSLQYGHSRWIIHTSLSTLMLPLELAATTMFDCPLQ

SEQ ID NO: 279971 - protein, 363 aa, Zea mays
  unsure (1)..(363): unsure at all Xaa locations
  Clone ID: MRT4577_186911C.1.pep
MWRRCCCNCQVDESDAXENGHVKATINNIDGAIMGLKDSTTGKVEPQDAAPRIDIPVLSLDELIEKTDDFGSTALIGEGSYGRVYYAILDNGTKMAVKKLDSTENEPTAEFLTQVSLVSRLKHENFVDMLGYCMERNLRIVAYEFATMGSLHDVLHGRKGVQGAQPGLALDWMQRVQIAVDAAKGLEYLHEKVQPSIVHRDIRSSNILLFEDFKAKIADFNLSNQAPDMAARLHSTRVLGTFGYHAPEYAMTGQLTQKSDVYSFGVVLLELLTGRKPVDHTMPRGQQSLVTWATPRLTEDKVKQCVDPRLMGEYPAKGLAKLAAVAALCVQYEAEFRPNMSIVVKALSPLLVTKQTPPPVVDS

SEQ ID NO: 279972 - protein, 88 aa, Zea mays
  Clone ID: MRT4577_186912C.1.pep
CRIDCLDNNLDCTNKLPFFRSTIHSLSTVVLVCYMYKTILIYILAVVVKCMWEVSHSTYWVSAARGVKISSRSSHIQIVQTSTRLLIC

SEQ ID NO: 279973 - protein, 92 aa, Zea mays
  unsure (1)..(92): unsure at all Xaa locations
  Clone ID: MRT4577_186913C.1.pep
MAASMISSSALAVAXQGLPPLXRRASSFAVVXXQKNIKNDKPHGIGGGLTDDLDANGRKDKAQDVHHLPHQYGENVPRHXPIYTEDDWTPTR

SEQ ID NO: 279974 - protein, 86 aa, Zea mays
  Clone ID: MRT4577_186914C.1.pep
LGAILPRPLFPSLRVCSCSSSCSFAWISSSWACSLLLGLLHLLLLSPYVIYGLLPMNQTRSYSLCCLHRLLQIITLFASSRSLTDS

SEQ ID NO: 279975 - protein, 84 aa, Zea mays
  Clone ID: MRT4577_186915C.1.pep
PPRSRTPPIPTAEQPTDAGAPAPAATCYVAYADVPPNLDRPVHRATTLPTTTRSDEIGQANARCRRGRPLASSLSAVHPYKPLE

SEQ ID NO: 279976 - protein, 135 aa, Zea mays
  unsure (1)..(135): unsure at all Xaa locations
  Clone ID: MRT4577_186917C.1.pep
GPRPTHTSFKNTPTYSLYFQPNNNAYQRAYFLLSLPPLLQITTNSFIIPQTSLTPTSIIPQFLPPITLMLFXHTSKQAYMLQLALASTFLQQPITQFQQQYXAHLNLQTIATQHQQQFIPLLNHLSYFNPFFYFQ

SEQ ID NO: 279977 - protein, 78 aa, Zea mays
  Clone ID: MRT4577_186919C.1.pep
IRFERRIATILFFADRTNRRGMTTLITGMVTFTQTRGKKKNTDLTKMSPNHLLKKRNDTWLTLGRIQDYLHEMFPERK

SEQ ID NO: 279978 - protein, 189 aa, Zea mays
  Clone ID: MRT4577_18691C.1.pep
SPSPSSSLHAASALTLVELARGTVPSLVFRSGSSSVSASPALSLGSSKVQNLIERCLQLYMNQKEVVDTLSFQAKIEPSFTELVWQKLEEENRDFFKAYYVRLMLMNQITAFNKLLEQQYEIMTKDHPSGMPSVPPAAPNGSNSNTLNQNMPFLPDTIPSTALQDNSLRNGGSSSIVNGAPSDDQFMYT

SEQ ID NO: 279979 - protein, 148 aa, Zea mays
  unsure (1)..(148): unsure at all Xaa locations
  Clone ID: MRT4577_186920C.1.pep
PSDSCKPLASPAVAGATSRQETQRARSQEGHPDHSAQVFPELXAQPAAPLKAPAVCGPSSLLQKGVXLSEEQAPGGHGELCGRRDDRRERAQRRTWRGDQPGAAGLREGKCEQLPPEXRYXYRDQDGVHRIXNRADNIETPEKVKHAE

SEQ ID NO: 279980 - protein, 55 aa, Zea mays
  unsure (1)..(55): unsure at all Xaa locations
  Clone ID: MRT4577_186921C.1.pep
VVLNFEAKVADFGLAKLTTDTRXHVSTRVMGSFGWVAPELTSSGRVTEESWVFSF

SEQ ID NO: 279981 - protein, 222 aa, Zea mays
  Clone ID: MRT4577_186922C.1.pep
MRQERMVRQQQAPMPPPPPVPPRDKHRNFMSHKLPSFASSPDPLHADDWLKSVEKMLNIAQCFDQEKGNMLVSEYRDKFIQLSRYAPYEVADDERKQEHFMEGLNGPLQYSLVAHTFPSFQRLLDKALAIEYKRVQLGEMKRKAITQGHGNSSIRPRFCPRNQRKDNWKRLGSNNQDSAQSGASDCPVVHRTVSSGAPDSVRCARLALVKKAALGISSAAYD

SEQ ID NO: 279982 - protein, 124 aa, Zea mays
  Clone ID: MRT4577_186923C.1.pep
FQGRRVRCEHPQLWQRLSLWHSVGSDGLVSFMLPATHDNRCRSSEDPRHGDFRLTVIQFSLNNVWVRSKLARVSRVCLVRLLERRLKARLRFEIVDALLELHHFWFACHVWWTQRYGSWPRTAV

SEQ ID NO: 279983 - protein, 132 aa, Zea mays
  unsure (1)..(132): unsure at all Xaa locations
  Clone ID: MRT4577_186924C.1.pep
LNADEKALQVEDQHKRQKHTXLKNITMCTHHLFAXTKLXLKTPHLTATLKATEHMXGEEXSSIKNTHNDLSLALHDMYNEHAILNSLNHTIVMKLSRRNIALHEAHTELEHGLLDLSCGRHIXYKRMRQLDL

SEQ ID NO: 279984 - protein, 62 aa, Zea mays
  Clone ID: MRT4577_186925C.1.pep
LHRLYHVHNQLNMQHDHKPAPVTRAPKLIVNVLAKPLEPLIDISGKEKVQNLPYESIISLNT

SEQ ID NO: 279985 - protein, 196 aa, Zea mays
  unsure (1)..(196): unsure at all Xaa locations
  Clone ID: MRT4577_186926C.1.pep
GGGGVFFFFFFFFFFFFFFFFFLGLSLRRLTRHLCCGGVHLSALHLHLIFGGGGGRNSNPTHNTINHPAPNRTEPGNQRPRRRPKRRGPTPTGRKGPXGPPPPHRPRTQAGPPHAPPPGEPQHPPPQPGADGPPPPRRRRPSGAPPAEAPPGPAPARPXPGKPLPGGTPAXPCPPXAHIHDGRPAPGPRRPPGEEA

SEQ ID NO: 279986 - protein, 92 aa, Zea mays
  unsure (1)..(92): unsure at all Xaa locations
  Clone ID: MRT4577_186927C.1.pep
PRRSALVCDLPRGRHYANAWHRTIVRHPCLSLCSVVALKFLPLYSAHMSRQRSLPPISSPCAAVPPSPSPIPAVSWGVIFQAYSPCISIFFX

SEQ ID NO: 279987 - protein, 93 aa, Zea mays
  Clone ID: MRT4577_186928C.1.pep
NILCQVGARQFWGVGWPNRLGNPGGSSLGGGWYWWRGGNNYYTLGIRPFWGGLIGMDWWGKNWKGGPHGMDLRPLLYPGFWGMRFVVIGTGRL

SEQ ID NO: 279988 - protein, 43 aa, Zea mays
  Clone ID: MRT4577_186929C.1.pep
GFCLKCFLGKTNNFPFFRCTDVVSFLPVASLSTPVNGAGPALC

SEQ ID NO: 279989 - protein, 175 aa, Zea mays
  Clone ID: MRT4577_18692C.1.pep
MPGGEDVRKVSRQDIQLVQNLIERCLQLYMNQKEVVDTLSFQAKIEPSFTELVWQKLEEENRDFFKAYYVRLMLMNQITAFNKLLEQQYEIMTKDHPSGMPSVPPAAPNGSNSNTLNQNMPFLPDTIPSTALQDNSLRNGGSSSIVNGAPSDDHLCILVKLFMAFLVAWMLHQAC

SEQ ID NO: 279990 - protein, 118 aa, Zea mays
  Clone ID: MRT4577_186930C.1.pep
DLDGTVLVARQPAGHREEGREPLGQRAPHPRPEEEAVRPRPAGRCRRRPRGGRSRRWACAPAAPAGRAQSSRAGGAVSPPRGTPSETPALLFLSGATKEEAGGIWPDRRSNVAVAHDA

SEQ ID NO: 279991 - protein, 68 aa, Zea mays
  Clone ID: MRT4577_186931C.1.pep
EAPTGAIMYVFPQPPLKTKKTYILHIPFYKKTIHPWKFVHPYRNGGGAGVSYHTSLSTFSSLNFYPLP

SEQ ID NO: 279992 - protein, 99 aa, Zea mays
  Clone ID: MRT4577_186932C.1.pep
HNSILFLRFTLQRQRPRTKPLCVTYYTMKRNRAKSTPYRKVLQQITNTSDDGRCQRTTSWMSLVRRGGRHSRGETARSTVTARTGPCASGTDGLEPRSW

SEQ ID NO: 279993 - protein, 42 aa, Zea mays
  Clone ID: MRT4577_186933C.1.pep
YICSCFMVSALGVINNCIMKYLHFTVMPQYHQLIVLIVFDLS

SEQ ID NO: 279994 - protein, 82 aa, Zea mays
  Clone ID: MRT4577_186934C.1.pep
QVFSSQHACPSLEDNYVIPIPAGHGDSFRTLDEANIPQLHQEQKNFISQDAIVGENIPLNESLEKSKHKDEDLLFPDKDLPE

SEQ ID NO: 279995 - protein, 61 aa, Zea mays
  Clone ID: MRT4577_186935C.1.pep
MFFEKNWAHSTINSNQDVYNRLSSEQHFCNKLKGVNWDSPPNLARGADADAQSRKLNSKFW

SEQ ID NO: 279996 - protein, 120 aa, Zea mays
  unsure (1)..(120): unsure at all Xaa locations
  Clone ID: MRT4577_186936C.1.pep
VFMNDNYHTEATVTRXGPCVFDTVHQVIQFQLTVNVDALIINLVLAITSGKTPVTTVQLMGVNLIMDTMMALALSRDTTTKALLPHAPIDRTVPLHLNALSCILAEYAAIQDTDACGAAL

SEQ ID NO: 279997 - protein, 170 aa, Zea mays
  Clone ID: MRT4577_186937C.1.pep
MTNLLQQHLARTKQRMKSQADKCRSERVFQVGDMVFLKLQSYVQTTVAPRHKLSFCYFGPYHILARVGSVAYKLELPTSLAVHPTFHVCQLKKAIPPATQETTDLPDPDDHLQVPIEILQKCVILCGVRAVSQGLIKWSSLLSSLATWEDLEPLCQRFPSASAWGHAGAK

SEQ ID NO: 279998 - protein, 103 aa, Zea mays
  Clone ID: MRT4577_186938C.1.pep
GKTFLPLHLQFTISNNNTHTFTIYIQLFFYTITNKNINFITQIHIPLPFPHTTLITFNTLTLILILSTSKTPPLQFIPPIIINHFHPQKKNKFPSQQKTQLSF

SEQ ID NO: 279999 - protein, 64 aa, Zea mays
  Clone ID: MRT4577_186939C.1.pep
GRKSQQTPHLIMTKQIILVTPHITCASSGASGQRQIETDGERRFPPYHESVVGRNDKEEATACA

SEQ ID NO: 280000 - protein, 34 aa, Zea mays
  Clone ID: MRT4577_18693C.1.pep
MSGNIGKIPIIGDLTGSIKNAHLKGNVELVRTTV

SEQ ID NO: 280001 - protein, 114 aa, Zea mays
  Clone ID: MRT4577_186940C.1.pep
MSTMKFCRECNNILYPKEDRDRRTLFFACRNCEHQEVSDNNCVYRNEVHHTAGERTQVLQDVASDPTLPRTKTVRCNLCGHGEAVFFQAAARGEEGMTLFFVCCSPDCGHRWRE

SEQ ID NO: 280002 - protein, 107 aa, Zea mays
  unsure (1)..(107): unsure at all Xaa locations
  Clone ID: MRT4577_186941C.1.pep
MSTMKFCRECNNILYPKEDRDRHTLFFACRNCEHQEVSDNNCVYRNEVHHTAXERTQVLQDVASDPTLPRTKTVRCNLCXHGEGCFFQAAARGXEEGMTLXXVCCSP

SEQ ID NO: 280003 - protein, 242 aa, Zea mays
  unsure (1)..(242): unsure at all Xaa locations
  Clone ID: MRT4577_186942C.1.pep
VIGMLCPQSLYMSGNQLTASDEXGWEFLDHLTNCGSLQVLALDNNKLGGXLPGSIARLPREIQALNIGENSISGSIPPASDDLIGLTTLGLESNLLNGTIPTGIGNMKNLTKLALQGNRLTGPIPSSIGDLAQLVXADLSSNALSGFIPDTVAXDVSSLTSLAQLALSENKFSGQMPEELXSAXSLEFLDLYFNSFHGSIPPSLSKLKGLRRLGLASNGLSGRPPPRTTSSSRRQRCPLGYG

SEQ ID NO: 280004 - protein, 67 aa, Zea mays
  unsure (1)..(67): unsure at all Xaa locations
  Clone ID: MRT4577_186943C.1.pep
AAYLQQRQQLLNPLPVANGXVDAFLQQQQLLPYNQFSXMNPALLRQQPIVGGAIFDITYEMYSMMAP

SEQ ID NO: 280005 - protein, 208 aa, Zea mays
  Clone ID: MRT4577_186944C.1.pep
PQPHRAKSTIQSNPRRAPSSKPYRCRRRRPRRLRPSPWPRLPGLRPSPSPPRWPRRHARLARGPPTRPRTPTPTSRARRLPRSRRRPSPSSSPRRPRAPDPPPRGRSPPRPRRRRSGSGRFLVAKKGARRRRNVATVGGGGGEIDFDKCREAAREALRASQGDFFRKELAASTATGEEQLGQEAEEVKQVAEEGVEGGSTRSGQRRGP

SEQ ID NO: 280006 - protein, 76 aa, Zea mays
  Clone ID: MRT4577_186945C.1.pep
SFYFTSSYTTGDVQPHHLNHEGYFKSSSSLDKLDMPFKILVDMHALFSSHRMQQCVNYVVAYLSYLSILDVFLIII

SEQ ID NO: 280007 - protein, 150 aa, Zea mays
  unsure (1)..(150): unsure at all Xaa locations
  Clone ID: MRT4577_186946C.1.pep
LMWGKPQAPGSVXDEAGRQGHVAHGGMLPRAVISQQQSGDQPQPPGTEGQQQAPSGSYYFNIPAPPGAERTLYPSMDPQRMGALVKSQEGDGKPGPQQAAQAQASSSSGQSYPMPPPYYHGQYPPYYPPYGGYMPPPSMPYPPPPQDPPY

SEQ ID NO: 280008 - protein, 69 aa, Zea mays
  Clone ID: MRT4577_186947C.1.pep
MEGGYSSGASLGACSGCAVAASAKWRSDSSRSFQYYLHRYTPNATGRWLGTLDTAAIYSLTFYMAQGIL

SEQ ID NO: 280009 - protein, 159 aa, Zea mays
  unsure (1)..(159): unsure at all Xaa locations
  Clone ID: MRT4577_186948C.1.pep
MAGGGVDVGVEGDEKLGRKTLQCEHEVLYFDVHDNACGRYCXSHEKTSATCSTIIASVXAGASCLLDLFDYYIRTDDRDGFRKEVRVHTXAIYFDIGENHMSRFXLRASEVSCXRNRQIPYIVPAGSSDDKGWEAFTSVLLDIYNDATXMRVLPNHPRP

SEQ ID NO: 280010 - protein, 332 aa, Zea mays
  Clone ID: MRT4577_186949C.1.pep
MIPRTSSVSSSAAAAPTAGAPPAWPSGSDAAAFQASGSSGHQQVVISNGVLLAAVIFLFMVVVFVFLLYLYAKRYLGAGNPLAAPPSSRFLFVAASPLPQRGLPASALRSLPVAVYGGGGGGPGTKSSKEALECAVCLSEVADGEKVRTLPKCGHAFHVECIDMWFHSHDTCPLCRAPVGGDLDALPREEPFGASLEFPTNVLFWGTHDEVANAGLATPPPPPPPVASAVSASSSASGRRKENLVIDIPTRPVALTTTPPFNSPLPTSRVAGSADETRSPVSARLRSLRRLLSRGKQAVVGTSYSPRGAGDVEQGLAGAEAARPPKTPPASD

SEQ ID NO: 280011 - protein, 100 aa, Zea mays
  Clone ID: MRT4577_18694C.1.pep
CSGMVSGLVSYALPSTVCTVHRVRYAWSSSRPCPWFGPGHATRSSSSMFAETSAGQDQLRADGGRGVGEVGVRVRRRRLALAAVEVDRARVRPAHAEADA

SEQ ID NO: 280012 - protein, 145 aa, Zea mays
  Clone ID: MRT4577_186950C.1.pep
LQLASYSAIIQIRPVRAMALRVLARKLRFPATSVLQRASTPVVSPPASSRLLTSHSSQSGGAKRAVNETRNARPRWRNYKKLEKRFLRDMEKDMKNFKELSLAMDNLPRNVVLTSSVGLAVLTTGWAYAIGVFDWNRMGDNEPSA

SEQ ID NO: 280013 - protein, 331 aa, Zea mays
  Clone ID: MRT4577_186951C.1.pep
MIPRTSSVSAAAAPSPPAWQSASSSDGMFPGPGSSGQQQLAISNGVLLAAVIFLFMVVVFVFLLYLYAKRYLGANPLLAPSSPSSRFLFVAASPLPQRGLPASVLQSLPVTVYGSPGGKDKDALECAVCLSEVGDGEKVRTLPKCSHGFHVECIDMWFHSHDTCPLCRAPVGDLDALPREEPSGAPLELPVFPTNVLFWGTHDEVTNAGLVAPPRAAPSASSSASGRRKENLVIDIPTRAVATTTTTPPPANSPLPASRMPGSADEMRSPVSARLRSLRRLLSRGKQAMVGTSSSYSPRDIEQGLAGGEAAAAATARPPKTPKTPPSAHAH

SEQ ID NO: 280014 - protein, 199 aa, Zea mays
  Clone ID: MRT4577_186952C.1.pep
MGKAKSKGPKFAAVKKIITKKTINKYKEDVLNHKKKDVDKEKLGRNVPQVSSALFFSYNTALGPPYRVIVDTNFINFSIQNKLDLEKGMMDCLYAKCTPCITDCVMAELEKLGQKYRVALRIAKDPRFQRLACTHKGTYADDCIVERVTQHKCYIVATCDRDLKRRIRKVPGVPIMYITRHRYSIERLPEATIGGAPRI

SEQ ID NO: 280015 - protein, 91 aa, Zea mays
  Clone ID: MRT4577_186953C.1.pep
RGQQWLLIHPKLSRLINNNAVLLHPMGARGRRGHRATRANQWARLTPPPHAALTTHAKEAFSTIQLNLAEVEALVQLQRWKHAAAFVKRGA

SEQ ID NO: 280016 - protein, 254 aa, Zea mays
  unsure (1)..(254): unsure at all Xaa locations
  Clone ID: MRT4577_186954C.1.pep
MSAAPARIIFSFFSSMEPLRLAASAPVAAGNSRQQGRHRGDSVRPSAVSNDFGLQEGLTHVQKLLHRRRQKGDDREMMVTIDSLKRLCVDHYFEEEIESGTSACMGLIHSDDLFDATLAFRLLREAGHGVSANDVLGRFTDDSGEFKLPPSNDEDTIRGLLSLHDMSHLDMGGEALLCKAKEFSSKNLASAIGHLEPSLAEYVKQSLDHPYHLSLMRYKARHHLTYLQSLPIRDRDTAVEKLAAAEFQLNXLLH

SEQ ID NO: 280017 - protein, 51 aa, Zea mays
  Clone ID: MRT4577_186955C.1.pep
HSCCYCQATSFYGASFFSLRYVYPLFGEILVPSTLGCCIFASRCFSVKQTK

SEQ ID NO: 280018 - protein, 159 aa, Zea mays
  Clone ID: MRT4577_186956C.1.pep
MATAHHADDHRAGRRSEAVGENYMRGLYGDDDYNATHYGHQQQQRPPPAPMAVAKALATATAAFSMLLLSGLAVTGTVLALIVATPLMVIFSPVLVPAAITVALLTVGIVSSGGFGVAAVAVLAWVYRYLQTTTSSSGQQPHIVKDWAQQHRLEQTRAH

SEQ ID NO: 280019 - protein, 80 aa, Zea mays
  Clone ID: MRT4577_186957C.1.pep
FFFFFFLLAMKEQVVHIPSTSARTRIFTSGVGTTSLSPSHTPLDNCTTHGAVQCSAMQCNRNHHHTGRQKIIIEGTRRQG

SEQ ID NO: 280020 - protein, 58 aa, Zea mays
  Clone ID: MRT4577_186958C.1.pep
TYFIYTMPMGFIPNTLGQCISLLRILYTDTALSIFTSLTGYDQPGSFVVHERWRTIFR

SEQ ID NO: 280021 - protein, 259 aa, Zea mays
  unsure (1)..(259): unsure at all Xaa locations
  Clone ID: MRT4577_186959C.1.pep
FSTLRGRGGEPHASALYTAEGNPVGSRSSPTRKITSDSLNKKKLQEGIESKCYLQPHSDRRRRRRRRHTSPSAPRPQRGGVRRRCARCGTTXSIPKREPFSSSRSILHEFLRQDKPLIQRTKDQITDYCTAIEGDECCSCWDAYFELNKLEQELPKDEIARMVKDSEGDVRYLIESIHHRSDLRKKVAEKSRNSVPSSSQGSRAAKPRPFPVPDGIPKTQEELAEEEEALMPESPYTRLLRRMGRYPDWYTPRPDHETD

SEQ ID NO: 280022 - protein, 129 aa, Zea mays
  Clone ID: MRT4577_18695C.1.pep
FLFFFFNQKKSPCFDCALHCHSCSLLLKKASELNTLVPRFTVMCHILHLLNDDKPYGENRTPTCLDYATPLAGNIILTVLITKRQTIKRTSIQGLFLISILKNLNIENSRPGPGRLPPFPINNCIKPIE

SEQ ID NO: 280023 - protein, 139 aa, Zea mays
  Clone ID: MRT4577_186960C.1.pep
MLSSTTLRPPASPAPAHLTICSSPAAWRRAPTAAAVRAVRNYDSIPKREPFSSSRSIHHRSDLRKKVAEKSRNSVPSSSQGSRAAKPRPFPVPDGIPKTQEELAEEEEALMPESPYTRLLRRMGRYPDWYTPRPDHEAD

SEQ ID NO: 280024 - protein, 134 aa, Zea mays
  Clone ID: MRT4577_186961C.1.pep
TKKITRRNREQMLSSTTLRPPASPAPAHLTICSSPAAWRRAPAVRAVRNYDSIPKREPFSSSRSILHEFLRQDKPLIQRTKDQITGTLLGGPTALASLLRDLFCFFLIVLVCVSCGVLATVWCSLDLFIVLSPS

SEQ ID NO: 280025 - protein, 71 aa, Zea mays
  unsure (1)..(71): unsure at all Xaa locations
  Clone ID: MRT4577_186962C.1.pep
IFPXLFPPNPPAGSSWEEPRGKIGALKTIQKRAILRLPPSGGSTLTTPRKFYRAYGNTREGYRDKQKKAGP

SEQ ID NO: 280026 - protein, 132 aa, Zea mays
  Clone ID: MRT4577_186963C.1.pep
LPAPVNFVCLHAVKPHLRPLAMAVSTVSIHIFGDVPSSPLVGLLQDKINNWRETTLILTSILFAAVVFWFIGVSEAAQDALDHLFNQGHNLVTENEISDTFTRLVERLPQVVLGSEETTALSHARMLLALTF

SEQ ID NO: 280027 - protein, 66 aa, Zea mays
  Clone ID: MRT4577_186964C.1.pep
PTHTNTYHLGLPLLLSLPRLVTYLMRSLLFMQFPSTTLPIFTSFSFTTYATTASIQLHFSQTILTP

SEQ ID NO: 280028 - protein, 29 aa, Zea mays
  Clone ID: MRT4577_186965C.1.pep
FMRTLMQCDLTGCQTLSHVPDRRLGYLLF

SEQ ID NO: 280029 - protein, 74 aa, Zea mays
  Clone ID: MRT4577_186966C.1.pep
RSYLNYSAGGTLNQTAVHTKCSQSQLTRQLTGQLARDPELRAYLNPFATSTRCQRNTLIKASRRLKTAERRGTT

SEQ ID NO: 280030 - protein, 101 aa, Zea mays
  Clone ID: MRT4577_186967C.1.pep
ARTKNLFKDGRAYTSAKLKNLILTNWGTVWLGVNWVKFCLRVVAPIEKLTFSKKVWQSLTSLGANQKNPGSVWVFYKTPLGAAPSGNNNKPCAPRAGEAGY

SEQ ID NO: 280031 - protein, 84 aa, Zea mays
  unsure (1)..(84): unsure at all Xaa locations
  Clone ID: MRT4577_186968C.1.pep
CSRSPYYYAPDVLLKCXYISLXEWISGKILYIVTRALNTFXAHKXAGICRQILQVKLXDYESKPWPIINDRAKDLLSIMLTRDP

SEQ ID NO: 280032 - protein, 116 aa, Zea mays
  Clone ID: MRT4577_186969C.1.pep
PPPGCFVTSPQLLLVCWLFRPPRPDETCFRFLRCVKTFGVFFFSRESSLPLVFSPFNAPPYGPCCPTCRFGSAFPPLTPASEMLPLIELFPLFVGATVFGPFWFSAPILVWTSYFT

SEQ ID NO: 280033 - protein, 106 aa, Zea mays
  Clone ID: MRT4577_18696C.1.pep
MSNTEKAEKKVDQAESQAHEGVSKTADAVNRGINQASEKYDKASNRTEEEIHRLKAELAELRQKAGPRIQEAENFLTSPAAINFYKGLVTGVALVMAYQKYNQSRF

SEQ ID NO: 280034 - protein, 65 aa, Zea mays
  Clone ID: MRT4577_186970C.1.pep
SYLLIDQLFTSFPEKSWINRNTEGNNLNQYYHYNCNRFHPICDKPTIYISHSEIAFILMRHQVKN

SEQ ID NO: 280035 - protein, 96 aa, Zea mays
  Clone ID: MRT4577_186971C.1.pep
APPKKTPGFGGENFYKPKPLPKTKRSRNPRDKTKGGAPFFWLAGGLKNQIATAGALHEFFNWNRGEVSPGPLVKGGVPPPQNIPGPAGFERAPPLL

SEQ ID NO: 280036 - protein, 48 aa, Zea mays
  Clone ID: MRT4577_186972C.1.pep
ATSKAKATGRLHQELLINTGCRMSGHGKDCWPYPRIICTKTTNCRDDT

SEQ ID NO: 280037 - protein, 75 aa, Zea mays
  unsure (1)..(75): unsure at all Xaa locations
  Clone ID: MRT4577_186973C.1.pep
SLXKGXSXLFLHIFAFFSCXLSHHXLXKFFFYHYXFIXACSLLSXXISXYKKKFYFPPPPIDLASTVFLSSFFSP

SEQ ID NO: 280038 - protein, 558 aa, Zea mays
  Clone ID: MRT4577_186974C.1.pep
MNGAEEEEPPHVSSMPKTQDGVTKPSLGKEPIPGSELWTDGLICAFELVKSHRKPVQHKSWLATEQIQEKGPTMCTRKHSRRNGHQITEPKVDESIVLENPQQTDFSNDPSVLKDRPLYAGEILDHKWVPIGWNRIAELVLRVQSDSSWENELMEMSDSEDDYTVADLAAPYWQRPVGPTWWCHVTAGHPSIDAWLNSAHWMHPAIRIALRDESKLISDRMKYLLYEVPVRVAGGLLFELLGQSIGDPNHEEEDIPIVLRSWQAQNFLVTTMHVKGPSSNINVLGVTEVQELLLAGGSQTPRSVHEVIAHLVSRLSRWDDRLFRKYVFGEADEIELKFVNRRNHEDLNLVSIILNQEIRRLATQVIRVKWSLHAREEILIELLRHLRGNATRAILESIRKCTRDMLEEQEAVRGRLFTIQDVMQSTVRAWLQDRSLRVTHNLAIFGGGGMVLSIITGLFGINVDGIPGAQNTPYAFGLFAGLLFFVGIVLIGMGMLYLGLQNPVNSEKVKVRKLELQHLVSMFQHEAEQHGKVREGVSRHGASPSSSTASDEGYILIS

SEQ ID NO: 280039 - protein, 40 aa, Zea mays
  Clone ID: MRT4577_186975C.1.pep
FFFFFLLLNITKNIIELQVYLQSEGNASPSVPQKANPKSA

SEQ ID NO: 280040 - protein, 410 aa, Zea mays
  Clone ID: MRT4577_186976C.1.pep
GTVGGRVGRATRPTTNCLLSNQSNLPDPYFGIYAPAIKNVSRSKSFFAKLFFCVWWGLQNLSSLGQNLKTSTYTWENLFAVFVSISGLVLFALLIGNVQTYLQSASLRVEEMRVKSRDTDQWMSYRHLPENLKERIRRYEQYRWQETSGVDEEQLLMNLPKDLRRDIKRHLCLKLLMRVPLFENMDEQLLDAMCDCLKPILYTEGSCVIREGDPVNEMLFVMRGNLMSMTTNGGRTGFFNSDVLKAGDFCGEELLTWALDPTSTSSLPSSTRTVKTMSEVEAFALRAEDLRFVATQFRRLHSKQLQHTFRFYSQQWRTWAACFIQAAWHRYCRKKIEDSLREKEKRLQFAIANDSSTSLSFMAALYASRFAGNMIRILRRNATRKARLQERVPARLLQKPAEPNFSAEEQ

SEQ ID NO: 280041 - protein, 42 aa, Zea mays
  Clone ID: MRT4577_186977C.1.pep
ARELVADEHAGARSQAAFLGEVDPSHHPEGAPREHAAGRCLT

SEQ ID NO: 280042 - protein, 199 aa, Zea mays
  unsure (1)..(199): unsure at all Xaa locations
  Clone ID: MRT4577_186978C.1.pep
FGFFFCSCFFFLSCLWFGFAGXRVCCFLXVXSVCVGLSCWXXLCFXSFLXGLXXVLLLXGFASAXCCPXGXARLXXLXLXXPXXWXRXSLLRRRXXRXPCAWGSCGXCALCGRWRXCCLVXLGXGXWXLGLPPPXCGWCGXRXGRRWCPRRPARWASGLAAXVSGGVXLSSPAPSAPRVASPPPAAAASSGASRCVVPG

SEQ ID NO: 280043 - protein, 295 aa, Zea mays
  unsure (1)..(295): unsure at all Xaa locations
  Clone ID: MRT4577_186979C.1.pep
MERILKSARESGSLNLSNRSLREIPKEVTTSCTLAHNNLEVLREDLRNLSSLVVLNISHNKISSLPAAIGDLPLLKSLDMSFNQINTLPEEIGLATALVKVDFSNNCLTELPPNLATCPDLSELKASNNNISRVPDVLAGCSKLSKLDLEGNKLVALSENMFVSWTMLTELNLAKNLLTAIPGSIGALPKLIRLDMHQNSXACLSMLSHLKEYPVGACNLKLSFLDLSNNSLSGLPAELGKMTTLRKLLLTGNPMRTLKSSLVSGPTTTLLKYLRSRLSSDEEASGSRSTPTKDD

SEQ ID NO: 280044 - protein, 90 aa, Zea mays
  Clone ID: MRT4577_18697C.1.pep
DTPQTIRTRWPVRHSLGLTSLKRISSQVPVAEKSQEATVLHMHGRQFHMHWIIGEGVQASNIRASVSAYEEENLPRELHGHRPVGPFNVS

SEQ ID NO: 280045 - protein, 586 aa, Zea mays
  unsure (1)..(586): unsure at all Xaa locations
  Clone ID: MRT4577_186980C.1.pep
MERILKSARESGSLNLSNRSLREIPKEVYNNLDTGSQDEKWWEGVDLQKLILAHNNLEVLREDLRNLSSLVVLNISHNKISSLPAAIGDLPLLKSLDMSFNQINTLPEEIGLATALVKVDFSNNCLTELPPNLATCPDLSELKASNNNISRVPDVLAGCSKLSKLDLEGNKLXALSENMFVSWTMLTELNLAKNLLTAIPGSIGALPKLIRLDMHQNKITSIPPSIKGCSSLAELYMGNNLLSSIPADIGTLSKLGILDLHSNQLKEYPVGACNLKLSFLDLSNNSLSGLPAELGKMTTLRKLLLTGNPMRTLRSSLVSGPTTTLLKYLRSRLSSDEEASGSRSTPTKDDQIAAARRLSLSSKELDLSGLGVTSVPAAAWETSDVVKLDLSKNSIEDLPNELSLCSSLQSLVLSNNKIKRWPHTVVSSLPCLSSLKLDNNPLVEISSTDLVPLSKLEVLDLSGNASALPEPSAVSALPQLQELYLRRMKLHEFPNGLLGLKLLRILDLSQNHLTTVPEGIKNFTALIELDLSDNNITALPAELGLLEANLQVLKLDGNPLRSIRRTLLERGTKAVLKYLKEKLPSE

SEQ ID NO: 280046 - protein, 38 aa, Zea mays
  Clone ID: MRT4577_186981C.1.pep
MPLFYVTQAARDERRVGHYLLRASRERKSRCIDEAGLS

SEQ ID NO: 280047 - protein, 60 aa, Zea mays
  Clone ID: MRT4577_186982C.1.pep
RGPPNRCLSWTPPPQPVCGNQPILVFSPISGVFTQSLMVLVAGIVPVNGTPPVLFSKFLY

SEQ ID NO: 280048 - protein, 128 aa, Zea mays
  Clone ID: MRT4577_186983C.1.pep
GAGANRERWREKPKAPALMARHGPAGRSKRPTGEVPTPPPERPPPTTPRNQIQPNPTGDQGTEKRACRQAAPALNESTSSTGRAGATPPKICSFRSALCSRCCGGRKGLGDGWREDEEQAGADGGGDG

SEQ ID NO: 280049 - protein, 121 aa, Zea mays
  Clone ID: MRT4577_186984C.1.pep
TFFCDQGTLLVMDQIGYNAGRTPFTDISNTIITGNQNESNSLGPIVDAKERKRQRDRERYAAMTVEEKNEKNRKRREARQRNKGLSIEPLSSREGVNTDQTCEVVSFPDDCSTIDFTNLST

SEQ ID NO: 280050 - protein, 154 aa, Zea mays
  Clone ID: MRT4577_186985C.1.pep
GPFFPLEPLVCGAPPPGGRSQTLGFRPQTGFSVGALYAGLFPLFGFSGACLLVLGMSLRFKDRPTGCIKAAGVQPSGGCPASKGVACFHVYWYPPPLGKTSPRGPRIPLGPASSLWGPLFWGLYAPFGCQAPVLVKTWGLLPKCGLASQMLFGF

SEQ ID NO: 280051 - protein, 80 aa, Zea mays
  Clone ID: MRT4577_186986C.1.pep
EVHCPANRYPSFSSSSSSSSNMTPSSSSPGVRRSLLVTMLFAWNVSFLCNQSLSSSGSRFTCSSPCAMSYVDKFVKSMVL

SEQ ID NO: 280052 - protein, 35 aa, Zea mays
  Clone ID: MRT4577_186987C.1.pep
TKCVSGSYVSNKKFMYLRLPLLNRKKKKKKKKKKI

SEQ ID NO: 280053 - protein, 181 aa, Zea mays
  Clone ID: MRT4577_186988C.1.pep
NSGVRACPFIQALLSLTGTSESRAGAMLARRRPSRFLETSTHMYPEFTHPTCRGQGRATLPSNYVQAARQANGVDESRGPQRLMLYSCTHQLRAPTETAAPANRTHYRASCRTIPRCARNAHCWRSRCLRTRRPGPVLRWCGGWSKLSLKKKKKREAGKGKDLLISSGHSLYIAASVRLLP

SEQ ID NO: 280054 - protein, 94 aa, Zea mays
  Clone ID: MRT4577_186989C.1.pep
LNISGSINGSHGISSRCVDYPKVLVRGDFLYSEFLKKKNGVLAWRRLGAGHRIPGIVRAFQATVSEQEAFLVLQSACWRHQTSKWITGAQIGNN

SEQ ID NO: 280055 - protein, 59 aa, Zea mays
  Clone ID: MRT4577_18698C.1.pep
LYGILRKIIGLAGISCLHSHWQCSEGPNHISNTCFFSFMINLNTWCKFHIKSLVFLTGT

SEQ ID NO: 280056 - protein, 247 aa, Zea mays
  unsure (1)..(247): unsure at all Xaa locations
  Clone ID: MRT4577_186990C.1.pep
MQLPDLQGNGAGGPGGSGPSLFNLGFFANNGNSSGSSHEHASQGLMNNNDHFNGGAGGGGGGSEASEAGIFGGNFVGGGDQVPPPGLYSDQASMLPQMSATALLQKAAQMGATSSANGGAASMFRGFVGSSXSRAAGDAAHGXSDANLNDLMNSLAGGGVGAGGMFGSSNGAGGPGMFDPRQLCDMEHEVKFGHGGGDMTRDFLGVGGGGIVRGISTPRGDHQSSSDMSSLEAEMKSASSFNGGRMP

SEQ ID NO: 280057 - protein, 60 aa, Zea mays
  Clone ID: MRT4577_186991C.1.pep
RGRPRVRNLPPRVSVFCILPPRKSQGAGFCNLGPATEKRTRLTTTSSSLSIRNTYCISFR

SEQ ID NO: 280058 - protein, 78 aa, Zea mays
  Clone ID: MRT4577_186992C.1.pep
CRGDGTHLGADGDSNAGEKHEHGTAQKRRLMVHRRLPAYEPCRRAAGHCATGRRPGASTRRGGRLTGEEESRRCPPWL

SEQ ID NO: 280059 - protein, 76 aa, Zea mays
  Clone ID: MRT4577_186993C.1.pep
VGAPWLISLPDVHVRPAPCTSDEARQVYESAPLYCQEQQAVIDLHIHCTVELYIMYVWRAVRVASISPTFSVSLMV

SEQ ID NO: 280060 - protein, 55 aa, Zea mays
  unsure (1)..(55): unsure at all Xaa locations
  Clone ID: MRT4577_186994C.1.pep
HIMGGVTIFFVLTILEREGDILXTSYKVWCSWVESSAQFCERFIVSLHLEPKTVL

SEQ ID NO: 280061 - protein, 70 aa, Zea mays
  Clone ID: MRT4577_186995C.1.pep
RVSEARQFLIDMAESGHVPREHTYKLVKAAIDDAGEDALPVGLCQSIEDGITTRFRQVMQIKPIMRPATR

SEQ ID NO: 280062 - protein, 83 aa, Zea mays
  Clone ID: MRT4577_186996C.1.pep
KKKKKKKKKKKKKKKKKKKKKKKKKKKKKKKKKKKKGGAVCFIEPNFPSPALQCFFFFFASLNFIGLPFYFPPVWIRQSLGPT

SEQ ID NO: 280063 - protein, 113 aa, Zea mays
  unsure (1)..(113): unsure at all Xaa locations
  Clone ID: MRT4577_186997C.1.pep
RERRPXXXGGFYKETGRYSTRPQLRKANGKHQQEQEQGGTKAGEQQNERTTSEGKDTQKRALDKQGMGWHERGRSLATTAPRQARVHPAEERHQPPAREKPTRGGRHKKAARG

SEQ ID NO: 280064 - protein, 70 aa, Zea mays
  Clone ID: MRT4577_186998C.1.pep
FAFSSLSRFPFSAIMPKLFCAQLRDHLILHHNRFPSRSSFVLTILLYTHDPIPKIPVHIFHLENIVKSCF

SEQ ID NO: 280065 - protein, 54 aa, Zea mays
  Clone ID: MRT4577_186999C.1.pep
IVSSRQMKNMKLLSTLGEPSLMSHYTAVPRVRGRIVHDRTVFVIPYMWSGSAFE

SEQ ID NO: 280066 - protein, 126 aa, Zea mays
  Clone ID: MRT4577_18699C.1.pep
GSKDKKKNLPSAEGGRLSSKFRNGTPDPPEGRGENLSFYKRTRQTRGPNPQGGGGTLKPSPHPGAPRQGTHGRPELGGPAWQGQPGLGLLGARPGGPPSGFKISKKPPPHRRRAKGGHIVRPPTHF

SEQ ID NO: 280067 - protein, 65 aa, Zea mays
  Clone ID: MRT4577_1869C.1.pep
CIYLFLMPWMRILANCVVVMIQHSCRQMISHITESQKSCTRNNITGHNLISKDMRVLTSRVHPYS

SEQ ID NO: 280068 - protein, 332 aa, Zea mays
  Clone ID: MRT4577_186C.1.pep
MEVEEAGGEVEIAGKDEAEAEYHSRDFEWEDLKEEVESGPVFSYHLSPFLDPAASTTSPPQPSSEAWRSFHRRHASGKFFKERRYLLKEFPELCSSKDHAKVLEVGCGNGSTAVSILRSSERITVFACDCSKDTLEKAYEIISNTKGINIKDRFHPFLMDVSKETFPDWLFCKACQTSLGKAAASLLDPSHHGIREEHPVFLGENQCCAGGMDFITMIFTLSAIPFDIMPTTIEQCVSVLKPGGLLLFRDYGLYDMTMLRFLPHQRVGFREYMRSDGTFSYFFSLDTVRELFRAAGLVELELEYCCVKSVNRKNGKTMRRVWVHGKFKKPPR

SEQ ID NO: 280069 - protein, 75 aa, Zea mays
  Clone ID: MRT4577_187000C.1.pep
SADANWECRYHDMAGHGKIHQPINTYLNRLLRNLSVDLQHFSPPIFWRRGVPGTFYIHGLHSLPFLARHQSGLRW

SEQ ID NO: 280070 - protein, 54 aa, Zea mays
  Clone ID: MRT4577_187001C.1.pep
STRPVNFVNGRAVDCLITLNILSSSPASNVTVDFLASFSYYAFRLQNGAVFLKF

SEQ ID NO: 280071 - protein, 76 aa, Zea mays
  Clone ID: MRT4577_187002C.1.pep
RYNTAGQHFIITGEKSAQHQPPMLETQPGSMAADPDPPLLLSRRPDLSLLSWRWCKRPRVRPRVSTVHGPGPCRCV

SEQ ID NO: 280072 - protein, 72 aa, Zea mays
  Clone ID: MRT4577_187003C.1.pep
KMYPRLLKNDNLGPQDAGLCFLPKKVSLQMLDRFIVVFPLAAFVAAPKWHPQLSMPLSRLVCFGIPLQLGVI

SEQ ID NO: 280073 - protein, 289 aa, Zea mays
  Clone ID: MRT4577_187004C.1.pep
SRPAGDANTRSVAWCVDMLEHESLQVSPRFKSLFDHVFIDEKWFFLTRKSERYYLLPDEDEPLRTCRSKNNIPKLMFLCVTARPRFENGVCTFDGKIGCFPLVTYERAKRSSINRQAGTLEVKPITSVTRGVIREFMIDKVLPAIRAKWPREDVNNPIYIQQDNAPSHLELDDPLFCQAAKQGGFDIRLIYQPPNSPDFNILDLGFFRAIQSIQYKKVAKTVEHLIPVVQEAFNEYSPKKNKQNLCDTSTSFEGIHEGCRFKQIQNSAYEKRTLERQDFHCRSFVRHHW

SEQ ID NO: 280074 - protein, 71 aa, Zea mays
  Clone ID: MRT4577_187005C.1.pep
TVVFFFYFFFFQSLTCIARTVAKVIKKEEQKWRHRRLSLSRSLFGTHSTQEVTYNIEYQTSSYHHSPRTRQ

SEQ ID NO: 280075 - protein, 100 aa, Zea mays
  Clone ID: MRT4577_187006C.1.pep
GLRDAGGPRRAVGARGQHNAAHAARLGPTAPARAVRRRHGQLLLLGKARGGLSGGGDGGSHAVAALGRAGEASNTLQARRGAEGGRSSERVCVCVEALDR

SEQ ID NO: 280076 - protein, 181 aa, Zea mays
  Clone ID: MRT4577_187007C.1.pep
ADVPEKILSQAHGKVRTVVDFLYENVIDFIDSEAVDDAWAVVSYLGEADCLLTGGPVASYNSENIAQLIAASVAARGVLFGNAHVTPSRWHTIRSPRLWQTDQSSRSNKDHILKERFDCSRTCGFCNFADLVTEFRPLERWIGPRNGGHRSSCLPHGVGCSPMGVADGNNSEEDDDMIEDC

SEQ ID NO: 280077 - protein, 286 aa, Zea mays
  Clone ID: MRT4577_187008C.1.pep
MRQGMSSPSAAAALVLLLALLAGGQCREAQLDAADAGTGTENYTASDAAVYWGPWQRARATWYGQPNGAGPDDNGGACGFKHTNQYPFMSMGSCGNQPLFKDGKGCGSCYKIRCRKDPSCSGRTETVIITDMNYYPVSKYHFDLSGTAFGRLAKPGLNDKLRHSGIIDIEFTRVPCEFPGLKIGFHVEEYSNPVYFAVLVEYEDGDGDVVQVDLMESKTARGPPTGRWTPMRESWGSVWRMDTNHRMQPPFSIRIRNESGKTLVANNVIPANWRPNTFYRSFVQYS

SEQ ID NO: 280078 - protein, 67 aa, Zea mays
  Clone ID: MRT4577_187009C.1.pep
FVHLSRHQDVGLSCTHVHQLASGRTCVMSCRSEATNMRHVVVLFTLVASPPSVFVRAGAVYPAPTKV

SEQ ID NO: 280079 - protein, 146 aa, Zea mays
  Clone ID: MRT4577_18700C.1.pep
MLPLSLLKTAQGHPMLVELKNGETYNGHLVNCDTWMNIHLREVICTSKDGDKFWRMPECYIRGNTIKYLRVPDEVIDKVQEETSKSRSDRKPPGVGRGRGRGDVGAKPGGRGIGRGQDDGGRGSGGRGRGGVGAKGGNKGGGRGRG

SEQ ID NO: 280080 - protein, 284 aa, Zea mays
  Clone ID: MRT4577_187010C.1.pep
MRQGMGSPSATAAALVLLLALLAGGHCREAQLDAAAGTENYTASDAAVYWGPWQRARATWYGQPNGAGPDDNGGACGFKHTNQYPFMSMGSCGNQPLFKDGKGCGSCYKIRCRKDPSCSGRTETVIITDMNYYPVSKYHFDLSGTAFGRLAKPGLNDKLRHSGIIDIEFTRVPCEFPGLKIGFHVEEYSNPVYFAVLVEYEDGDGDVVQVDLMESKTARGPPTGRWTPMRESWGSVWRMDTNHRMQPPFSIRIRNESGKTLVANNVIPANWRPNTFYRSFVQYS

SEQ ID NO: 280081 - protein, 59 aa, Zea mays
  Clone ID: MRT4577_187011C.1.pep
FSREQDVTNCRLYLLMINPINSETTIETMHRCLTELLVYMDSSYSPDLSRVNIRLSLHI

SEQ ID NO: 280082 - protein, 47 aa, Zea mays
  Clone ID: MRT4577_187012C.1.pep
YYCSGPFSCARSCPRPYLLLPRAAPSHIVESERYLATTWIMEHDTSD

SEQ ID NO: 280083 - protein, 99 aa, Zea mays
  Clone ID: MRT4577_187013C.1.pep
NEGTILFIIIDKLCTYKRLKGASICTDKTKPTNKVHNSDRGYTRRAEVIRDQTFLSISEYNSAWRGVCFHVVLVISSIHTITKFTAHRSIDLMCGDQLG

SEQ ID NO: 280084 - protein, 104 aa, Zea mays
  unsure (1)..(104): unsure at all Xaa locations
  Clone ID: MRT4577_187014C.1.pep
RQAPXKXNXAXXXXPGTXTXGXXGXGXXXPXRPGXXRXXXQGDSSARHXGXXXAXXAXXQXXXAPXXGAXXDRXGRRPXRXXXXXGAXXDXAXXATTPXRGPDA

SEQ ID NO: 280085 - protein, 159 aa, Zea mays
  Clone ID: MRT4577_187015C.1.pep
MESTALMTARLPLLTSGSRSKPLPFASFTTAACRLASAPCSGSGSVVLLSRRSRDYAGVGSLVSAAAAPGDTADAGSESILLSVQGMMCDGCAASVKRILESQPEVTSATVDFKEASAVVWTTDEAKGTQGWQKQYGEKLAKHLGTCGFESRLQAMCKR

SEQ ID NO: 280086 - protein, 133 aa, Zea mays
  unsure (1)..(133): unsure at all Xaa locations
  Clone ID: MRT4577_187016C.1.pep
PLAPVPNPSPLLPSPGRLAVSPPPPSPAAAASSCCRAGAAXAGVGSLVSESILLSVQGMMCDGCAASVKRILESQPEVTSATVDFKEASAVVWTTDEAKGTQGWQKQYGEKLAKHLGTCGFESRLQDDQRTIT

SEQ ID NO: 280087 - protein, 65 aa, Zea mays
  Clone ID: MRT4577_187017C.1.pep
GSTQPEKKKKKKKKKKKKKKKKKKKKKKKKKKKKKKKKKKNKKKKKKKKKKKKKGRSFCFFSEQN

SEQ ID NO: 280088 - protein, 158 aa, Zea mays
  Clone ID: MRT4577_187018C.1.pep
MESTALMTARLPLLTSGSRSKPLPFASFTRAACRLASAPCSGSGSVVLLSRRSRDYAGVGSLVSAAAAPGDTADAGSESILLSVQGMMCDGCAAGVKRILESQPEVTSATVDFKEASAVVWTTDEAKGTQGWQKQYGEKLAKHLGTCGFESRLQGKTD

SEQ ID NO: 280089 - protein, 94 aa, Zea mays
  Clone ID: MRT4577_187019C.1.pep
FIFAGAFPCPKGLYSFVWWWLGPNCPFVCRVALWQWLGCVSSGVPAFPCFHQLGLGVDGSCFPGPTLGLFCFMKEMAPLPVLGGRVKKIKKINR

SEQ ID NO: 280090 - protein, 146 aa, Zea mays; identical to SEQ ID NO: 280079
  Clone ID: MRT4577_18701C.1.pep

SEQ ID NO: 280091 - protein, 87 aa, Zea mays
  Clone ID: MRT4577_187020C.1.pep
GDKYLLQALDFFYISLFYSITTLSSSVAFTNTSANFAKLKARLIGNKKRLCYKSLKAQMKNIGQSILVVFPTLHSHVHMLLDSLTKR

SEQ ID NO: 280092 - protein, 206 aa, Zea mays
  Clone ID: MRT4577_187021C.1.pep
RVPLVELVTSPPPSVPVPRAAVCRACSVPIMVRKKRTGPGSSGETSGESSGASGQGSSQQPERTQQPGGGRGWVPQQGGRSGGQHQGRDRHYQGRGGPGPHHLGSGAPEYRPREYQGRGGEYQGRGGGRSRGGMPQPYYGGHRGGNVGHNVPPGPSRTVPELHQAPYVQYPAPVVSPSPSGPGSSSQPMAEVSSGQVQQQFQQLAD

SEQ ID NO: 280093 - protein, 161 aa, Zea mays
  unsure (1)..(161): unsure at all Xaa locations
  Clone ID: MRT4577_187022C.1.pep
MESTALMTARLPLLTSGSRSKPLPFASFTRAACRLASAPFSGXAAASSCCRAGAATMLXGSLVSAAADPGDTADAGSESILLSVQGMMCDGCAASVKRILESQPEVTSATVDFKEASAVVWTTDEAKGTQGWQKQYGEKLAKHLGTCGFESRLQDDQRTIT

SEQ ID NO: 280094 - protein, 1087 aa, Zea mays
  unsure (1)..(1087): unsure at all Xaa locations
  Clone ID: MRT4577_187023C.1.pep
MVRKKRTGPGGSGETSGESSGASGQGSSQQPERTQQPGGGRGWVPQQGGHGGGQHQGRDRHYQGRGGPGPHHLGSGAPEYHPREYQGRGGEYQGHGGEYQGRGGDYQGRGGGRSRGGMPQPYYGGHRGGNVGRNVPPGPSRTVPELHQAPYVQYPAPVVSPSPSGPGSSSQPMAEVSSGQVQQQFQQLADRGQSSTSQEIQVAPASSKSVRFPLRPGKGTYGDRCIVKANXXXAELPDKDLHQYDVSITPEVTSRGVNRAVMGELVTIYRQSHLGGRLPAYDGRKSLYTAGPLPFTSMAFEITLQDEEDSLGGRQGGHRRERVFRVVIKFAARADLHHLAMFLAGRQADAPQEALQVLDIVLRELPTARYSPVGRSFYSPNLGRRXXLGEGLESWRXXXQSIRPTQMGLSLNIDMSSTAFIEPLPVIDFVAQLLNRDISVRPLSDSDRVKIXXALRGVKVEVTHRGNMRRKYRISGLTSQATRELSFPVDDRGTVKTVVQYFMETYGFSIQHTTLPCLQVGNQQRPNYLPMEVCKIVEGQRYSKRLNEKQITALLKVTCQRPQERELDILQTVHHNAYYEDPYALEFGIRIDERLAAVEARVLPPPRLKYHDSGREKDVLPRVGQWNMMNKKMVNGGRVSNWACINFSRNVQDSAARGFSHELAVMCQISGMDFALEPVLPPVTARPEHVERALKARYQDAMNILRPQGRELDLLIVILPDNNGSLYGDLKRICETELGLVSQCCLTKHVFKMSKQYLANVALKINVKVGGRNTVLLDALSRXRIPLVSDRPTIIFGADVTHPHPXGEDSSPSIAGVGASQDWPEVTKYAGLVSAQAHRQELIQDLFKVWQDPQRRTVTGGMIKELLISFKRATGQKPQRIIFYRDGVSEGQFYQVLLYELDAIRKACASLEPNYQPPVTFVVVQKRHHTRLFANNHNDQRTVDRSGNILPGTVVDSKICHPTEFDFYLCSHAGIQGTSRPAHYHVLWDENKFTADELQTLTNNLCYTYARCTRSVSIVPPAYYAHLAAFRARFYMEPDTSDSGSLASGARGPPPGAARSSTRGAGSVEVRPLPALKENVKRVMFYC

SEQ ID NO: 280095 - protein, 163 aa, Zea mays
  Clone ID: MRT4577_187024C.1.pep
MESTALMTARLPLLTSGSRSKPLPFASFTTAACRLASAPCSGSGSVVLLSRRSRDYAGVGSLVSAAAAPGDTADAGSESILLSVQGMMCDGCAASVKRILESQPEVTSATVDFKEASAVVWTTDEAKGTQGWQKQYGEKLAKHLGTCGFESRLQDSKVKPNRY

SEQ ID NO: 280096 - protein, 132 aa, Zea mays
  unsure (1)..(132): unsure at all Xaa locations
  Clone ID: MRT4577_187025C.1.pep
KDFMMAIGAXTQAVXDMVQTAHSLFXNLSLRKLGLGXDEHALSDAKACREXMNPDCPKGYQIEGAVLCCLHXFDEGDHAFYDGVLLIPESQELLDAFRETVHTGRKFHGYGGRYRPNHKIFERWIMINKYEG

SEQ ID NO: 280097 - protein, 53 aa, Zea mays
  Clone ID: MRT4577_187026C.1.pep
PLMMEKGFKTPLFQPGSVYNNDLVRWWFPTQMVFIFPPGEPLSPIKASRRVYF

SEQ ID NO: 280098 - protein, 91 aa, Zea mays
  unsure (1)..(91): unsure at all Xaa locations
  Clone ID: MRT4577_187027C.1.pep
KFLVKPGFPWYVLSSEKAKRTPFFGLGPPVPEVVRKNPGMSPKPFFWPVHNVPGGCTVYILDMISGCIDFIGXLKKNAGIPPXKQKKKKKK

SEQ ID NO: 280099 - protein, 91 aa, Zea mays
  Clone ID: MRT4577_187028C.1.pep
VLALTPFPFDRITLDSLQNISLSALARTWFTLLAFHLTFPSGNCLFSTGLDSKAKIGNFHLKERSFRTIVFHRIRIRARRGYLCEGTGTRK

SEQ ID NO: 280100 - protein, 51 aa, Zea mays
  Clone ID: MRT4577_187029C.1.pep
RQQLVRGAKLSVLGATFCWALGLLDHLEGSLWQCLDERCLALSSGRMWLPG

SEQ ID NO: 280101 - protein, 80 aa, Zea mays
  Clone ID: MRT4577_18702C.1.pep
GYKGSLPPPGSASRKSPPSVSLSRGWLLKWVRTTRCRTLDRWLGLGDNTHAKLLVLLFLVVSLCSQDKSVQRRSVRVVGD

SEQ ID NO: 280102 - protein, 61 aa, Zea mays
  Clone ID: MRT4577_187030C.1.pep
VLKLRAKALKKLGTIFQVSFCSYVLLLHLFLLRSKRSSRVMNFPLITYMSPCLWPVGLVLD

SEQ ID NO: 280103 - protein, 208 aa, Zea mays
  unsure (1)..(208): unsure at all Xaa locations
  Clone ID: MRT4577_187031C.1.pep
MRQLGCPDQKRTHLAAAALSSSVLLPGAASEHPRSFFPPPARAARSSXPRSSWPPSSSAPSSPAGTPPRRRRPRRPARAASATTPAPRASPRRGTSAHRAPGWRTPTPTPRWSPPRSRPWTPRSMRTMPPPRGICCACIPPPRRSRARRTAAATGGTGAPAGSTRRRPPPAAGAAGTARPPPCPSPCGNRTATSSPTTGPETLPPLLV

SEQ ID NO: 280104 - protein, 74 aa, Zea mays
  Clone ID: MRT4577_187032C.1.pep
RGGIARASRGRSWNGCSIPEEYRKLAIRIIRQFDVGKHVQDRFATHLSWLSLHMVLEPAFLDMGEIPGTRGRPS

SEQ ID NO: 280105 - protein, 75 aa, Zea mays
  unsure (1)..(75): unsure at all Xaa locations
  Clone ID: MRT4577_187033C.1.pep
GPNSRSPRVRXAWAIASLPKTWGRLPARPAPTPTTSIPSASDRNFTPGAASDCNGYAPALQAGSRELADESSPTG

SEQ ID NO: 280106 - protein, 45 aa, Zea mays
  Clone ID: MRT4577_187034C.1.pep
DRSGSRPMTYGISTVKLQFQLHYWYWSVVLSALIDSCDHVNLNDF

SEQ ID NO: 280107 - protein, 72 aa, Zea mays
  Clone ID: MRT4577_187035C.1.pep
KRKFKLVKAKARKNGVGKKKIPKEGSILVVPRLKKKKRVPNKGFFSFFPGPFLLKKKKNFSHCNKSRGKRVS

SEQ ID NO: 280108 - protein, 83 aa, Zea mays
  unsure (1)..(83): unsure at all Xaa locations
  Clone ID: MRT4577_187036C.1.pep
KLVDTEKCNQSRLGNIEPSELIVDMDARIAKAKEGALSRXDIIDKVERWMSASEEESWLEEFVLLVRHMIFERLKFYRKQPMT

SEQ ID NO: 280109 - protein, 91 aa, Zea mays
  Clone ID: MRT4577_187037C.1.pep
MCLLGFSYSLLACALWPMVAFIVPEHQLGTAYGFMQSIQNLGLAVIAILAGMILDTRGYLLLEVFFIACVSLSLLAVVFLYLVNRARGGNL

SEQ ID NO: 280110 - protein, 144 aa, Zea mays
  unsure (1)..(144): unsure at all Xaa locations
  Clone ID: MRT4577_187038C.1.pep
FSDEGYGPVPSRWKGVCQGGEGWGSNNCSRKIIGARFYSAGVAEEDLEIDYLSPRGASGHGTHTASTAAGSVVEAVSFYGLAXGTPLXGAPRARIAVYKALWGRGAGTGNTATLLAAIDDAIHDGVDVLSLSLVGVENTFGTLH

SEQ ID NO: 280111 - protein, 42 aa, Zea mays
  Clone ID: MRT4577_187039C.1.pep
LFLRPVLTAFLGTSVDGNFGRFALEFLALISRIKNILPWVPK

SEQ ID NO: 280112 - protein, 122 aa, Zea mays
  unsure (1)..(122): unsure at all Xaa locations
  Clone ID: MRT4577_18703C.1.pep
QVVLTTKSTSIVVHSNIQXQVTKRVAQIKSLINAAHQEYXKEKLTDTIEILADDVAVIHVSWLIILHVSRSLTRXAMTQTDLXYMNLRFVDTLYATKDAVQERIIVRVGCTLLLLASIVNSI

SEQ ID NO: 280113 - protein, 60 aa, Zea mays
  Clone ID: MRT4577_187040C.1.pep
MATMIAAMRVLFRALNDPVMDTLMATRTCPRSCRAFVAVDVDSELHFLRLSLCLQIKLKY

SEQ ID NO: 280114 - protein, 80 aa, Zea mays
  unsure (1)..(80): unsure at all Xaa locations
  Clone ID: MRT4577_187041C.1.pep
TDTRAASSSAATPKTTRSPAPTPAPPRRSASPSRSTRRSPPRPSPPPPPAPTPXACPPPPPTPIPAAAALTCSAVCLVPN

SEQ ID NO: 280115 - protein, 161 aa, Zea mays
  unsure (1)..(161): unsure at all Xaa locations
  Clone ID: MRT4577_187042C.1.pep
QKIYYLTGAKGTXDRXAAGEKAENATTAQXEGHXTXQEGXDAGEEANNQNETKDATTNRARTPTXEKTRKTKARGGKRRXPGEGPQEKTGGXPQXHKAPNKKEXQEETXRKKKAQXPQDGTRANKATXAWGGEAGDPIHDKRCNSGTTDMDPERNMRKRGR

SEQ ID NO: 280116 - protein, 95 aa, Zea mays
  Clone ID: MRT4577_187043C.1.pep
LPWNDGANVERIVPPYAERHPRHAARLQPPRRWCHNDGACGRSHWPACLCVLVRPRRAWKAVGRQHQTIMKPVPEEPATSRDQSPATGGGNHRMR

SEQ ID NO: 280117 - protein, 69 aa, Zea mays
  Clone ID: MRT4577_187044C.1.pep
LPITPSCHPYLHPNSCSSIFSRDSYTRHEDIFPFSPTYVVLHSISFFSSSHIPDSFFQYIILLSPYTLP

SEQ ID NO: 280118 - protein, 66 aa, Zea mays
  Clone ID: MRT4577_187045C.1.pep
TKLFPQFYPSFKGVLLFFWADDILSSISIHVKVGLSAVTNHGSILWVSFRAAELSSVEFGGGQPCC

SEQ ID NO: 280119 - protein, 118 aa, Zea mays
  unsure (1)..(118): unsure at all Xaa locations
  Clone ID: MRT4577_187046C.1.pep
WCNTCRYPGYFAPMDASPLPGVXLRCKHGLRALTVAGQCGPGGYFLIQTSQQVSAFTSQQCRVYVPRSPVRACGVPAYPAGRRGMPLKFQEFVKRDNGLQGMYSVGNRLFRPKNPAKC

SEQ ID NO: 280120 - protein, 46 aa, Zea mays
  Clone ID: MRT4577_187047C.1.pep
CSSRGPIHNLRLSIDKLPIMHVRPQHAASYIYICRFALSNVSMCIV

SEQ ID NO: 280121 - protein, 103 aa, Zea mays
  unsure (1)..(103): unsure at all Xaa locations
  Clone ID: MRT4577_187048C.1.pep
PRVRGRVGDGQSSIPHLALPSCPVRAFSDWPPPASPSSTKAHRKRASEPPSPPPPPTAFGPHPDXTPXPPAWGARAPPPATTPSPPRAPPPPGSIAGVAGATA

SEQ ID NO: 280122 - protein, 104 aa, Zea mays
  Clone ID: MRT4577_187049C.1.pep
HKHLLDTSFFCQLVLFFLPCRDPYSKGVTLRSLKISDLPDPPTMVKASSREDAQPMTESSNAEVNTSSAVAAGESEAHEIGSPKSLKDAIKPKHKRKKKKSDKS

SEQ ID NO: 280123 - protein, 130 aa, Zea mays
  Clone ID: MRT4577_18704C.1.pep
AQGAQLHLSPWLRAPFSSCATPSLLLLVASGCSRDSHGRTSAPLFTAPLLPPASRQQAPSMDASSQPWRPNPFSPYLELPMAPPSLPLVVASSAPCSTTPRFFSRELFPHGATPCLHSSLAPRKIADQRP

SEQ ID NO: 280124 - protein, 76 aa, Zea mays
  Clone ID: MRT4577_187050C.1.pep
VWNHLFASHDVDPPTMVKASSREDAQPMTESSNAEVNTSSAVAAGESESHEIGSPKSLKDAIKPKHKRKKKKSDRS

SEQ ID NO: 280125 - protein, 56 aa, Zea mays
  unsure (1)..(56): unsure at all Xaa locations
  Clone ID: MRT4577_187051C.1.pep
XLHSRALGFVMIPVAARRIRPSPGQAPPDSRPTPVLMPLLLHHTRTPTLLLCLLLR

SEQ ID NO: 280126 - protein, 109 aa, Zea mays
  Clone ID: MRT4577_187052C.1.pep
KKKKKKKKKNLKLKKKKKKKKKREKLKKIKKKKKHKCPSILNDPSLPPLPFHALLFLFCHLNSFYCPPFYNSFSGKTFAFPSLIPLHPIPLSPPSLLPNYPPPFPLLNL

SEQ ID NO: 280127 - protein, 92 aa, Zea mays
  Clone ID: MRT4577_187053C.1.pep
GKLLAIGHSMGGILLYAMVSKCGSKGAEPELAAIVTLASSVDYTTSNSSLKLLLPFADPATMLRVPAIPLGALLSTTYPISSRAPYILSLLR

SEQ ID NO: 280128 - protein, 164 aa, Zea mays
  Clone ID: MRT4577_187054C.1.pep
QQQFFPFHPLGSLDSAFFLQQQQFPFSQVPVASPPQFFPFYPLAALDFPGFFQQPQLLPFSQVGGVGPAPFLTHPPLLPFFQPGGPNGGPLFQLPQLVPFPPPGLANPPGFPPPPPLGGAPLLIFFGVKVQKKVFFLEKKKKKKKKKKKKKKKKKKKKKKKNPP

SEQ ID NO: 280129 - protein, 102 aa, Zea mays
  unsure (1)..(102): unsure at all Xaa locations
  Clone ID: MRT4577_187055C.1.pep
VHDVSVKSLQVCXSSLHKHDAQLCVCAKNCAHPVYVXLVKAVCAQRNVHLVAVXKISLLIXWTRLRKIGSEGYARKVVGRSCVAVKDGGQQSXVLYIEQQYV

SEQ ID NO: 280130 - protein, 92 aa, Zea mays
  Clone ID: MRT4577_187056C.1.pep
WGTPKGSLLHGGARPKCFSPPMPNWEKFKGPLLCCSQFPPLDIRPYQPIFLIGPPPRPGHQLCWASFFFPAPWGFFFPPTPCGVSGGGATFS

SEQ ID NO: 280131 - protein, 230 aa, Zea mays
  Clone ID: MRT4577_187057C.1.pep
MWSSGSDRDEAVDTANASSVDASSPARQPSTPPPPPRRRRQRARRRAHRLRARNTGAGAEEEGLVEADADADDVWRGLQQQREREAWLRRASRPVVVVAGEEGSPPDASAGSGESGGVGRARSLTDDDLEELKGCVDLGFGFSYREIPELCGTLPALDLCYSMSQRFLDEHHHQQLGKAEEAPPLAPASPAQPAATTNWKISSPGDSPDEVKARLKYWAQAVACTVRLCS

SEQ ID NO: 280132 - protein, 352 aa, Zea mays
  unsure (1)..(352): unsure at all Xaa locations
  Clone ID: MRT4577_187058C.1.pep
IRRREVEENPSAEATRKRRRTSTASPASLSRRSSPDPATRILLTEQRQQKEEGDAAKNKRKQGSGSDGDGCSGSEGEQTKRARREEKRRQAKGKAVAPQIDTGLFSNVPPELFLQIFKFLSSEDLISCALVCRFMNAAASDETLWRRLYCMRWGLASNAKFRECAWKNLYIQRDREDMVEFVRNTPTEFKEYYIQMQAAKRSQAPRPSEVNDDKVMLDKTVADQVSSWKNSRGLTDEAVKGHSCSGIXCSYTQIGDAYICEKTGRVHVCDDACREFVLDQSSGLLLCTISGHCFERWLCPDDEWDADDTDLQQAGVVDEAEPFMGSGRYARAIMLGYNCTDEKELEDALRFC

SEQ ID NO: 280133 - protein, 68 aa, Zea mays
  unsure (1)..(68): unsure at all Xaa locations
  Clone ID: MRT4577_187059C.1.pep
IPGPGLNVLQTKPHLPXXLVGMLNVVLTAHQAAFTEESSSDLRELMIGNLEAFFSGKPLLTPVMTRPQ

SEQ ID NO: 280134 - protein, 250 aa, Zea mays
  Clone ID: MRT4577_18705C.1.pep
KEFFVIGIQWASIYHPALWCAFSLIFSLLLVPQVLAVVFKDRFTYKSLCAYGGQRTLLKSLVGGFICCFVELARLVLVWLLLLLYAIYLVFIPWLFGHPITEDGSLTYMTHKGWILKGPSSSNEVVHAGIPDVMVIVLPHLCFVLVPTIVILAAMAAERTAYREHYLSRSGKKKDDYRKSRRQIEHENFWNGRWISKFLCLLCVVVLCKHWKLCRALVKAYAMNPLLHAPVLFFFVPLLMVFGIYKTRSI

SEQ ID NO: 280135 - protein, 73 aa, Zea mays
  Clone ID: MRT4577_187060C.1.pep
IPLCRQVFNKSPPRCEESPPPPGNGILGFLGTFLGVFKGSPGCGWCYNSTGHLVFFGGYGFCPHKKELVEKKR

SEQ ID NO: 280136 - protein, 152 aa, Zea mays
  unsure (1)..(152): unsure at all Xaa locations
  Clone ID: MRT4577_187061C.1.pep
VADRVSSWKNSRGLTDEAVKGHSCSGNTCSYTQIXDAYICEKTGRVHVCDDACREFVLDQSSGLLLCTISGHCFERWLCPDDEWDADDTDLQQAGVVDEAEPFXDLDVMYCSVPLHGVTDRDXPLTQRTARAIMLGYNCTDEKELEDALRFF

SEQ ID NO: 280137 - protein, 240 aa, Zea mays
  unsure (1)..(240): unsure at all Xaa locations
  Clone ID: MRT4577_187062C.1.pep
MADVQGDNEAALEDDAFPDDGPLDTEEGGGGEPISGGDEEEEEDVDGLASFLESEILSGSSDEDPIDQSNWLPRQEQRQQKEEGDAAKNKRKQGSGSDGDGCSGSEGEQTKRARREEKRRQAKGKAVAPQIDTGLFSNVPPELFLRIFKFLSSEDLISCALVCRFMNAAASDETLWRRLYCMRWGLAXPXAKFRECAWKNLYIQRDREDMVEFVRNTPTEFKGVYIQMQAAKRSQAPRSS

SEQ ID NO: 280138 - protein, 86 aa, Zea mays
  unsure (1)..(86): unsure at all Xaa locations
  Clone ID: MRT4577_187063C.1.pep
SRRTGKASTGKSGQRGREQXGTARXYRQXXGNPXSRXFPSLATIPARIGRXQALAEEAKEGLATEGKNWIPSQGETTTIAARQSGA

SEQ ID NO: 280139 - protein, 47 aa, Zea mays
  unsure (1)..(47): unsure at all Xaa locations
  Clone ID: MRT4577_187064C.1.pep
VFFFFFFFFFFFFFFFFFFFFFFFFFFLXLTKKLPTKRGKPHPRQSI

SEQ ID NO: 280140 - protein, 73 aa, Zea mays
  Clone ID: MRT4577_187065C.1.pep
FTQPFIESGLVILPPIKKHITNSWAFLQPFTLGMWCVTGLSFLVVGVVIWILEHRINDDFRGSPRQQIITIVW

SEQ ID NO: 280141 - protein, 125 aa, Zea mays
  Clone ID: MRT4577_187066C.1.pep
LERVALIGDKNWESVFCSISKPFFPSCEIEFFKENIDEEKKVPSAPLQWIFANTHLSPYNTFRISAKDVASNNENIERAIPFISKTNYVVCMDESEEAQYALKEALSLMKNPRHEVLHIVSIYGN

SEQ ID NO: 280142 - protein, 57 aa, Zea mays
  Clone ID: MRT4577_187067C.1.pep
NSDPWRWSECHDLCHTTVLPLASQRRVLFCAQCSASLVTADPLWCPSLLLYDSYAYF

SEQ ID NO: 280143 - protein, 82 aa, Zea mays
  Clone ID: MRT4577_187068C.1.pep
IHRYIWLNLSNSSKCVCYRSICLITLDINERAHIMYTSSSVVSRNSMSSQQCLSLTIMNIVNPVEPMLTKIEIPTHASADAW

SEQ ID NO: 280144 - protein, 90 aa, Zea mays
  unsure (1)..(90): unsure at all Xaa locations
  Clone ID: MRT4577_187069C.1.pep
WPHGPDQVLKDGFKDRTDKDKGSLENPCRLAQEVTXAAGDKLGTDEDRIRVQPFASYYEAPDSNPDDMGLDSGKSXDEEGMLYCHMREAY

SEQ ID NO: 280145 - protein, 726 aa, Zea mays
  Clone ID: MRT4577_18706C.1.pep
LGTSRPAGIAAAAAPSAMPRDEREVVVVSGAPDGVVWVAQLSDLHFSVHHPERAYDFRRYVGPALAMVNPDLVLITGDLTDGKSKDLLTMKQNEVEWVEYESTMKEIIENSKLPRRIFYDMRGNHDSFGVPASGEDYDFYSKYSINAKLRRQGRVQSITLENSGRKHLFVGFDSTMEIGLRGPTNLFGHPTDKQMIELDQALSQWNTDFDKVPVTKIAFGHFPLSFSALTESGKSIKDVFLKQSLAAYLCGHLHTRFGKNLKRYYHRAVQESSLSEHYYQHNMHQGDAFQGNKENCSEEASHIEEFWEWEMGDWRKSRSMRILAIDDGYVSYTDIDFRLGSKSIIILPTFPLDSRFMQRASAFRDFKCHVMGASSFDTVRALVFSKHEIISVSVKIYDSRPGTLEIVFDSEMKRVDSNETRGNMYLIPWNWRAFEDSSPSRYWLQIEVMDITGDTSVSQLRPFSVNGLLARVNWTWKEFFVIGIQWASIYHPALWCAFSLIFSLLLVPQVLAVVFKDRFTYKSLCAYGGQRTLLKSLVGGFICCFVELARLVLVWLLLLLYAIYLVFIPWLFGHPITEDGSLTYMTHKGWILKGPSSSNEVVHAGIPDVMVIVLPHLCFVLVPTIVILAAMAAERTAYREHYLSRSGKKKDDYRKSRRQIEHENFWNGRWISKFLCLLCVVVLCKHWKLCRALVKAYAMNPLLHAPVLFFFVPLLMVFAIYKTRSI

SEQ ID NO: 280146 - protein, 86 aa, Zea mays
  Clone ID: MRT4577_187070C.1.pep
RGGVFFCFPPPQNKKVFGGRPLIAHRRILCKKNIFFFSAPPTEGRKKKKKGGRFRWCNYTREGGQTFFFFFFFPPGGGVLYINPPP

SEQ ID NO: 280147 - protein, 159 aa, Zea mays
  Clone ID: MRT4577_187071C.1.pep
RCGFRRKFNSLCSNELSLFLNLLIKFRFWCTPAKFFCNLITVCKQAVLDNLPTRNAALKLVNVERSFAEKHYADLASKPFFQGLVDYIISGPVVAMVWEGKSVVTTGRKIIGATNPLASEPGTIRGDFAVDIGRLDLSPIFVSYGFQSPLFIHWLCLVA

SEQ ID NO: 280148 - protein, 100 aa, Zea mays
  Clone ID: MRT4577_187072C.1.pep
MVAAKSGIAVGINKGHITARRELKAKPSNKIGASKRTTFVKSIVREVAGYAPYERRLMELIKNSKDKRAKKLCKSKLGTFVRAKKKIEELQGVIAASRRH

SEQ ID NO: 280149 - protein, 62 aa, Zea mays
  Clone ID: MRT4577_187073C.1.pep
DGDAPAGPAEVDDRGSPGRRSTPFTLPPPIDSVLPSIRHWEMCAGCCDKPNACASISEWCDV

SEQ ID NO: 280150 - protein, 47 aa, Zea mays
  Clone ID: MRT4577_187074C.1.pep
LTLKIESNRFKVQNLKNPFFTIRFLYHNSFFLFYNSFFLYYNLAINV

SEQ ID NO: 280151 - protein, 119 aa, Zea mays
  unsure (1)..(119): unsure at all Xaa locations
  Clone ID: MRT4577_187075C.1.pep
PRAARDRARGMASDWKEAAEKKGGVDGAKPPYSHSFLQLVSTFAAPQREDSPLYRXLFVSFSCLRQIPLLALTLLLXNKWPLLFEELIAIRQYFVAVNLPYDAGLXEKFLTVFLLKFYL

SEQ ID NO: 280152 - protein, 132 aa, Zea mays
  unsure (1)..(132): unsure at all Xaa locations
  Clone ID: MRT4577_187076C.1.pep
SSTSRPRXKSLWILVRRLLRRSRNPPPSASAALEDGEGEKSGLXSRSSLEQLLVMTDDCAPGDDGDGDVCWCAKKPHGQPVAVLLPALARPEASAAAVPSAGAAHRRFVFGGSRRRLLIRRPWRPMLVAIPE

SEQ ID NO: 280153 - protein, 143 aa, Zea mays
  Clone ID: MRT4577_187077C.1.pep
YNDIILKLEFIEFLHFFVTSRSNTIVIFNLEFHVFLPFHIELSQKLLSLAFAMEWEENKILEPRPPFLHVLYTLNWPTLLSFFSPCNCLPLFFGKGEIAHELSYLVYSGVFTELLQQMQLKGLQVSNQLSSLYESMFLLKVDG

SEQ ID NO: 280154 - protein, 173 aa, Zea mays
  unsure (1)..(173): unsure at all Xaa locations
  Clone ID: MRT4577_187078C.1.pep
MARPQQRYRGVRQRHWGSWVSEIRHPLLKTRIWLGTFETAEDAARAYDEAARIMCGSRVRTNFPEDAGXAAAATGSSSSRXPSLLSPALVAKLHRSNLASAQAAQGKADASAAAAAALPRVAAAVPAGMGVSASPSASASAAGDWSGGLLEEQYVDQMIEELLDSNFSMEISY

SEQ ID NO: 280155 - protein, 124 aa, Zea mays
  Clone ID: MRT4577_187079C.1.pep
WTSRCLAAAGQANFVNRGGFRRPNFGNSFHQNGSYDQPGRGRQDFNQGSSGRHTGRGRFGYSVGDQFSYRTVESNPVLATPGLAPADAVAQAVALLTQVISIPQPVVDHGKAESSGQAEKGPVG

SEQ ID NO: 280156 - protein, 59 aa, Zea mays
  Clone ID: MRT4577_18707C.1.pep
TYHHFKPSRVYHIQLVTSEKTLLKDEDLLKRFNSFNNCIKHFYKIVNVLTIIYNIRYKL

SEQ ID NO: 280157 - protein, 87 aa, Zea mays
  Clone ID: MRT4577_187080C.1.pep
AAESSDPIAIAKGINTMPPGMPDVLILTGLTLLFWVPFMLFDTDRMGLEIYHGTLNDSQKDVAQAQDGLRQGALSLLLNVRALGARS

SEQ ID NO: 280158 - protein, 158 aa, Zea mays
  Clone ID: MRT4577_187081C.1.pep
WVPRAGREALRAPAGRTERGELWARLERSYQVVHCISPFVFPFFLTSLCETMLFVRPRRAERWERYTRFVLIPPSPTVFSIHLAETWPRVDIVSSCSDRWFPLDLDVYWDASIPRNRAILLLLALWPWIPFLRLGKVLLAAHFALHGSSVKDLVLQLL

SEQ ID NO: 280159 - protein, 118 aa, Zea mays
  unsure (1)..(118): unsure at all Xaa locations
  Clone ID: MRT4577_187082C.1.pep
XSLSRGMLEVGGVRVHPSGRWPMERTPTFVAPELESPASTSSKSLDGTTAGDVLLVGAPFVMISTEENDEPLVFGTCAXTQFVDGVAVAVNVWAALLVCVRFEVFHVLMVPFGFVFFS

SEQ ID NO: 280160 - protein, 65 aa, Zea mays
  Clone ID: MRT4577_187083C.1.pep
MPSGVLAQVHVEACRPLLRQRKGLSALLDAVPVGCTGILLSIKYMHEVPACLNRPFFFLLPGARS

SEQ ID NO: 280161 - protein, 129 aa, Zea mays
  Clone ID: MRT4577_187084C.1.pep
YLCVFFSSFDPIFFSLSCFVFFDRAMILKTGHTIFFRNGGIINFSISQGVIHLFKNWLWEACKNMNFILWFQKWAWFFHKQGQTFRKHACPTFLLPFHKKASLRFFLFGTFYFKNELAGDKFSRTDGEF

SEQ ID NO: 280162 - protein, 78 aa, Zea mays
  Clone ID: MRT4577_187085C.1.pep
GDPSYPGGPLFNPLGFGKPQKKMNKLKLKEIKNGRLPKLPILGYFIQGVVPGVGPFQNLFDPLADPVKKKGFPSLKFP

SEQ ID NO: 280163 - protein, 141 aa, Zea mays
  unsure (1)..(141): unsure at all Xaa locations
  Clone ID: MRT4577_187086C.1.pep
HEAVGVALLLGLLWWKSQTGNEAQLRDQVGLIFYICIFWTSSSLFGSVYVFPFEKLYLVKERKADMYRLSAYYASSTLCDAVPHVVXPVLFMXILYFMAGLRRTVPCFFLTVLXXLLIVLTSKGTGEXLGAXILSVXKAGV

SEQ ID NO: 280164 - protein, 58 aa, Zea mays
  Clone ID: MRT4577_187087C.1.pep
SLHLFSVKNRQKRELSHFTPQGFFPPLKIVFFARQKKKNNFKQQVNKQPKKKEIKNKV

SEQ ID NO: 280165 - protein, 321 aa, Zea mays
  Clone ID: MRT4577_187088C.1.pep
MAFTALSLLYHLSITVSLVLARGIIIAGVVDIAPRPTPLPLPPQPLLAPSPTPRPPGLGAPTRTPPLPLPLPSPRPPRTPPTTTPLPRPWLGAPSPARVPRPPRLGAPPRTPVLPSPRVGAPSPAPPPVRPPQLGAPLPTPVAPTPQLEDPSRGPILPRPPLKGVPPSTPPLVAPRLGAPLPSPPVPSARKGTPPPPPQFRVPIRSPVIPPPQKGIPPSAPLIPAPRLGVPLPSPPVQQPPRTPILPPSRKGAPPSIPPLSPPKLGAPLPSPLLPPPRLGAPPRTPILAPPPQVRAVFPSPRSPPPRLGAPLPTPLLPPQY

SEQ ID NO: 280166 - protein, 201 aa, Zea mays
  unsure (1)..(201): unsure at all Xaa locations
  Clone ID: MRT4577_187089C.1.pep
MHFRGSSIYFGIVALSSTSAVLGAVAPYGQCGGNGFQGETECAQGWSCVKSNDWYSQCINGGGNAPAPPAATGVAPAPVIPSAAPVPSMNASEPVAXPVAVAQPAATGGANGSAPDVAGTGANGAKCSLDAAFKSHGKRLXIGVATDQGALSKGKNKEIIVANFGQVTPENSMXKWDATXXGTEGKFTXLDGANALVSFCT

SEQ ID NO: 280167 - protein, 60 aa, Zea mays
  Clone ID: MRT4577_18708C.1.pep
IWEVWLCGATPISSSLHREFPREGYQFLYGFKFVICPKGVSNSHHHSSNGIKKKKKKGAL

SEQ ID NO: 280168 - protein, 127 aa, Zea mays
  Clone ID: MRT4577_187090C.1.pep
MQKVPATTSSKLQTMVDSAMDAARIIGYFKDKTILVTGSTGFLGKILVEKILRVQPAVRRIYLLVRAADEPSAQQRVQQEVTGTELFSLLRDKYGEEGFDLFIRDKIVPLAGDITNQDLGLEPTTLD

SEQ ID NO: 280169 - protein, 769 aa, Zea mays
  Clone ID: MRT4577_187091C.1.pep
MLVALLCLLACCAGAGAAGAAAPNARPCASPYSASAYPFCDASLSIPARARALVSLLTLDEKIAQLSNTAGGVPRLGIPPYQWWSESLHGLADNGPGVNFSSGPVRAATDFPQVILSTAAFNRSLWRAVAEAVATEALGMHNAGQAGLTYWAPNINIFRDPRWGRGQETSGEDPAVAAAYSLEYVKGFQGEEGEEGRIRLSACCKHYTAYDMEKWEGFSRYTFNAKVNAQDLEDTYQPPFKTCIQEARASCLMCAYNQVNGVPMCAHKDLLQKTRDEWGFQGYITSDCDAVAIIHENQTYTKSGEDSIAIVLKAGMDINCGSFLVRHTKSAIEKGKIQEEDIDRALFNLFSVQLRLGIFDKPSNNQWFSQLGPNSVCTKEHRELAAEAVRQGAVLLKNDHNFLPLKRSEVRHVAIIGPSANDAYAMGGDYTGVPCNPTTFLKGIQAYATQTSFAPGCKDASCNSTDLFGEAVEAAKRADIVVVIAGLNLTEEREDFDRVSLLLPGKQMGLIHAIASVAKKPLVLVLLGGGPVDVSFAKQDPRIASILWLGYPGEVGGQVLPEILFGEYNPGGKLPITWYPESFTAIPMTDMNMRADPSRGYPGRTYRFYTGDVVYGFGYGLSYSKYSYSISSAPKKITVSRSSDLGIISRKPAYTRRDGLGSVKTEDIASCEALVFSVHVAVSNHGSMDGSHAVLLFARSKSSVPGFPIKQLVGFESVHTAAGSASNVEITVDPCKQMSAANPEGKRVLLLGAHVLTVGDEEFELSIEL

SEQ ID NO: 280170 - protein, 148 aa, Zea mays
  unsure (1)..(148): unsure at all Xaa locations
  Clone ID: MRT4577_187092C.1.pep
MEPTEKGRTSPTKNRKKRGQRQPPNWDKKKPSLGGPNRGEMGGRQGPPPKGQGAALGPPPDREEPEGGPGPNQGGGGPQGGPPPXGDGGPPHRPPPWQTMKRGYPRAKRGEAPGPQGPPGACGGTMGAGPKTKPPKKKAPRPGGGGGG

SEQ ID NO: 280171 - protein, 185 aa, Zea mays
  Clone ID: MRT4577_187093C.1.pep
MDSEHWISRLAAAKRFYAAQLGHSDRAGMDELEMDEEVRPEFPCPYCYEDHDVGSLCAHLEEEHPFEPLSLLSRDLREAHLQVLLGGGGQRSSDNSSSSSATNISADPLLSSFGLGFPTSDAEQASKSTVSIPDDATTVKEAPAQARKLSIDSSLTSEERELKRKQARVRATFVQDLLLSTLFGD

SEQ ID NO: 280172 - protein, 84 aa, Zea mays
  Clone ID: MRT4577_187094C.1.pep
RLESDFCASPVPANNSGHILSCQAIARCQMFGSCLSLDLVLMRYLCKFRRRANLVVIPNWPRVLPLAPRYNVHANLGKICSHFM

SEQ ID NO: 280173 - protein, 162 aa, Zea mays
  Clone ID: MRT4577_187095C.1.pep
MDSEHWISRLAAAKRFYAAQLGHSDRAGMDELEMDEEVRPEFPCPYCYEDHDVGSLCAHLEEEHPFEPQAANRRRLRRFIIPGSQALSLLSRDLREAHLQVLLGGGGQRSSDNSSSSSATNISADPLLSSFGLGFPTSDAEQASKSTVFIPDDATTVKEAPA

SEQ ID NO: 280174 - protein, 78 aa, Zea mays
  Clone ID: MRT4577_187096C.1.pep
MDSEHWISRLAAAKRFYAAQLGHSDRAGMDELEMDEEVRPEFPCPYCYEDHDVGSLCAHLEEEHPFEPQAAYRFVAHK

SEQ ID NO: 280175 - protein, 229 aa, Zea mays
  Clone ID: MRT4577_187097C.1.pep
MDSEHWISRLAAAKRFYAAQLGHSDRAGMDELEMDEEVRPEFPCPYCYEDHDVGSLCAHLEEEHPFEPQAAACPVCSEMVTKDMVNHITTQHGYLFKNRRRLRRFIIPGSQALSLLSRDLREAHLQVLLGGGGQRSSDNSSSSSATNISADPLLSSFGLGFPTSDAEQASKSTVSIPDDATTVKEAPAQARKLSIDSSLTSEERELKRKQARVRATFVQDLLLSTLFGD

SEQ ID NO: 280176 - protein, 72 aa, Zea mays
  Clone ID: MRT4577_187098C.1.pep
GGCARVPGNLTRLSSLSTGTHHPKDLPHNRYITVITFDTHTLKIERKTFTKYTLHSRTQVLHGRKRCIYYKS

SEQ ID NO: 280177 - protein, 155 aa, Zea mays
  Clone ID: MRT4577_187099C.1.pep
MDSEHWISRLAAAKRFYAAQLGHSDRAGMDELEMDEEVRPEFPCPYCYEDHDVGSLCAHLEEEHPFEPQAAACPVCSEMVTKDMVNHITTQHGYLFKNRRRLRRFIIPGSQALSLLSRDLREAHLQVLLGGGGQRSSDNSSSLPCLLRDGYEGYG

SEQ ID NO: 280178 - protein, 34 aa, Zea mays
  unsure (1)..(34): unsure at all Xaa locations
  Clone ID: MRT4577_18709C.1.pep
DERXXLILXIQLPSFIHSSSXLTKHVLPSIYFFT

SEQ ID NO: 280179 - protein, 59 aa, Zea mays
  Clone ID: MRT4577_1870C.1.pep
VGVTPNRPKIFDIYVSDYFALSVAFKLGHRYVAPSGYYAGQHQGANCRSAAEPSHLQIY

SEQ ID NO: 280180 - protein, 101 aa, Zea mays
  unsure (1)..(101): unsure at all Xaa locations
  Clone ID: MRT4577_187100C.1.pep
SGEAYTRYEPVGERGAYEAWVDVNRVALERLDTMVGVPTDPQIXERYNNGAGEGAKRVNDGGIYQPLIPREGLARGIRDQGADAVVEERGGDDCSRGTDEW

SEQ ID NO: 280181 - protein, 121 aa, Zea mays
  unsure (1)..(121): unsure at all Xaa locations
  Clone ID: MRT4577_187101C.1.pep
GTRXADPAPQNGRXXARXGXGXGGKAKXXPKKGAKTXTXXDRPRXRPGAXAPDDQNGXXXGDHGXDPXXXGKPXEXXQXEXDPXDQNXAKXEAGGXNGTRXEAXEXKXTXXQPNSEXXGPQ

SEQ ID NO: 280182 - protein, 80 aa, Zea mays
  Clone ID: MRT4577_187102C.1.pep
KELLNPIFALKKTLVDPRPGPQLLKHDWFRPWGGPKIQKNPLFFFLHRAKKGRPTRGGGDQNPPPPRRKKDKTRPKSPPP

SEQ ID NO: 280183 - protein, 32 aa, Zea mays
  Clone ID: MRT4577_187103C.1.pep
LSRGQARPNHFHPLPPTYYRIHTSASILHSAD

SEQ ID NO: 280184 - protein, 63 aa, Zea mays
  Clone ID: MRT4577_187104C.1.pep
QSCPFVHHVSVITSTAFVFPSLVSVRTAGVFFSLRCLCFSVYKSFTLFQLILLLFSLNDQINL

SEQ ID NO: 280185 - protein, 86 aa, Zea mays
  unsure (1)..(86): unsure at all Xaa locations
  Clone ID: MRT4577_187105C.1.pep
LFXQEKGVATFFXGQSXKALQFIYRIVXTAKIAYSDSSKKRXKIDVVLAKQLVLRATLXXNXVLSYYRFELXGVXSSNACMAXSXG

SEQ ID NO: 280186 - protein, 66 aa, Zea mays
  Clone ID: MRT4577_187106C.1.pep
KRGWAAPRGRSRLPLEFFFPKKKKKRTKQEKKKKKKNKKTKKKKKKKKKKKKKKKKKKTREEGAGT

SEQ ID NO: 280187 - protein, 181 aa, Zea mays
  Clone ID: MRT4577_187107C.1.pep
DGDDPQAAGGGGDTGALLASVRRLLLSEAPAAAEGDSEEEQGQFPKRWAIVFLCFSAFLLCNMDRVNMSIAILPMSAEFGWNPQTVGLIQSSFFWGYLLTQIAGGIWADTVGGKTVLGFGVVWWSIATALTPVAAHLGLPFLLVVRAFMGIGEGVAMDHQTTPKPRTVFPPTVSAHIPPAI

SEQ ID NO: 280188 - protein, 76 aa, Zea mays
  unsure (1)..(76): unsure at all Xaa locations
  Clone ID: MRT4577_187108C.1.pep
DHGXIVNRPNFTLSPSIVDDIPDLAQSISNRFXVKMICTKGGREKFGDKVCSPFDPDDEAKVDDQKYRRSRSPLEI

SEQ ID NO: 280189 - protein, 66 aa, Zea mays
  Clone ID: MRT4577_187109C.1.pep
FSGIRKKCEVQDHTAHNQSFKGHKNAINIPKRHRQISTKGMDPKIMRNLMYSRKGNKKSGEAEADV

SEQ ID NO: 280190 - protein, 64 aa, Zea mays
  Clone ID: MRT4577_18710C.1.pep
SRRVVLIGPSIKLEHTSSFSACGGATTGLGQPQIGRRQRFHQPADAPPPPLRAPATRSSASKVT

SEQ ID NO: 280191 - protein, 80 aa, Zea mays
  Clone ID: MRT4577_187110C.1.pep
AQAAFQSNGWESPVHPNYQCWWAIQQRSYSEFQECKALPPKIYVSSAQACCFDAIFTIAGERWLPCVSFKTDCVLVVSSR

SEQ ID NO: 280192 - protein, 64 aa, Zea mays
  Clone ID: MRT4577_187111C.1.pep
MRPALLKSTAELLRRNRGYASSANPERKVAILGTAVGIGHPLSLLMKRNPLGSSLSLYDIAGTP

SEQ ID NO: 280193 - protein, 45 aa, Zea mays
  Clone ID: MRT4577_187112C.1.pep
SPAVLDNNVGGSKGFFLSSVVRSGPIENYRWSTDKCLFFSLFPCE

SEQ ID NO: 280194 - protein, 96 aa, Zea mays
  Clone ID: MRT4577_187113C.1.pep
GRTKGKRLQSKTGGSKRGPWLYFHPGQGQTIRRREVQLVSGAKKNPCYFCWGLEIGTLECLVWNNGAKNILQNKFTNGEFFHLLLVSKKASGQASL

SEQ ID NO: 280195 - protein, 87 aa, Zea mays
  Clone ID: MRT4577_187114C.1.pep
MGNAESFQPCPFELATYSATNTKGGLPALVGPPRDITHPFSQIHSNAGHIYFRLNHWGNATNNNNLHQTWLVGLNNGPHRAGKYWGS

SEQ ID NO: 280196 - protein, 67 aa, Zea mays
  Clone ID: MRT4577_187115C.1.pep
GGRVGVWCSPPLEVLGLFLLVWVGSSRLIVRTLVLFVGLDANQWNEYCCCSKTKRLAGFLVLDVSSG

SEQ ID NO: 280197 - protein, 95 aa, Zea mays
  Clone ID: MRT4577_187116C.1.pep
LTLRRSSVPFQPSPAAHSTPKLWGSPAWGSDGGLLLDFVFSSPSLQRIWRPETRLQVGGCSPFTKPTTVTKAYNTGQYCPSFLEHQMTQTVSDTR

SEQ ID NO: 280198 - protein, 335 aa, Zea mays
  Clone ID: MRT4577_187117C.1.pep
MLTGRRIREPLPKSATIHDIKIVQFRNGLEGRASQMSSVQVLLNSKDLLDTEPEGIRELISSCKVGNATKSKLRKVAEWIIHTKCALGESHHQMQVVSKNWKLAKENESAHFLSISELISQRKLCNINIFACIGKMVLVSSPTSPLKVNLSVIDRRSFKEHSDIVRDLVTAGCKLCGSPLYHKNLHEENTFALDCPNNPKYLHVPGQIYRPFLIYIYDQSGQVPLLVRNRAAETLFANITADDVSECHNSHMLSETYESCNLSTPGTVDDCGNKEIAKRRKTEQKPNFYLIWLTLVKCLLSQGSNSPFCFQISVNPEKNVEDGRFELVCLTMPIP

SEQ ID NO: 280199 - protein, 80 aa, Zea mays
  Clone ID: MRT4577_187118C.1.pep
RVTNVTNMYIAAQCAHQDLKITTEIDRAGRLGRDAMEVRHPHVSAFAFSSALRTMTSILATTSAIRGRRYRQVVGAFHGE

SEQ ID NO: 280200 - protein, 238 aa, Zea mays
  unsure (1)..(238): unsure at all Xaa locations
  Clone ID: MRT4577_187119C.1.pep
GTPGSARXWLDFPLFVXERYADDFELSDAQYVHALSVEHLVPGLSDLKAQICSTDMTEACFWKIYFVLLHSKLNKQDAEVLSTPQILEAREQLLQSLGSEKKRGSKFPDESSAESSSASSAPAEEKVIQPPVIQDKAGTXTNDRPKNLLKXSEKFPVSTTEVEMVDKSVVEEELTVANESKTSPVKSKLPYEADEEEEVDEWPDDDPTDEAGHRTLLGREEEDVSFSDLEDDEDDDRR

SEQ ID NO: 280201 - protein, 162 aa, Zea mays
  Clone ID: MRT4577_18711C.1.pep
MALEPVARAVAEEVARWGAMRQTGVSLRYMMEFGVRPTERTLLLAAQFLHKELPIRIARRALDLDSLPFGLSTKPAILKVRDWYVESFRDIRSFPEVKNQEDELAFTQMIKMIKVRHTNVVPAVALGVQQLKKDLGGPKAFPPGIYVIKVTVWQCFLFKMKE

SEQ ID NO: 280202 - protein, 194 aa, Zea mays
  Clone ID: MRT4577_187120C.1.pep
SGIPGSTHASGKIYYVLLHSKLNKQDAEVLSTPQILEAREQLLQSLGSEKKRGSKFPDESSAESSNASSAPAEEKVIQPPVIQDKADAWEKSSSEEPSETVSEKFPVSTTEVEMVDKSVVEEELTVANESKTSPVKSKLPYEADEEEEVDEWPDDDDDPTDEAGQAAGDRTLLGREEEDVSFSDLEDDEDDDRR

SEQ ID NO: 280203 - protein, 87 aa, Zea mays
  Clone ID: MRT4577_187121C.1.pep
SDTLVLNCIFFKGAPHHFLSFYACIFVFISFFFFFYFFFIFFFFFYFFFFFFFFFSFDTIQIHSHTRICPSHLYNFTHTKHSKSEAG

SEQ ID NO: 280204 - protein, 64 aa, Zea mays
  Clone ID: MRT4577_187122C.1.pep
PRVAVCVRWFCSRVLFGVCGGLSCSRQLWGAAVSSARRLRRVCTMYRPWLAVPRPQGLIIGVAP

SEQ ID NO: 280205 - protein, 55 aa, Zea mays
  Clone ID: MRT4577_187124C.1.pep
LCTSPCHCPCISIGGITIDILVHEGWRRLSKGRLSAVFGGRDSVCVCAMVRARFG

SEQ ID NO: 280206 - protein, 62 aa, Zea mays
  Clone ID: MRT4577_187125C.1.pep
KVLAQENFNDQPVPAQTALEIKFTDDLADPDVLAPENCNAPAVPPPTALEIKFTDDLFDPAP

SEQ ID NO: 280207 - protein, 50 aa, Zea mays
  Clone ID: MRT4577_187126C.1.pep
PRIFHVVKLLITNIAHAPVRLKVWFKNALNRGQLNIQERKRHLILQFPEY

SEQ ID NO: 280208 - protein, 69 aa, Zea mays
  Clone ID: MRT4577_187127C.1.pep
IFFFLFFKFSYLGGFFVVYKSYSLKFNPGVPPGNFGPVPGGGQLFNNVGLIKLGPKNGKKEVRGEKCFP

SEQ ID NO: 280209 - protein, 104 aa, Zea mays
  Clone ID: MRT4577_187128C.1.pep
MRGRGGPVPPAVSPRPVTASAFGKMEGDDLSSLSPSPVPYIFGGGLRGRKPPAMEKVVERRQRRMIKNRESAARSRQRKQVNTFVGGFCLYLVVSIRHVSCLYY

SEQ ID NO: 280210 - protein, 79 aa, Zea mays
  Clone ID: MRT4577_187129C.1.pep
ESRCRSDVSHPCMDHTNNNHAVLFVGLGTTRIAIYIHAHSDGTCPLGRTTLYRHTQPAHRLSISQVHHDRQSGSAQMCV

SEQ ID NO: 280211 - protein, 78 aa, Zea mays
  Clone ID: MRT4577_18712C.1.pep
RINQFSGRVSLHTLYSLSVKLGSSRACTGTPPAQFKTGLPPGTRTTGVAGFKLPGQPKFIFPFLATRKGMGLNNPRAG

SEQ ID NO: 280212 - protein, 227 aa, Zea mays
  unsure (1)..(227): unsure at all Xaa locations
  Clone ID: MRT4577_187130C.1.pep
MPKPATANRRRKRGGGGGGEGGAADEQASSKRRPATSVLTSLDVNDAPRPELPLFQLSRPRQQAEQDDEEEEVTGGGGGGGAGSLLSSAVNGHGQSPHQQRRLWVKDRSRAWWEQCSSADYPXEADFRSAFRMGRATFAMLCDALGAAVAKEDTALRAAIPVRQRVAVCVWRLATGEPLRLVSKRFGLGISTCHKLXVLEVCAAIRXLLMPRFLRWXDDAARRGVQV

SEQ ID NO: 280213 - protein, 102 aa, Zea mays
  Clone ID: MRT4577_187131C.1.pep
LVFQDKTVQAGYASSPWSFWPVVIKWNGCACCCMGGCPCRRVSKNSWSISFSPYLFINFSFREVFSFHIAFCSNKKVTCAFDWFKKKKKKKKKKKKKKKKMD

SEQ ID NO: 280214 - protein, 81 aa, Zea mays
  Clone ID: MRT4577_187132C.1.pep
HHQQQHKTITWNNTTLVFVRRCPLDEYPSTEHLLNLTIFRLVHQLHPADLARAWGRLGSSSASHDYLSYLMRCTMHMYEHK

SEQ ID NO: 280215 - protein, 248 aa, Zea mays
  Clone ID: MRT4577_187133C.1.pep
VRLLIPALSLLHMARALTQLFPFQQLSTPSLPILAHLCPPWSAYFSSPLSSMVRPGTPTSSSITRTLSSSSVELVPARAFSCVQPGARSFSARGAPCLLGHGETLPAMDSGVPLLVLMDAVELPAHGHLLCSPARVLELSMAPICACPWSRAVAQLSLCSIAATARVLVGVLSSPDRSFSCAHRFPSSDFASHRCPIRVSTRPWSCSSSLPTLCCRFDYRRCCVSRCVLTFDVELLKSSSLARDFNVV

SEQ ID NO: 280216 - protein, 114 aa, Zea mays
  Clone ID: MRT4577_187134C.1.pep
TSTVNLRMSRNLAALVQDFLQHVSPLRSLLVQVRFDLLRACLALRHHSWGGYAGDDGEDVDEVDEAARLGEAAQRPGQSRHAGAAAADRHVHVVGDRDAPRRPTRPPTRPPTRP

SEQ ID NO: 280217 - protein, 90 aa, Zea mays
  Clone ID: MRT4577_187135C.1.pep
RLEQINTCSPEKILGGAYLTQTHQWKPGRKAEARGPVSNIDYPSVTTETSSPKQGGAGLLCKNYGGIFPKWVPGLWPSVQPQGVPCRGGS

SEQ ID NO: 280218 - protein, 206 aa, Zea mays
  unsure (1)..(206): unsure at all Xaa locations
  Clone ID: MRT4577_187136C.1.pep
MAEAGGGGVDQDAGSLPSHTNGVGGGGSSTWEIEELEPDDGRPPRSVPVADDVYVAVGSGGSSMAALSWALRRLAKPRSFVYLVHVFPVVTSIPTPLGMMPXAQASPEQVETYLNQERSKRRDMLQKFLDQCREIQVTVDVYLIESDQIANAIIELVPVLRISQLVLGVSKSNVRKLKKGTTIAGQVHKGAPLYCEVKISSATPKR

SEQ ID NO: 280219 - protein, 40 aa, Zea mays
  Clone ID: MRT4577_187137C.1.pep
PYNNSPFICTVVHGLPGDCTRKMSNRFMYFWRYARIDMRS

SEQ ID NO: 280220 - protein, 130 aa, Zea mays
  Clone ID: MRT4577_187138C.1.pep
QLFPPPPPFFFFFFFFFFYHPPGPPLKGANSTPLAAITRGSLLTNNVGKIKIIVFFWKKFFSHKNSQQNNSRKKKGKTRGPLKGGPPHIYWGAPTGLFTRKKPVPPALLNNPPPPEKRAFYYRAFFLFLD

SEQ ID NO: 280221 - protein, 62 aa, Zea mays
  Clone ID: MRT4577_187139C.1.pep
MEYCYQYNSVSNAEKEKRPPLRRGGVKLQIVKTLSNLVVAPSNGSDSKQADRNSFTRERSYN

SEQ ID NO: 280222 - protein, 105 aa, Zea mays
  Clone ID: MRT4577_18713C.1.pep
GGPSLTLGCPPAVQVFGTGAVLETLSSSRTVPFASFRELHSSWPAHYLLFAAAATAAPVSQPALDEEYDRDRAWHGAHGVHAQRHCFPPTASRFCIGTDTTTMEE

SEQ ID NO: 280223 - protein, 94 aa, Zea mays
  Clone ID: MRT4577_187140C.1.pep
VGPGRPGYPVRCRDVYPSPGGLSAFVAFVGARMCFCLQGRSVWFVSSVFIWGCRGPMHRPAWPVDRWMLLLRVRICSEFSNQKMVFLPAGEGKA

SEQ ID NO: 280224 - protein, 34 aa, Zea mays
  Clone ID: MRT4577_187141C.1.pep
RCCRAVSNPDLVRITARAQGCHGAILRAQSKYCK

SEQ ID NO: 280225 - protein, 89 aa, Zea mays
  Clone ID: MRT4577_187142C.1.pep
PACTLWSCPRRPPARVLGRAWPSARAPSPGVFASPASASPPSCPWPSLVVAVPLCLRVGELRPPALRWDAAAGRGPCPVATASVAAALV

SEQ ID NO: 280226 - protein, 98 aa, Zea mays
  Clone ID: MRT4577_187143C.1.pep
LLLMSCGLYKGRPTQLHWQYAHLQKRKEATELINFLQDRQEGGGQNAKELSVSAPFDKHPWPPLLVPLLAPSDPLTDHSCCGSCCTVMYVLLYGARYL

SEQ ID NO: 280227 - protein, 156 aa, Zea mays
  Clone ID: MRT4577_187146C.1.pep
HACVYRAAITRSTSAFVPSWRTISRGRCLPMRVSHWRTFRGSHRIPNDPGGAVFSATKERDRRHPKGLTRRGRLCWCRPMRARPFVRASLTRSEHCSRLPYTVPHDLLKCSTATTCSASGRSMQIKPEIPTLNLIKHATALQMYEAIDSRTNITWC

SEQ ID NO: 280228 - protein, 121 aa, Zea mays
  Clone ID: MRT4577_187149C.1.pep
MQIFVKTLTGKTITLEVESSDTIDKEGIPPDQQRLIFAGKQLEDGRTLADYNIQKESTLHLVLRLRGGIIEPSLQALARKYNQDKMICRKCYARLHPRAVNCRKKKCGHSNQLRAKKKIKN

SEQ ID NO: 280229 - protein, 109 aa, Zea mays
  unsure (1)..(109): unsure at all Xaa locations
  Clone ID: MRT4577_18714C.1.pep
GGVEQVVYDDLLSGDELLGAPFTYKEXLENGVLGXVQGKWVTQGPVDVDIGANASFEGGEDDSDDDTAVKVVDLVDTFLLQEQPPFDKRELGSYIKEYIRNLSAVFEPE

SEQ ID NO: 280230 - protein, 129 aa, Zea mays; identical to SEQ ID NO: 271239
  Clone ID: MRT4577_187150C.1.pep

SEQ ID NO: 280231 - protein, 129 aa, Zea mays
  unsure (1)..(129): unsure at all Xaa locations
  Clone ID: MRT4577_187151C.1.pep
VLIWLCYRCLDIESHLVLRFSSSRHQAATWKVRYLIRQRNAQKHNSSFDRPLHPKCNTLIFDGVGFLIHGKISFCSKFSNIVKHGGGQVFISLQGLVQSLKDGSTSRGIILIANAASASRHLTXLWFGA

SEQ ID NO: 280232 - protein, 64 aa, Zea mays
  Clone ID: MRT4577_187152C.1.pep
SLFLFHVSYHLFAAEFFYQPASGYSFLLFCTLSVLFSPSWQCSTDAIFSRNLQVLNKLYWVLLL

SEQ ID NO: 280233 - protein, 92 aa, Zea mays
  unsure (1)..(92): unsure at all Xaa locations
  Clone ID: MRT4577_187153C.1.pep
KRRNWKNLGLPKLNRFEKNPLFPSWGKTKKAQTNPLSKNLPTLNGKWNPPFTGXINPGGGXVTPRVTFTFASALTPVLLVFFLSFFPTFAGF

SEQ ID NO: 280234 - protein, 72 aa, Zea mays
  Clone ID: MRT4577_187154C.1.pep
LKLNLVICNREPRGFGFIQYYDPEDAADAKYHMDGQILFGREVTVVFVEENRKKPSEMRARERVGSRDLSYD

SEQ ID NO: 280235 - protein, 129 aa, Zea mays; identical to SEQ ID NO: 271239
  Clone ID: MRT4577_187155C.1.pep

SEQ ID NO: 280236 - protein, 131 aa, Zea mays
  unsure (1)..(131): unsure at all Xaa locations
  Clone ID: MRT4577_187156C.1.pep
KRGDGKNLGFPKLNRFEKNPLFPSWVKTKKAPTNPLSKNLPTLNGKGNPPFTGXLNPGGGXVTPRGTFKFARALAPVLFVFFLSFPPTFAVFPRKFLKGGLLLGFQLKVLRPLPXKKICLGXDGSLRGPSP

SEQ ID NO: 280237 - protein, 129 aa, Zea mays; identical to SEQ ID NO: 271239
  Clone ID: MRT4577_187157C.1.pep

SEQ ID NO: 280238 - protein, 108 aa, Zea mays
  Clone ID: MRT4577_187158C.1.pep
TSNSACEVTDLPHYLRARVTKRGYAISSTHHNQHSGPYDLMSIIYTLKLKVLYDDYQRGILISEIIFAKLFRHPPCLIAHTLMDNGADRAHPDLYNLLTLPNYVTKSP

SEQ ID NO: 280239 - protein, 59 aa, Zea mays
  Clone ID: MRT4577_187159C.1.pep
CDRNAHIIEIHRSVHLKILLRLRKAYKLLSPAIHKYQHTFHKGHMVQKIKDTAHITCYV

SEQ ID NO: 280240 - protein, 41 aa, Zea mays
  Clone ID: MRT4577_18715C.1.pep
YLEAGRVKKSKKKKKKKKKKKKKKKKKKKKKKKKTSPTPPT

SEQ ID NO: 280241 - protein, 129 aa, Zea mays; identical to SEQ ID NO: 271239
  Clone ID: MRT4577_187160C.1.pep

SEQ ID NO: 280242 - protein, 129 aa, Zea mays; identical to SEQ ID NO: 271239
  Clone ID: MRT4577_187162C.1.pep

SEQ ID NO: 280243 - protein, 129 aa, Zea mays; identical to SEQ ID NO: 271239
  Clone ID: MRT4577_187163C.1.pep

SEQ ID NO: 280244 - protein, 134 aa, Zea mays
  unsure (1)..(134): unsure at all Xaa locations
  Clone ID: MRT4577_187164C.1.pep
LFDHSCAFRHAPAVSCVAENXQTIMALQLHLLVLPTISHIQSRTTFLPFSNTXQYLAFSQLLTLYPAAYXXQRLLPLIQLATGYSXSNMVLXCDHLAGLNHSGYFQEAILLPLAQLATTSPASFLSQQQLLAVY

SEQ ID NO: 280245 - protein, 64 aa, Zea mays
  unsure (1)..(64): unsure at all Xaa locations
  Clone ID: MRT4577_187165C.1.pep
CSFGHANTLVCALRLLILMDNFTIYTVCXFQEEDLDNSIGCKLLDTPEYMCHLFCCVLEQGSKM

SEQ ID NO: 280246 - protein, 42 aa, Zea mays
  Clone ID: MRT4577_187166C.1.pep
LMCVCQVNCFPTFLLSVVLSIGHHQNGVVTPRPSTSPRTAGR

SEQ ID NO: 280247 - protein, 41 aa, Zea mays
  Clone ID: MRT4577_187167C.1.pep
LVILPFNCYVLIVNSFTDLPVNFVPIKLESQFSMLRIQVSY

SEQ ID NO: 280248 - protein, 66 aa, Zea mays
  Clone ID: MRT4577_187168C.1.pep
DGKHGFNWPQGKGPCFSNPAIEKPGGGPKIPIFISGPTPLLNRKGFGPGEVFPPLCGTFVYGPPLP

SEQ ID NO: 280249 - protein, 62 aa, Zea mays
  Clone ID: MRT4577_187169C.1.pep
YQEVDYCSEEVRSVAPAGFGSHGGGVQQHVVKVKYEEVDTVSRAGANHNQHHHVTTAATASW

SEQ ID NO: 280250 - protein, 109 aa, Zea mays
  Clone ID: MRT4577_18716C.1.pep
GAIAVECIVAPVLQGRERNQAAIDENVEKLKKVLEVYEARLSQSKYLAGDVLSLADLSHFTIMHYFMATEYATLVKALPHVDAWWEGLAARPAAKKVAEFMPLGSGVPE

SEQ ID NO: 280251 - protein, 126 aa, Zea mays
  Clone ID: MRT4577_187170C.1.pep
APTSRATPSCPTPRRKEKPPARTKRTATLGAGGAIGKSKGQAGITALRAGRARNPNKRGEPPPYPPQASPLKVQGRKWGRRGGCERPRGHRWPERAPGQEGPPLGEAGAPPGSGPGHPGGPRRPED

SEQ ID NO: 280252 - protein, 102 aa, Zea mays
  unsure (1)..(102): unsure at all Xaa locations
  Clone ID: MRT4577_187171C.1.pep
MGEPNLQTLTYFINYYLIQPPISYXLTSIIHIMDFDFPYLTQFIRLYTITLYDFLNDNIXSPTPXPSNHIHDIDLHSHQTMYAPLLPLALPAPPMPDISLPT

SEQ ID NO: 280253 - protein, 122 aa, Zea mays
  Clone ID: MRT4577_187172C.1.pep
MSISNESFKHLCCYFIKSQRRATQKKQSIVTISAPLAPHPPPLRLEALKERYTYNEDRADDISALHLPLHPPQIGMILPRKAHDAGRRCLPASMSRSTKHRCRRPAYAKDSSRTALSQVPQQ

SEQ ID NO: 280254 - protein, 71 aa, Zea mays
  Clone ID: MRT4577_187173C.1.pep
NVQNLDLGRAAKIFFTPPPPLFLYGIRGGGRVRFLLGEFRQKLENQMPPHGPLGKSKKLGRFFIRTLSRSF

SEQ ID NO: 280255 - protein, 120 aa, Zea mays
  Clone ID: MRT4577_187174C.1.pep
MARASQNNMIAAARSTRSRLPSDPLTIASKMSTTRSASLLALLLLVSATAAAAGTSKGRAGVRPCQDLATRGQCAASGGCRWCRSEALDDMCFEAIEAWRLPRQVFSCDPPSGAAHARLN

SEQ ID NO: 280256 - protein, 77 aa, Zea mays
  Clone ID: MRT4577_187175C.1.pep
GIDKDATKLEFARGGRHAVREHRADLPFFDAGPTAELLVYICKSTYIYIYIRIFYILYSNSKAARGSFSCLAKKEKL

SEQ ID NO: 280257 - protein, 87 aa, Zea mays
  Clone ID: MRT4577_187176C.1.pep
GQGGQILHIPPSIDPPKSASDNWERGGSGQGGQIPGVNAPASGQGCVIRWTPQAIKFREGIWTLSFPPQEKYSSSDHWMNQTMSILI

SEQ ID NO: 280258 - protein, 75 aa, Zea mays
  Clone ID: MRT4577_187177C.1.pep
RPKQTQHIVCPKTNAPINYTRFQTPTPTTNNYRMLGLLIHMPPIIFTKPKHTYQNPSPPENDILATEPRKMLLLQ

SEQ ID NO: 280259 - protein, 86 aa, Zea mays
  Clone ID: MRT4577_187178C.1.pep
CPQWHLSPLLHPYVVLFLRGSESYAVGVPVPSVYHSSGKSDCCLEHVACFFPDRYVVREAHDLAPALAFGASLRSEKIGAWLHAAS

SEQ ID NO: 280260 - protein, 678 aa, Zea mays
  unsure (1)..(678): unsure at all Xaa locations
  Clone ID: MRT4577_187179C.1.pep
REKLFHITQELNSQLTEPEKAGLKESEDHLLKWAWRCNKAQEEQAAQLNMLTGSAQNNEDAVSRRMSLFEDCSQLLLELLDASLNATTSPDCSVKMAYVLTNVSLTCMAKLRDERFICPAGTDSDAVTCLDIISSKQLPNAACNSLLFKLVIATVGGEAGEILRRRQYALLLSYFQYCSSILDSDVPPSVLRFLLLEEQDGDDEDITLQKVLKEHNELAHANFSIIRKEAQAIVDLVTKDAFHGSEAGKALSFYVLDALISIDHEKYFLNQLQSRGILRSCLSDVANYLSKDSSLASESSQRFCTVDAQFSLLLRLSHHYGKHGSQILLSMGALQNLSACNLMGGQKKVNPRAISKIAXNGLVKXKRSLITPVLRIVTSFTSLVDSADFLEVKNKIVREIVDFAKQHQSVFNSILRENMTGTNLLTLEQLSMAVSILSKVWAYEENEECSYIQDLFSLMHSLFSVDFGILNFMQSPNMIENQKSELIAFGLCFSLVSYLYVLATRKNMRFQVSYGRNSDQQHPTLQMVSDLLNSATLALERVGEEKYMLLNKIRDLNELSRKEVDEIIKVCMKQDCISPNDNIRKRRYIAMIDLCCMAGNRDQLITLLLQITECAVTILLIHFQDDASAKGLSSFSDELLPVLERLEHLKEDKVGRSLKLFHRSITTLKEMTIRTITI

SEQ ID NO: 280261 - protein, 94 aa, Zea mays
  Clone ID: MRT4577_18717C.1.pep
RTRYFNMPHCHGGSCTELILATCMNVPTRMLTWSGVDGLGFVWMSIYPPQFTCVNSTSNLSNVHRLRWIHVHLNKASNGMSEFCCRLNMVKRTK

SEQ ID NO: 280262 - protein, 79 aa, Zea mays
  Clone ID: MRT4577_187180C.1.pep
VIRPLSRTNSPTRIHHARTQCATSVVRSAPKYPLFGGLCFRRYPSRSCTVRLHYDTVYSFVCSLVSLFCLAVVLSCFTY

SEQ ID NO: 280263 - protein, 86 aa, Zea mays
  Clone ID: MRT4577_187181C.1.pep
RTVTSSDKIPRSMCAPYQISYHLKKIVLIKQINKKSLITNKCIETCLQMNILQLLNERRKRLHMQELQHAHNKRTRPHTKWAHEML

SEQ ID NO: 280264 - protein, 88 aa, Zea mays
  Clone ID: MRT4577_187182C.1.pep
MAIITLDTAYQEGDVDAFLADYFYEPAQPAATLKVLHDVKSEDKLNTGSGGSAVVDADSLLYRKFAEVVEYNVESYFPGGEDHYHDCW

SEQ ID NO: 280265 - protein, 59 aa, Zea mays
  Clone ID: MRT4577_187183C.1.pep
SNLNARVCFSVSMFTDPSLRRQSNCLVAAKGHTLFVGGHRKCCGTTDHAEMNVKTLHEG

SEQ ID NO: 280266 - protein, 59 aa, Zea mays
  Clone ID: MRT4577_187184C.1.pep
VRQLNGAPETRVHMWSIVLVTDIKHSSRGGHHILHGILKYLGDTSRERLAPHLTNESNR

SEQ ID NO: 280267 - protein, 90 aa, Zea mays
  Clone ID: MRT4577_187185C.1.pep
STRVSSKEEARARAVSCVLCMCLPAAGTYTYLCGVLCSVKRRVLVRIGQRTGQGAFRSQCRFFFLFVLDFGGKTLQYGALGLPVGTTSLL

SEQ ID NO: 280268 - protein, 152 aa, Zea mays
  unsure (1)..(152): unsure at all Xaa locations
  Clone ID: MRT4577_187186C.1.pep
KKRGSLFFGQGDQGLKQGGKTNLFNXGLXPANVPYGGGKNQTLGKFCLKRKGKPPFKGXKRNVFKNPGLPKPNYPWGNFFNPFSLKLQRLKXDQWAPLSRLVFAREIKIKRVLTFLSKKKFLFSWTXNLRTPGLFLXNGPPQQNSPPKKVSP

SEQ ID NO: 280269 - protein, 165 aa, Zea mays
  unsure (1)..(165): unsure at all Xaa locations
  Clone ID: MRT4577_187187C.1.pep
MEGKEEDIRLGANKISERQPIGTAAQGTNNKDSRSPRRRRSSEPEEHKSWSFYXRAGIAEFVAXTFLFLYICILTVMGVSKCTCECATRGIQSITWSFGGMIFALVYCTAGISGGHINXAATFGLFLTRKVSLTRXVFYIIMQCLGTICGAGVVNAFQQGLYMGN

SEQ ID NO: 280270 - protein, 212 aa, Zea mays
  Clone ID: MRT4577_187188C.1.pep
MDRVRGSALLLGVLLAGSLFALCAAKEEAKKLGTVIGIDLGTTYSCVGVYKNGHVEIIANDQGNRITPSWVGFTDGERLIGEAVKNQAAVNPERTVFDVKRLIGRKFEDKEVQRDMKLVPYKIVNKEGKPYIQVKIKDGETKVFSPEEISAMILGKMKETAEAYLGKKINDAVVTVPAYFNDAQRQATKEVGVIAGPHVARIINEPTAAAIA

SEQ ID NO: 280271 - protein, 415 aa, Zea mays
  Clone ID: MRT4577_187189C.1.pep
MESHNPSHSQIAEVKMDIAASASGAAGSKFCKGAACDFSDASNSSKDARERSASMRKLIVAVVLCVVFMAVEVVGGIKANSLAILTDAAHLLSDVAAFAISLFSLWAAGWEATPRQSYGFFRVEILGALVSIQLIWLLAGILVYEAVVRLVGESGDVRGSLMFAVSAFGLVVNVLMAVLLGHDHGHGHGHHGHGHSHDHGHGHGDSDDGHSHHDDEEQEQGRVHHHEHGHGGAITVTTHHHHHHHDHDVEEALIKHEGTQSAGRAGKKPRRNINVHSAYLHVLGDSVQSVGVMVGGAIIWYKPEWKVIDLICTLVFSVVVLFTTIRMLRSILEVLMESTPREIDATRLESGLCGMEGVVAVHELHIWAITVGKVLLACHVTIARDADADEILDKVIGYIKTEYNISHVTIQVERE

SEQ ID NO: 280272 - protein, 108 aa, Zea mays; identical to SEQ ID NO: 255930
  Clone ID: MRT4577_18718C.1.pep

SEQ ID NO: 280273 - protein, 89 aa, Zea mays
  Clone ID: MRT4577_187190C.1.pep
GTYTHYGKEASAERIRPRSGARIQRGTEAVLALLGSGKNRPFLPPDSRCYIGYLRPGKKNWYHTLWNRSQLEQNKKQKRGGPPAPPFGP

SEQ ID NO: 280274 - protein, 185 aa, Zea mays
  unsure (1)..(185): unsure at all Xaa locations
  Clone ID: MRT4577_187191C.1.pep
RCSAEPHPRARPLGPRRRESGRQAPLSVPPPGSPRRRRRRLDRPHASAAPLPILGPRPREKTARAGEIAEVKMDISASASVASGNKFCKGGACDFSDSSNSSKDAKERSTSMRKLIIAVILCIIFMTVEVVGGIKANSLAILTDAAHLLSDVAAFAISXFSLWAAXWXEAPPQQXYGXXFRXGDS

SEQ ID NO: 280275 - protein, 262 aa, Zea mays
  unsure (1)..(262): unsure at all Xaa locations
  Clone ID: MRT4577_187192C.1.pep
ARVELCSNFQVLGCGIAGLAQSIAEVKMDISASASVASGNKFCKGGACDFSDSSNSSKDAKERSTSMRKLIIAVILCIIFMTVEVVGGIKANSLAILTDAAHLLSDVAAFAISLFSLWAAGWEATPQQSYGFFRIEILGALVPIQLIWLLAGILVYEAIVRLINESGDVQGSLMFAVSAFGLFVNIIMAVLLGHDHGHGHGHSHGHPHDHGHGNSDDGHSHHEEPEQGHVHHHEHSHGSSITVTTHHHHHSXTGHTMTLRSH

SEQ ID NO: 280276 - protein, 414 aa, Zea mays
  Clone ID: MRT4577_187193C.1.pep
MESHNPSHSQIAEVTMDIAASASGAAGSKFCKGAACDFSDASNSSKDARERSASMRKLIVAVVLCVVFMAVEVVGGIKANSLAILTDAAHLLSDVAAFAISLFSLWAAGWEATPRQSYGFFRVEILGALVSIQLIWLLAGILVYEAVVRLVGESGDVRGSLMFAVSAFGLAVNVLMAVLLGHDHGHGHGHGHGHSHDHGHGHGDSDDGHSHHDDEEQEQGRVHHHEHGHGGAITVTTHHHHHHHDHDVEEALIKHEGTQSAGRAGKKPRRNINVHSAYLHVLGDSVQSVGVMVGGAIIWYKPEWKVIDLICTLVFSVVVLFTTIRMLRSILEVLMESTPREVDATRLESGLCGMEGVVAVHELHIWAITVGKVLLACHVTIARDADADEILDKVIGYIKTEYNISHVTIQVERE

SEQ ID NO: 280277 - protein, 85 aa, Zea mays
  Clone ID: MRT4577_187194C.1.pep
EQIGQAGSTAGPQQQQPAGAPQPGAVPPGVPTPGPHGPSPFPNQQTPPSMMPGAVPGSGHPGVAAQSPAIVAAVQGNLLPSASPL

SEQ ID NO: 280278 - protein, 453 aa, Zea mays
  Clone ID: MRT4577_187195C.1.pep
MDREKALQARILGVLRRQQPPRSAPPGSYMFMGSPCGLQVDSHNSIDAQIAEVIKDISASASVASGNKFCKGGACDFSDSSNSSKDAKERSTSMRKLIIAVILCIIFMTVEVVGGIKANSLAILTDAAHLLSDVAAFAISLFSLWAAGWEATPQQSYGFFRIEILGALVSIQLIWLLAGILVYEAIVRLINESGDVQGSLMFAVSAFGLFVNIIMAVLLGHDHGHGHGHSHGHPHDHGHGDSDDGHSHHEEPEQGHVHHHEHSHGSSITVTTHHHHHSGTGQHHDAEEPLIKHEADCEGTQSAAKKPRRNINVHSAYLHVLGDSIQSIGVMIGGAIIWYKPEWKIIDLICTLIFSVVVLFTTIRMLRNILEVLMESTPREIDATRLERGLCEMEGVVAVHELHIWAITVGKVLLACHVTVAREADADEILDKVIGYIKTEYNISHVTIQVERE

SEQ ID NO: 280279 - protein, 70 aa, Zea mays
  Clone ID: MRT4577_187196C.1.pep
PIVVRKKKKKKKKKKKKKKKKKKKKKKKKKKKKKKKKKKKKKKKKKKKKKRGGPVLKGTKSFTSRVAWKG

SEQ ID NO: 280280 - protein, 197 aa, Zea mays
  unsure (1)..(197): unsure at all Xaa locations
  Clone ID: MRT4577_187197C.1.pep
MESHNPSHSQIAEVTMDIAASASGAAGSKFCKGAACDFSDASNSSKDARERSASMRKLIVAVVLCVVFMAVEVVGGIKANSLAILTDAAHLLSDVAAFAISLFSLWAAGWEATPRQSYGFFRVEILGALVSIQLIWLLAGILVYEAVVRLVGESGDVRGSLMFAXXRVGLVVTFSWAVCXAHXHGHGHGHGHGHGHS

SEQ ID NO: 280281 - protein, 383 aa, Zea mays
  unsure (1)..(383): unsure at all Xaa locations
  Clone ID: MRT4577_18719C.1.pep
MAPEPEDDIMNEKNPRPLDEDDIALLKTYGLGPYSTSIKKVEKEIKEMAKKINDLCGIKESDTGLAPPSQWDLVSDKQMMQEEQPLQVARCTKIISPNTDDAKYVINVKQIAKVARCSKIISPNTDDAKYVINVKQIAKELXKERLHRSQDVRHSCPQENGXQKRIFSMLSTRSSRATRSSVQHPSIWCTTSRRVFMGSVVSRNSGSFSWLYHHEILYAKVVVCLXQIGCRVICDLYRMFXDNNVLRSVXLLLVSMIDDVHRAQSSFGKLTQCKHQVTQVVVSXGRLDRKVEFGLPDLEARTQIFKIHTRTMNCERDIRFELLARLCPNSTGADIRSVCTEAGMYAIRARRKKVTEKDFLDAVNKVIKGYQKFSATPKYMVYN

SEQ ID NO: 280282 - protein, 102 aa, Zea mays
  unsure (1)..(102): unsure at all Xaa locations
  Clone ID: MRT4577_1871C.1.pep
MATKIFWLLMLLALSTCVANATIIAQCLQAPIAHLLSQYLPXRIANICENPAIQPYRLQQAIADSNIPLSPLMIQQXTDLSLVQSLIHTIMAQQLQQLMLPE

SEQ ID NO: 280283 - protein, 79 aa, Zea mays
  unsure (1)..(79): unsure at all Xaa locations
  Clone ID: MRT4577_18720C.1.pep
MREIISIHIGQAGIQVGNACWELYCLEHGIEPDGTMPSDTSVVVAHDXFKTSFSXTGSGKNVKIFFFQDLPPRAPPFFF

SEQ ID NO: 280284 - protein, 426 aa, Zea mays
  unsure (1)..(426): unsure at all Xaa locations
  Clone ID: MRT4577_18721C.1.pep
MAPEPEDDIMNEKNPRPLDEDDIALLKTYGLGPYSTSIKKVEKEIKEMAKKINDLCGIKESDTGLAPPSQWDLVSDKQMMQEEQPLQVARCTKIISPNTDDAKYVINVKQIAKFVVGLGDKVSPTDIEEGMRVGVDRNKYQIQIPLPPKXDPSVTMMTVEEKPDVTYNDVGGCKEQIEKMREVVELPMLHPEKFVKLGIDPPKGVLCYGPPGTGKTLLARAVANRTDACFIRVIGSELVQKYVGEGARMVRELFQMARSKKACIVFFDEVDAIGGARFDDGVGGDNEVQRTMLEIVNQLDGFDARGNIKVLMATNRPDTLDPALLRPGRLDRKVEFGLPDLEGRTQIFKIHTRTMNCERDIRFELLARLCPNSTGADIRSVCTEAGMYAIRARRKTVTEKDFLDAVNKVIKGYQKFSATPKYMVYN

SEQ ID NO: 280285 - protein, 81 aa, Zea mays
  Clone ID: MRT4577_18722C.1.pep
TNSKLHEEEPPQNMKPQSGNDKPLSKTALKNQRKHEAKKAAKQEARSDKSPDLAPTPAPQSTPRNTVSQSISGDPEIDKKI

SEQ ID NO: 280286 - protein, 339 aa, Zea mays
  unsure (1)..(339): unsure at all Xaa locations
  Clone ID: MRT4577_18723C.1.pep
MAPEPEDDIMNEKNPRPLDEDDIALLKTYGLGPYSTSIKKVEKEIKEMAKKINDLCGIKESDTGLAPPSQWDLVSDKQMMQEEQPLQVXTEPXARCTKIISPNTDDAKYVINVKQIAKFVVGLGDKVSPTDIEEGMRXGVDRNKYQIQIPLPPKIDPSVTMMTVEEKPDVTYNDVGGCKEQIEKMREVVELPMLHPEKFVKLGIDPPKGVLCYGPPGTGKTLLARAVANRTDACFIRVIGSELVQKYVGEGARMVRELFQMARSKKACIVFFDEVDAIGGARFDDGVGGDNEVQRTMLEIVNQLDGFDARGNIKVLMATNRPDTRAQKCRIQGIQKASQ

SEQ ID NO: 280287 - protein, 426 aa, Zea mays
  Clone ID: MRT4577_18724C.1.pep
MAPEPEDDIMNEKNPRPLDEDDIALLKTYGLGPYSTSIKKVEKEIKEMAKKINDLCGIKESDTGLAPPSQWDLVSDKQMMQEEQPLQVARCTKIISPNTDDAKYVINVKQIAKFVVGLGDKVSPTDIEEGMRVGVDRNKYQIQIPLPPKIDPSVTMMTVEEKPDVTYNDVGGCKEQIEKMREVVELPMLHPEKFVKLGIDPPKGVLCYGPPGTGKTLLARAVANRTDACFIRVIGSELVQKYVGEGARMVRELFQMARSKKACIVFFDEVDAIGGARFDDGVGGDNEVQRTMLEIVNQLDGFDARGNIKVLMATNRPDTLDPALLRPGRLDRKVEFGLPDLEGRTQIFKIHTRTMNCERDIRFELLARLCPNSTGADIRSVCTEAGMYAIRARRKTVTEKDFLDAVNKVIKGYQKFSATPKYMVYN

SEQ ID NO: 280288 - protein, 101 aa, Zea mays
  Clone ID: MRT4577_18725C.1.pep
KRRGARTKAMENPASCASATNRPHQTDLPETCASAEIARSSIGDNRRWHSADLDKKYVSVASPTYETPLHRRCLECQMHPITMLIRNAIQLVTFVIDTDRI

SEQ ID NO: 280289 - protein, 136 aa, Zea mays
  Clone ID: MRT4577_18726C.1.pep
MDGLQRSAQTFRRSGSSGLVWDERFITEGAGAAAPRQQPELRHSRSVGSVAMLLLGGEADRDDKRKLTLAKPNLKGHHKKQEELVPGRKAFRTRDVAPAAEPPSPRVLAICCAPCSIFRDAGAGGSSSLARRAKKR

SEQ ID NO: 280290 - protein, 426 aa, Zea mays; identical to SEQ ID NO: 280287
  Clone ID: MRT4577_18727C.1.pep

SEQ ID NO: 280291 - protein, 91 aa, Zea mays
  Clone ID: MRT4577_18728C.1.pep
IRLELLEDDNAAEALLSFISESGSQILVLGSDSSNFITRKLKGPGIPTTILRCAPDSCDVYIGARDRIISKLADFSSSRSHETSPKDFLAT

SEQ ID NO: 280292 - protein, 36 aa, Zea mays
  Clone ID: MRT4577_18729C.1.pep
IKPHLVLQPQVTQDSPKPRISFFTLTTSLTSLNHGT

SEQ ID NO: 280293 - protein, 98 aa, Zea mays
  unsure (1)..(98): unsure at all Xaa locations
  Clone ID: MRT4577_1872C.1.pep
AWGLAHRDIQRRXDRFHCGTAARLILQLFVHSTGSIGTKCPPRTPCLNTFRDLGTASYEGHSTDVTEFPPHFVGSSGRGPLTGSAHIALSYRYTDGVK

SEQ ID NO: 280294 - protein, 42 aa, Zea mays
  Clone ID: MRT4577_18730C.1.pep
YPRSHTHWRALPIKSILISNISPNTSYMKGLNIHFIMGCSFN

SEQ ID NO: 280295 - protein, 90 aa, Zea mays
  Clone ID: MRT4577_18731C.1.pep
LLRQILDVKVDLIHRNERTTWQSDLTINLNQLVTNNDRGTDQHCQLNLSVRCLHFPQKEAYPVLWISCHMSSLQADNTSPWHGLVRVSMY

SEQ ID NO: 280296 - protein, 306 aa, Zea mays
  Clone ID: MRT4577_18732C.1.pep
RPCRVEDDEFIANALINLYSKVCLVDDSLRCFHRTPKQEIFAWTSMIRAFVHNEHSDKALHFFRELRYTGVEPDQFTISCVMNACADLSMPIACEQIHCYAVKSGFDRFTLCGNSQIEMYRGTGDLKAAKKSFERIPSLDTFSWSQMILSYAVHGHGREALLLFEKMRDCGVMINEFAFLAVLVACSLGGLIDEFYRNYDSMVSHYSFVPDMKHIACMVDLLGHVGKVADAEDFIKSYGLENNAVLWHTLLRACRIHGDKDRGIKTGEKLMMLEPFTASSYVMLYNLYMDAGKISLAMRTRGQMRE

SEQ ID NO: 280297 - protein, 118 aa, Zea mays
  unsure (1)..(118): unsure at all Xaa locations
  Clone ID: MRT4577_18733C.1.pep
LRRSHSAQRRCEGRXXXXXMRILMVGLDAAGKTTILYRRKLGEIVTTIPTIGFNGETVEYKNISSTVWDAGGQDKIRPLWRHYFQNTQGLISXVDSNDRDRGVEARDEVRTMLNEDDP

SEQ ID NO: 280298 - protein, 287 aa, Zea mays
  Clone ID: MRT4577_18734C.1.pep
MVALANEEALAHDEDIMDDVDSDVEESDSEDDSGEEAQDKPSDKAIYNKEAILEKLEDIAWPKYVDWIHKLTIEHDQGEKVDVNDDLARELAFYTQALDGTRQAFEKLQSMKVRFLRPTDYYAEMVKTDAHMHKIKGRLLSEKKRIEEAEERRKARDSRKKAKEVQAEKKKERAKQKKEQIESVKKWRKQRQQGGFTKGNDDAPDLNFEGEEGFKQSKKRRPGVSPGDRSGGLAKRGKGGKNGRARDSKFGHGGRKGLKKQNTAETTNDFRGFNQGCEPQNKKRKRF

SEQ ID NO: 280299 - protein, 82 aa, Zea mays
  Clone ID: MRT4577_18735C.1.pep
MASVAEMQPLAPAGYRRAPDMKEKVEASVVDLEAGTGETLYPGISRGESALRWGFVRKDYGILAAQLLLTTVVSALTVLHPT

SEQ ID NO: 280300 - protein, 287 aa, Zea mays
  Clone ID: MRT4577_18736C.1.pep
MVFLSNEEAWTHDEDIMDDVDSDVEESDSEDDSGEEAQAKPADKAIYNKEAILEKLEDIAWPKNVDWMHKLTVEHDQGEKVDVNDDLARELAFYTQALDGTRQAFEKLQSMKVRFLRPTDYYAEMVKTDAHMHKIKGRLLSEKKRIEEAEERRKARESRKKAKEVQAEKKKERAKQKKEQIESVKKWRKQRQQGGFTKGNDDAPDLNFEGEEGFKQSKKRRPGVSPGDRSGGLAKRGKEGKNRRAKDSMFGHGGRKGLKKQNTAETTNDFRSFNQGGQSQNKKRKRF

SEQ ID NO: 280301 - protein, 488 aa, Zea mays
  Clone ID: MRT4577_18737C.1.pep
MDDVVPATAKQTVVLYPGGGAGHVAPMTQLAKVFVRHGYDVTMVLLEPPIKSNASGASFVESFAASNPSITFHLLPPIPPPDLASSTKHPFLVVLELLGQYNDKLESFLRTIPRERLHSLVIDMFCTDAIDVAAKVGVPVYTFFAANAGALAVLTQTVALLDGRQTGLKELGDTPIEFLGVPPIPASHIIREMLEDAEDEVRTAMAKIWKRDTDTRGVLINTFYSLEAQALQAFSDPLCVPGKVLPPVYPIGPLVGKGGSGTDGGEAAERPHECLAWLDAQPERSVVFLCWGSRGLLSEEQLKEIAAGLEKSGQRFLWVVRTPASSDDPKRFWLPRPEPDLDALLPEGFLERTKDRGLVIKSWAPQVDVLSNPAVGAFVTHCGWNSSLEAITAGVPMLCWPQGAEQKINKVLMTEAMGIGLELEGYNTGFIKAEEIETKVRLVLESEEGREIRTRAAEVKKEAHAALEDGGSSKAAFLQFLSDVKNIN

SEQ ID NO: 280302 - protein, 58 aa, Zea mays
  Clone ID: MRT4577_18738C.1.pep
GRELYLPERSECTHSNSCEANISPMSHLTASLSSFTRYHGVSMYYSSSAAEDKARYGL

SEQ ID NO: 280303 - protein, 64 aa, Zea mays
  Clone ID: MRT4577_18739C.1.pep
LCTANQDLDITAPYKESLMLFQFSQVQSQVVQIVACMYCRMQNVKSRFHYMKYTDPSAKKKKQG

SEQ ID NO: 280304 - protein, 68 aa, Zea mays
  Clone ID: MRT4577_1873C.1.pep
MIFFLLNASITNSEGRLCSSLYNGSDATWYSKIVVWLYPDWLRSFMAIQSWKGRIYSIACKTDIFPTF

SEQ ID NO: 280305 - protein, 60 aa, Zea mays
  Clone ID: MRT4577_18740C.1.pep
LINPGKEAFPGVVDPPGSSGYVLFDPGLGEQETVAAVVNIVVVVVCTGGLNRVDLLELFL

SEQ ID NO: 280306 - protein, 97 aa, Zea mays
  Clone ID: MRT4577_18741C.1.pep
GRATVTKNRIFGPSMRTNICHCPHTRHLAVGETSKCPWHKHSATEGVVKKQGPERMTEPYLTLTHTHKALSKSSNMGWPNPLNYGNRKLTVTYTAQL

SEQ ID NO: 280307 - protein, 147 aa, Zea mays
  unsure (1)..(147): unsure at all Xaa locations
  Clone ID: MRT4577_18742C.1.pep
TQAGGAGFSSPANQDLAQSGLVRVHERGQPKGAAGEPPPNPRVSTGRPTQEHRKRGGDDPHLLQANETYTAHRSTRHCPPRHGERLQGVRGSATLSAKNPMLXAVENMNGKELDGTNITANQAQARGGGGGGRGYGGRRGGGGYGGG

SEQ ID NO: 280308 - protein, 211 aa, Zea mays
  Clone ID: MRT4577_18743C.1.pep
GQDAPDPTCLAWLDARPPRSVLYVSMGSVARVDRAVFEETAWALAGSGVPFLWVLRRGSVRGADADEEDVPPVPEELRETVRHRGKIVAWAPQREVLAHPAVGGFWTHCGWKSMVEAISEGVPMLVQPCFAEQIVNARYVTHQWGIGYEVGKPLERTAMAKAARKLMAGELGPQGPRERARLLKAQAKQCVAEGGGISLALDGLVDYICSL

SEQ ID NO: 280309 - protein, 247 aa, Zea mays
  Clone ID: MRT4577_18744C.1.pep
LGLYRGLSAVILGSASSSAVYFGTCELAKSLLRPHLPPFLVPPLAGASGNVSSSAIMVPKELITQRLQSGAATGRSWQVLLGILRADGFLGLYAGYPTRLLRNLPAGVLSYSSFEYLKAFAMRRPGGESLTPGESVLCGALAGAISAAVTTPLDVVKTRLMTRVGGAEGSRTVLGTMREVVAEEGLVGLSRGIGPRVLHSACFAALGYCAFETAKLAILQFYLERCQSKEPGAAAQPETEPGAAAAT

SEQ ID NO: 280310 - protein, 66 aa, Zea mays
  Clone ID: MRT4577_18745C.1.pep
LTSRLTMIYMSILVDHMLISTTIVPMNRRHDLSILKNPWTHQVEVRHMHSMCLCVISISVYTCKLQ

SEQ ID NO: 280311 - protein, 145 aa, Zea mays
  Clone ID: MRT4577_18746C.1.pep
RDGTAAARRVAGVGGRQAARACRSSLSAQVLGSPHRLPARFYFFLPDPVQVAVQSTPPTARRTKPTHSPQSRAPRPPALPTIGVGNGGHGDQGRRGHRVAGPRRAVAPPPPPELGAPARPSRRSWAAGAWAPRDRRAGSGGSGGG

SEQ ID NO: 280312 - protein, 71 aa, Zea mays
  unsure (1)..(71): unsure at all Xaa locations
  Clone ID: MRT4577_18747C.1.pep
IVTYRRKLGLGASTIMWYNGYNTLAFETXLHYAARSWRNLQGYASGSAGGAFVLYVGQGPCSSQTFLASHM

SEQ ID NO: 280313 - protein, 117 aa, Zea mays
  unsure (1)..(117): unsure at all Xaa locations
  Clone ID: MRT4577_18748C.1.pep
MAHRVRLYLSPAXGTAVAATVGPEDSLIRNVIXGGDDNNLELNAESHFLNYVHRYGKSYNDADEHSIRLSVFNANLLHALRHHLQDQSAEHRVTKFSELKQADFRRTYLGLRKYRCA

SEQ ID NO: 280314 - protein, 169 aa, Zea mays
  unsure (1)..(169): unsure at all Xaa locations
  Clone ID: MRT4577_18749C.1.pep
FSWGACPVFWXSFXSFXAPRXFGCASXWXSVAXLRXSXXALSRXSRXXSXLXXPXAXXVRXXXXGFXLVSXCRFXXRVXXFLXXSSLAXXXXXXXXXXPVLLXXPPPXAPGXXXRAWGRAXGXXRRXRXRXRAGPGXPCXGSAAVGGCAXVSXGGRLCGGXXXXXXRGG

SEQ ID NO: 280315 - protein, 107 aa, Zea mays
  unsure (1)..(107): unsure at all Xaa locations
  Clone ID: MRT4577_1874C.1.pep
MASEQGVVIACHSKAEFDAHMTKAQEAGKLVVIDFTAAWCGPCRAIAPLFVEHAKKFTXAAYEVEAMPTFHFVKNGKTVATIVGARKDELLAQIEKHAAPAPASASA

SEQ ID NO: 280316 - protein, 116 aa, Zea mays
  Clone ID: MRT4577_18750C.1.pep
PKRGLPHCLSRSRATGAEQQYRVEPGRLASSTPSAPALCAIARPTRAACRIRADAADPDRSASDRGRGGGGGEESTKLASHGRIGRGAGSGGTGGDAMGVWDSPLACSGADEPMLY

SEQ ID NO: 280317 - protein, 95 aa, Zea mays
  Clone ID: MRT4577_18751C.1.pep
GGDFAGLAFFLLTKIPNLQYMFGPQQIPLKLTGKGGEFFLVQPDPIFTWFYPQLEWEKFEGSTQLFPVASFGPLGNNRKLFKRFVPMQTGHSPGK

SEQ ID NO: 280318 - protein, 88 aa, Zea mays
  unsure (1)..(88): unsure at all Xaa locations
  Clone ID: MRT4577_18752C.1.pep
SFTALRGISNHFNSNAREGLYPQKVLYMEIRSQGASSLGWYLMRXYFYYTETRTKTLTDRTSFLRVHRYIMGPIGTICNGRARLLVFI

SEQ ID NO: 280319 - protein, 49 aa, Zea mays
  Clone ID: MRT4577_18753C.1.pep
RHERAPSTCVICRQSLHRKHGSPSDRSSGRWHLDQCVSIIILGADPPTA

SEQ ID NO: 280320 - protein, 229 aa, Zea mays
  Clone ID: MRT4577_18754C.1.pep
MSPASLAARLLRRAASTSSSAPVPLLRRLPAATSSTAGTTARRFLASQSPASSSTSSADDNLRRIVESEIECVVQSEESNTDKHIDLPDDFPFEIIDNPGDQSITLQREIAGETIKAVIYTNFDTDEHLDDEDDKSGTDEESFKPVLQMVVTIKKPEGPILEFDCNFNDDELTIENMRVLNRGNPDAKNVYEGPQFSDLDKSLQKALHRYLEVRGVKHSLHDLAVRVHD

SEQ ID NO: 280321 - protein, 49 aa, Zea mays
  Clone ID: MRT4577_18755C.1.pep
LSSNSPLVGPNLKLFLLKASPLLANAPRNYSLPPGGNVEMPLARTSLLS

SEQ ID NO: 280322 - protein, 224 aa, Zea mays
  unsure (1)..(224): unsure at all Xaa locations
  Clone ID: MRT4577_18756C.1.pep
MSPAPLAARLLRRAASTSSSPLSALVRRGLCSSAPVPLLRRLPAATSSTAGTTARRFLASQSPASSSTSSADDNLRRIVESEIECVVQSEESNTDKHIDLPEDFPFEIIDNPGDQSITLQREIAGETIKAVIYTNFDTDEHLDDEDDKSGTDEESFKPLLQMVVTIKKPEXDLDKSLQKALHRYLEVRGFKHSLHDWLYEYMMRKDEKEYVVWLKSMKEFIGGN

SEQ ID NO: 280323 - protein, 263 aa, Zea mays
  Clone ID: MRT4577_18757C.1.pep
MSPASLAARLLRRAASTSSSPLSALVRRGLCSSAPVPLLRRLPAATSSTAGTTARRFLASQSPASSSTSSADDNLRRIVESEIECVVQSEESNTDKHIDLPEDFPFEIIDNPGDQSITLQREIAGETIKAVIYTNFDTDEHLDDEDDKSGTDEESFKPLLQMVVTIKKPEGPILEFDCNFNDDELTIENMRALNRDNPDAKNVYEGPQFSDLDKSLQKALHRYLEVRGFKHSLHDWLYEYMMRKDEKEYVVWLKSMKEFIGGN

SEQ ID NO: 280324 - protein, 878 aa, Zea mays
  unsure (1)..(878): unsure at all Xaa locations
  Clone ID: MRT4577_18758C.1.pep
AANDACQQNGFVPDAHLGAEIALEDQRDLIRDLNASASVPPSRCQAFKDGMKQGIINPSDIDVTFEDFPYYVSENTKNVLLSCAFIHLEKKEFIKQFAEISSINQRILLSGPAGSEIYQETLVKALAKXFGARLLVVDSLLLPGAPLKDAESQKDVGKGDKSGDKGTAEKFAIYQKHRSSLADTVQFRRPAAPTSSVNADIVGTSTLQSASLPKQESSTATSKSYTFREGDRVRYVGPAQLSSLSQRGPSYGYRGRVMLAFEDNGSSKIGVRFDKQIPDGNDLGGLCEEDHGFFCSAESLRPDFSAGEEVERLAMTELIEVISEENKSGPLIVLLKDVEKSFTGVTESLSSLRSKFESLPSGVLIIGSHTQMDSRKEKAHPGGFLFTKFASSSQTLFDLFPDSFGSRWLHERSKESPKAMKHLNKLFPNKILIQLPQDEALLTDWKQQLDRDVETLKAKSNIGSIRTFLSRNGIECNDIEELFIKDQSLSNENVDKIVGYAVSYHLKXIKLKPXSKDNKLVLTSESLKHGLNMLQSMQSDNKSSKKSLKDVVTENEFEKRLLVDVIPPNDIGVTFDDIGALENVKDTLKELVMLPLQRPELFCKGQLTKPCKGILLFGPPGTGKTMLAKAVATEAGANFINISMSSITSKWFGEGEKYVKAVFSLASKIAPSVIFIDEVDSMLGRRENPGEHEAMRKMKNEFMVNWDGLRTKDKERVLVLGATNRPFDLDEAVIRRFPRRLMVNLPDASNREKILKVILAKEELGSDVDLDSLANMTDGYSGSDLKNLCVTAAHYPIREILEKEKKEKSLAKTEGRPEPALYGSEHIRPLSIDDFKSAHEQVCASVSSDSANMNELLQWNDLYGEGGSRKRKALSYFM

SEQ ID NO: 280325 - protein, 47 aa, Zea mays
  Clone ID: MRT4577_18759C.1.pep
GCGFILHVPGPGAVLSTTSCMDQAILLFHLVLGLYAGSHFNKCVGPV

SEQ ID NO: 280326 - protein, 122 aa, Zea mays
  Clone ID: MRT4577_1875C.1.pep
MASEQGVVIACHSKAEFDAHMTKAQEAGKLVVIDFTAAWCGPCRAIAPLFVEHAKKFTQVVFLKVDVDEVKEVTAAYEVEAMPTFHFVKNGKTVATIVGAKKDELLALIEKHAAPAPASASA

SEQ ID NO: 280327 - protein, 109 aa, Zea mays
  unsure (1)..(109): unsure at all Xaa locations
  Clone ID: MRT4577_18760C.1.pep
MFDTRSLLLTLATLQGAQAWGILGHATVAYIAQNYLNDDTATWAQGVLGDTSNSYLANIASWADDYRYTSAGKWSAPLHFIDAQDSPPTNCNFNYXRDCGYTGCSDYAI

SEQ ID NO: 280328 - protein, 87 aa, Zea mays
  Clone ID: MRT4577_18761C.1.pep
GNKRCKTTTQVFLPEQTTILPERNKLSSNHQNNRESLSTRLGSLSYAITKWPPQHFELLRGRTLEPTRISCGPTSYPIWNTWSASCK

SEQ ID NO: 280329 - protein, 56 aa, Zea mays
  Clone ID: MRT4577_18762C.1.pep
QMVLPTSRLVPFCPPNLLIGKFIYGSVGRFNNRFQKNKRKMRSKVRADFCVKLLHF

SEQ ID NO: 280330 - protein, 51 aa, Zea mays
  unsure (1)..(51): unsure at all Xaa locations
  Clone ID: MRT4577_18763C.1.pep
EKFPRGALALNIDRASYTIVQTTXWIVPPTHQSVQALPLLAQSRYLDASIL

SEQ ID NO: 280331 - protein, 104 aa, Zea mays
  unsure (1)..(104): unsure at all Xaa locations
  Clone ID: MRT4577_18764C.1.pep
RPNVRRRSRCADAPVASLNSHLDAFSHNSKHGSXAPLYLQLTPITNCLNXNYFSGTRFNLYRNXHEQRKNNLYHDRLNLSHVHYXXVNNLILREFFFTMIGIAN

SEQ ID NO: 280332 - protein, 54 aa, Zea mays
  Clone ID: MRT4577_18765C.1.pep
AESSSRHHKAALVLAVLKDTVCIKTAQIESEGRVSKLTLCEGCMGCIYTDTWGA

SEQ ID NO: 280333 - protein, 107 aa, Zea mays
  unsure (1)..(107): unsure at all Xaa locations
  Clone ID: MRT4577_18766C.1.pep
RRHGITQAGTKNLKKLPGALQPKLTRHSLKRQGLLAQGSLPNTQGALDWAWVPFSPNSFLPQLLTQQGRTWLRATGKGAPAGKESRGGRGVRTGNPXGHATVVCTRL

SEQ ID NO: 280334 - protein, 70 aa, Zea mays
  Clone ID: MRT4577_18767C.1.pep
MTDRTTPQAKASVRTDDTGTGSAAAPFLELCGLVTAPPPPTLCPPVPAPAAPAPAPPPALPPLCPLVILL

SEQ ID NO: 280335 - protein, 132 aa, Zea mays
  Clone ID: MRT4577_18768C.1.pep
PSPPLLGLARLPVSVGPSGVAPRVRLVVPFGSVFVHQLILFRLAVFVFFYPGFFFPLSVPGFFFLVSCFFFSFRFSFFCFWFLSFFPFVWLAFSHALLCCCSLPVFSPARFWCCVGFLGCSPPPSMIRYHVE

SEQ ID NO: 280336 - protein, 143 aa, Zea mays
  unsure (1)..(143): unsure at all Xaa locations
  Clone ID: MRT4577_18769C.1.pep
SSCDASTPLWSPHGQASGCDPAFPGGFSYRLQFMNKPTSFLIKVMLFCKVRRIICPIMHGNDSGTNEERKKDSKTDRALVLAPPHQALWKFRRFPQLLLHTMRTGRQGRGPRWKWRGRWYFFLLRCTGHQKQFISPRGRPRXQ

SEQ ID NO: 280337 - protein, 42 aa, Zea mays
  Clone ID: MRT4577_1876C.1.pep
RLVSQTKRPKISYSTVHRRKVHRRSYGLRRWSVALESFPIST

SEQ ID NO: 280338 - protein, 135 aa, Zea mays
  Clone ID: MRT4577_18770C.1.pep
GPFWDQRVGFLVLQAWDMQFLDRGFSVFQACWLRRRVKKPPFGQGFQPPHCKASSRGKIPPSVFVVFPSGGPYPSLTSGSPTEERLWGQPVAGSRFLLFQGAAPQQGWLPPCEQFFMGPGLLVTRGEPGLPRILV

SEQ ID NO: 280339 - protein, 106 aa, Zea mays
  unsure (1)..(106): unsure at all Xaa locations
  Clone ID: MRT4577_18771C.1.pep
LAEKISRFLERAYIPLNAWFQWVNSTQSGEYESTLYWHWRDNITTKGLDPKTLTFGLDDYSWAFYSNDXKPHCDLRWWMLLTSKXFCSLEKFLKRIGLLRKDTIKW

SEQ ID NO: 280340 - protein, 56 aa, Zea mays
  Clone ID: MRT4577_18772C.1.pep
VHVPPQAHAAALLHGSSPCEIINNLLACELSQLLDAVIVITRSAFKGPFGVDARWP

SEQ ID NO: 280341 - protein, 62 aa, Zea mays
  Clone ID: MRT4577_18773C.1.pep
CTRRQDLSSARGTSNYEASISLSQAIPVARGRAEEDERVQVHKVRHGRGRSRLQYQNAHHYT

SEQ ID NO: 280342 - protein, 111 aa, Zea mays
  Clone ID: MRT4577_18774C.1.pep
LVPRVKEVKSAQETPESSLAGSPDTESPVLVNDYEAESGNISQKSDEEDFVKVEDLPLKLTIYSEADLRKKMVEEEQKNHLSGEICEMQTEELAGNSETLKEPETVGAQSI

SEQ ID NO: 280343 - protein, 250 aa, Zea mays
  Clone ID: MRT4577_18775C.1.pep
MRALGTVAWAWLLLLQQLAGASHVVYENLEVEAATAAAVRPSIVDPLLRTGYHFQPRKNWINDPNAPLYYKGWYHLFYQYNPKGAVWGNIVWGHSVSRDLINWVALQPAIEPSIPSDRYGCWSGSATTLADGTPAIMYTGVNRPDVNYQVQNVAYPRNRSDPLLREWVKPSHNPIIVPGGGINATQFRDPTTAWRGAGDGRWRLLIGSVTEARHGVAYVYRSRDFRRWTRARRPLHSAATGMWECPDFYP

SEQ ID NO: 280344 - protein, 111 aa, Zea mays
  Clone ID: MRT4577_18776C.1.pep
KSERKSQFFCPKKKKKKKKKKKKKKKKKKKKKKKKKKKKKKKKNEKIKKKKGHATGAWSLEMAMLNSLCLLMSCSTFTLQTRKTSWFSPVKNSIQHSISLYEMSVFVSGLL

SEQ ID NO: 280345 - protein, 91 aa, Zea mays
  Clone ID: MRT4577_18777C.1.pep
IKALKHTNSHRSISAINEHAGHKSRSKHAVHPSVHLRLMQAIRSSVSRRPLARRRRSRLHRPWPPSPCPQYQCRWPPSPSVRCQYAWEEAG

SEQ ID NO: 280346 - protein, 38 aa, Zea mays
  unsure (1)..(38): unsure at all Xaa locations
  Clone ID: MRT4577_18778C.1.pep
IVEXAGQIELFTHVLVLRNYVRFLRRYYFNDALFTFLI

SEQ ID NO: 280347 - protein, 95 aa, Zea mays
  unsure (1)..(95): unsure at all Xaa locations
  Clone ID: MRT4577_18779C.1.pep
EGKYKQALLQYKKIVSWLEYESSFSNEEAQKAQALRLASHLNLAMCHLKLQAFSXAIESCNKALELDSNNEKGLFRRGEAHLAVNDFELARADFQ

SEQ ID NO: 280348 - protein, 122 aa, Zea mays; identical to SEQ ID NO: 280326
  Clone ID: MRT4577_1877C.1.pep

SEQ ID NO: 280349 - protein, 73 aa, Zea mays
  Clone ID: MRT4577_18780C.1.pep
RGLFFFFFYTMLLAVSNFLSQTARQGGEPCLVGVGCIRRAGPFTSIDYSSAHIWLATSRRLGAHALPPSHTVA

SEQ ID NO: 280350 - protein, 62 aa, Zea mays
  Clone ID: MRT4577_18781C.1.pep
LSRIITKAFNWESELPAGASARRLPLPTVGRSRPKGPCHWVSPPGMTSSGWPPQAPFATGGV

SEQ ID NO: 280351 - protein, 169 aa, Zea mays
  unsure (1)..(169): unsure at all Xaa locations
  Clone ID: MRT4577_18782C.1.pep
LSPLLVFRRSLGFASGCXXXMPPAVPVRRGSAPGGLRAGSAVLCCYPLRLFXARWLALXRLXSSPXRRCRLAPAGXGLARVSGRRVAPVGSRRAAARPARPRVXLRAFXLPPLXCPRSSLXLPRLPXXLLPSRRSLVPRVSLSSPLLGVPSRARXLFFWVSVPGGXXPG

SEQ ID NO: 280352 - protein, 134 aa, Zea mays
  Clone ID: MRT4577_18783C.1.pep
MCPAAATTSSAKPSKKRKQPVIAPPESDSEEESVYDTASDDDEEEEETQELESDDVDEEVEEGSEDGEENEIGDDSEVEEEEVKEKKEKEETVKEKKEKKDMKHEGKKAEKHEEKKAKNDKKEEEKKGRRDRKK

SEQ ID NO: 280353 - protein, 55 aa, Zea mays
  Clone ID: MRT4577_18784C.1.pep
HWVLRNPLVLVALGGVVFHVLGIVWVRPLLLFKPPPGVGGGVGKRVGVAGTGGPV

SEQ ID NO: 280354 - protein, 139 aa, Zea mays
  Clone ID: MRT4577_18785C.1.pep
TKHSHCPTPSVHRLALHSSNPGRLGRIRDPSTVLSSQVDRRPDQVRASVSAMSAGGSRARQNAMRSGVVVLGAVAFGYLSFRVGFKPYLDQAQEAIDSARDPDPDPATTAARDASDDPGAGRPGGDLGPSKDPAVVLRD

SEQ ID NO: 280355 - protein, 45 aa, Zea mays
  Clone ID: MRT4577_18786C.1.pep
MEIKNKFQNFVPQKKKKKKKKKKKKKKKKKKKKKKKKKKKKKKKK

SEQ ID NO: 280356 - protein, 95 aa, Zea mays
  unsure (1)..(95): unsure at all Xaa locations
  Clone ID: MRT4577_18787C.1.pep
MKRIMLACLLVIFVQVQWASLGTHDVYIVTMERDPVVSYRCXSNXFPATALDSDEEIDLTSDAVKSYALHLRRHHYKLLDSLLLEGTYXNLYSYH

SEQ ID NO: 280357 - protein, 133 aa, Zea mays
  unsure (1)..(133): unsure at all Xaa locations
  Clone ID: MRT4577_18788C.1.pep
RPMLTQGVXTGNPGELVDARLNKNFNEVEMFRMIENVAGCIWHSASRRPRINQVVRGLHSLPEVDLTNGGQPGKNEMFNVASPAEIRLFQRKGFGNQNFPADFNQSSWDNNQNKGFYAFGLRPMETPPSSENL

SEQ ID NO: 280358 - protein, 63 aa, Zea mays
  Clone ID: MRT4577_18789C.1.pep
MPRSVSSEFGSRPRTRLSLNSTAPYPCDASVTCREVHPHDPHFLPLLEATGWCLFGSPLHGPD

SEQ ID NO: 280359 - protein, 157 aa, Zea mays
  unsure (1)..(157): unsure at all Xaa locations
  Clone ID: MRT4577_1878C.1.pep
LSRSSLSSVAATDPSFTTPANSTNRGQKKVLHRAXSLRKATGTAAVAMTASALIAGGAMTQEVLLGASDGGLVFNASHMTVDGADXITFKNNDAFPHNDAFDEHNETSADNDIQISQDEYLYATXETYSTSLTVPDTYLFYXSIHQGAEMLGKITVN

SEQ ID NO: 280360 - protein, 1060 aa, Zea mays
  Clone ID: MRT4577_18790C.1.pep
MGSAATEGNDTLLGNGVVGILAETCNMWERRAPLTPSHCARLLLGGGKNGPRVNRIIVQPSTRRIHHDAQYEDAGCEISEDLSECGLIIGIKQPKLQMILSDRAYAFFSHTHKAQKENMPLLDKILEERVSLFDYELIVGDDGKRSLAFGKFAGRAGLIDFLHGLGQRYLSLGYSTPFLSLGQSHMYPSLAAAKAAVIVVAEEIATFGLPSGICPIVFVFTGVGNVSQGAQEIFKLLPHTFVDAEKLPEIFQARNLSKQSQSTKRVFQLYGCVVTSRDMVSHKDPTRQFDKGDYYAHPEHYTPVFHERIAPYASVIVNCMYWEKRFPPLLNMDQLQQLMETGCPLVGVCDITCDIGGSIEFINKSTSIERPFFRYDPSKNSYHDDMEGAGVVCLAVDILPTEFSKEASQHFGNILSRLVASLASVKQPAELPSYLRRACIAHAGRLTPLYEYIPRMRNTMIDLAPAKTNPLPDKKYSTLVSLSGHLFDKFLINEALDIIETAGGSFHLVRCEVGQSTDDMSYSELEVGADDTATLDKIIDSLTSLANEHGGDHDAGQEIELALKIGKVNEYETDVTIDKGGPKILILGAGRVCRPAAEFLASYPDICTYGVDDHDADQIHVIVASLYQKDAEETVDGIENTTATQLDVADIGSLSDLVSQVEVVISLLPASFHAAIAGVCIELKKHMVTASYVDESMSNLSQAAKDAGVTILCEMGLDPGIDHLMSMKMIDEAHARKGKIKAFTSYCGGLPSPAAANNPLAYKFSWNPAGALRSGKNPAVYKFLGETIHVDGHNLYESAKRLRLRELPAFALEHLPNRNSLIYGDLYGISKEASTIYRATLRYEGFSEIMVTLSKTGFFDAANHPLLQDTSRPTYKGFLDELLNNISTINTDLDIEASGGYDDDLIARLLKLGCCKNKEIAVKTVKTIKFLGLHEETQIPKGCSSPFDVICQRMEQRMAYGHNEQDMVLLHHEVEVEYPDGQPAEKHQATLLEFGKVENGRSTTAMALTVGIPAAIGALLLLKNKVQTKGVIRPLQPEIYVPALEILESSGIKLVEKVET

SEQ ID NO: 280361 - protein, 108 aa, Zea mays
  Clone ID: MRT4577_18791C.1.pep
GNSAPTHGLRRACLHLRRSHPQRTRGGASPPRRSPRSGKQHNIKERANSSDSSPQGASPRAGTETSKSVAMHVGYRLQATTTNIPTGREFFFTTPPPGGGVAGEDTRT

SEQ ID NO: 280362 - protein, 463 aa, Zea mays
  unsure (1)..(463): unsure at all Xaa locations
  Clone ID: MRT4577_18792C.1.pep
CELLLQVEVVISLLPASFHAAIAGVCIELKKHMVTASYVDESMSNLSQAAKDAGVTILCEMGLDPGIDHLMSMKMIDEAHARKGKIKAFTSYCGGLPSPAAANNPLAYKFSWNPAGALRSGKNPAVYKFLGETIHVDGHNLYESAKRLRLRELPAFALEHLPNRNSLIYGDLYGISKEASTIYRATLRYEGXNCIPFCFSEALLCIASLISVHHFAAYVXFSEIMVTLSKTGFFDAANHPLLQDTSRPTYKGFLDELLNNISTINTDLDIEASGGYDDDLIARLLKLGCCRSKEIAVKTVKTIKFLGLHEETQIPKGCSSPFDVICQRMEQRMAYGHNEQDMVLLHHEVEVEYPDGQPAEKHQATLLEFGKVENGRSTTAMALTVGIPAAIGALLLLKNKVQTKGVIRPLQPEIYVPXCYVVFHACPCGITMTCNGADPCVCVSEALEILESSGIKLVEKVET

SEQ ID NO: 280363 - protein, 112 aa, Zea mays
  Clone ID: MRT4577_18793C.1.pep
GRVGGRLGCCLGDGLVTLCLTCTWRWKLHGRWRVLDHDDGTGELLLRRDGGTGEHDQRHKQRPGRALKGALRPRMPESGNTLRFVGTRIADATRKLDPSGRGAAPVITLTGA

SEQ ID NO: 280364 - protein, 80 aa, Zea mays
  Clone ID: MRT4577_18794C.1.pep
SSQPQCSYARIQAGGKLRVQHLNQPDLPDATRDSTATKPRLRDYPVNLCDCNPKWLPGLVNDQELTLCCAHILIDTPTSI

SEQ ID NO: 280365 - protein, 86 aa, Zea mays
  Clone ID: MRT4577_18795C.1.pep
TGTKGNPGTRKTPKRGLRPEDPAPEGPGQKLGPPRMQPQSLKPERKTRPWGRGPAGLLEEGLHVKGRQGKPLQRAPFVTSAGGGGH

SEQ ID NO: 280366 - protein, 52 aa, Zea mays
  Clone ID: MRT4577_18796C.1.pep
INMTRSSTAIWGSPDLGRPQTYQIPPTKHRSLPSGKINSKGCQIPMGGTITG

SEQ ID NO: 280367 - protein, 78 aa, Zea mays
  unsure (1)..(78): unsure at all Xaa locations
  Clone ID: MRT4577_18797C.1.pep
KVLDLINVCILLSANIFTAHIMYEAKYSSNFTRSQGFAVMXSKVHYVRVDIYCYSIHYYVFTRYYIQIFTFSYLKVGL

SEQ ID NO: 280368 - protein, 272 aa, Zea mays
  unsure (1)..(272): unsure at all Xaa locations
  Clone ID: MRT4577_18798C.1.pep
LAMYTFLPFGMVLVVFGIIAFSFLPYRVCFPVGALTGVNYRXVAXTSPPPRAKAXRGRLYVCNXRXLLDPVIVAAALGKPVTAVTYSLSPVSELIAPIRTARLTRDREKDQRNMAAVXARGDLVVCPEGTTCREEYLLRLSPLFAELGVDVNPVALETRVGMFYGTSTKPGRKWMDPFYFMMNPRPAYRVEFLXAPPPRRWTXGGRGXSIDVANRVQRELGKALGFEXTGLTRKDKYMTLAGNEGCRQRPKTDVNNCPCGFSVPMSSPAGPL

SEQ ID NO: 280369 - protein, 82 aa, Zea mays
  Clone ID: MRT4577_18799C.1.pep
TIEKVIHSYINFLYLTEQLPIPLFQLHQIRIGQDSPVYGPFYSISFRSCGENGVRTRDFWRDRPALYPTELTCCFSSLRAMM

SEQ ID NO: 280370 - protein, 179 aa, Zea mays
  Clone ID: MRT4577_1879C.1.pep
MVYYALLVGAELDGLTNLQPRHGCDDPNFPYYLKPKVSCNHNEQKLSISPTPRKKRSMASEQGVVIACHSKAEFDAHMTKAQEAGKLVVIDFTAAWCGPCRAIAPLFVEHAKKFTQVVFLKVDVDEVKEVTAAYEVEAMPTFHFVKNGKTVATIVGARKDELLAQIEKHAAPAPASASA

SEQ ID NO: 280371 - protein, 206 aa, Zea mays
  Clone ID: MRT4577_187C.1.pep
MRECISIHIVQAGLQVGNACWKLYCLEHGIHADGQMPDDKTIGGGDDAFNTFFSETGAGKHVPRAVFGDLEPTVIHEVRTDTYRQLFHPEQVMSGKDDAANNSLRGHYTIGKEIVDLSLDRMKKLADYSTGLQGFLVFNAVGGGTDYELGSLLLERLSDDYGKKSNLGCTANPSPQGSTCEVEPYNRVLYTHSLLQHTDVAVLLDN

SEQ ID NO: 280372 - protein, 103 aa, Zea mays
  Clone ID: MRT4577_18800C.1.pep
MTFLFPAKNQQGTMEGRPSAPARVSMFRRLMVRVTPAERLAGDGKEREKDERPPASAPAAAPAAAGDALELLKGLVQCLSTAERNLLADASRIAERCGSGSGS

SEQ ID NO: 280373 - protein, 150 aa, Zea mays
  unsure (1)..(150): unsure at all Xaa locations
  Clone ID: MRT4577_18801C.1.pep
MAEVQVNKTIVYADPGNSLRTEIVETTXPEPGPGEILIRLSYSGVCHTDVGFCLNQFDAVPALTPKGQIGGHEGIGFVLKQGQGVSYPSIGSTVGISYAADACLSCDNCXKGGETTCSQTKISGYFTAGTFQQYPVSPARYVFQIPQGLE

SEQ ID NO: 280374 - protein, 191 aa, Zea mays
  Clone ID: MRT4577_18802C.1.pep
MALCTATTSSLVDVIGSRGAIGGETFEVGRLKTFEIRYKRWKYSGTFRQGLRGPSDWIQCPNHTTKYGIRGIFHCKASPTLSDPPVDSKCHCFPKLEKPKASHKREDDLDDKALCDTAIVCGDWDLFEEYLTYEIWSLSHDKVVGEVGAKPPFDVDLKVRSGKDFINEIEGEATKLVGLVTDHEAAKSLEI

SEQ ID NO: 280375 - protein, 135 aa, Zea mays
  Clone ID: MRT4577_18803C.1.pep
RSMFRRLMVRVGPAERLAGDGKEREKDERPPASGAGAEAEVGSVGLDKMVLSFMEDSAAAAERPPRGRCSSCFNGNNQDGSDDEDFDFLPSASAPAVAPAAAGDALELLKGLVQCASTPERNLLADASRIAERCG

SEQ ID NO: 280376 - protein, 90 aa, Zea mays
  Clone ID: MRT4577_18804C.1.pep
PAPVLVLFSPVLAPFVVLCVSPCLVVCGSPPCVFFAFWLVRFLPFSPCVLRWFRSCVLLPRWFVPSPVGCSRVFPLMPPCPSVSAGACNA

SEQ ID NO: 280377 - protein, 124 aa, Zea mays
  Clone ID: MRT4577_18805C.1.pep
KGGTKKKPNPNPKEPGAKKGAPPKPPHKKRQTVFKGPPPPHQTGCKLCPPYKPTTKIYPQNPRPPRLQPHKQDWGHVNPQKSPRGAQSGAPPLAGETTLGRCLPPPLLKGEKGPLEKNPPPPPN

SEQ ID NO: 280378 - protein, 143 aa, Zea mays
  unsure (1)..(143): unsure at all Xaa locations
  Clone ID: MRT4577_18806C.1.pep
MSDINLDWVDRRQLQRLEEMLIVVDENDKVIGADTKRNCHLNENIEKGLLHRAFSVVLFNTKNRILIQQRSDTKVTFPGYFTDSCSSHPLYNPAELEEKDAIGVRRAAHRRLLAELGNSGEHISPEDIXVMTIYHHMAKSDRI

SEQ ID NO: 280379 - protein, 263 aa, Zea mays
  Clone ID: MRT4577_18807C.1.pep
RGTFRSLITIWPGAACPSIHRPCPLFVSSLLPTHAPPTTMASTSSVWSVWIALSLTLTLASASPADGQGGGGAHCPPVLCGGVEIAFPFGIVQEQATATNCGGIGFQVRCVNGTPYLGYSRYDHWLQILSVSYTNASLLVADTHKLETLGASDVGGGGGDSAVCRIPGNNSSTKVALPFSISPLNQDLILYNCTKAPAPAPAPDDEGLVEMTRCGNGTFARIGGRYGEPDDDGGYFLDGCCATVVPVLVKDDGKANASDYEQL

SEQ ID NO: 280380 - protein, 29 aa, Zea mays
  Clone ID: MRT4577_18808C.1.pep
VVTPPPRTPHRILCSPQARQIAERTNPYA

SEQ ID NO: 280381 - protein, 76 aa, Zea mays
  Clone ID: MRT4577_18809C.1.pep
HASARSCLPPSASTPSQRTQDRVQSVAIARISPPIPLQHTTSLTLQTCHHNRLFALYLSPPYPRPSFATFPSPTTT

SEQ ID NO: 280382 - protein, 122 aa, Zea mays
  Clone ID: MRT4577_1880C.1.pep
MASEQGVVIACHSKAEFDAHMTKAQEAGKLVVIDFTAAWCGPCRAIAPLFVEHAKKFTQVVFLKVDVDEVKEVTAAYEVEAMPTFHFVKNGKTVATIVGARKDELLALIEKHAAPAPATASA

SEQ ID NO: 280383 - protein, 1073 aa, Zea mays
  unsure (1)..(1073): unsure at all Xaa locations
  Clone ID: MRT4577_18810C.1.pep
MANAGRGLPRTQKNHKSKAYYQRKRGPLPTAHTKNHKSKAYYQHRGMVPGVLDSKSPSHRHAHFLLCSIFILISSNTATLSSAQASNRSEDDRQALLCFKSGLSGNSVGVLGSWSNDSLNFCNWEGVTCSTAIPIRVASLKLRSVQLRGKLSSCVANLTSLVQMDLSNNSISGEIPDEIGSLPLLQTLILSANKFEGSIPPSLGMAASNNSLLTTLILSKNRLSGEIPHFHKMAFLQSLGLTGNLLSGNIPPSLGNISSLTSILLAENSLRGPIPETLAQIPKLDILDLSNNMLSGNVPDLLYNVSSLTSFNIINNGIGGKIPSGIGRSLPNLVSLIMGGNAFSGEVPASLANISKLQLIDLSSNYLRSSVPSLGSLTYLTQLLLGSNKLETEDWTFLTSLTNCRQLLKISLDGNALNGSLPKSVGNLSTSIQLLSLRGNQISGTIPPEIGNLVSLTKLAMDQNMLSGIIPLTIGNLTNLVVLALSTNRLSGEIPATIGNLPQLIQLYLDDNMLSGRIPAQLVQCTRLTMLNLSVNSLDGSIPSEILSISSLSLGLDLSNNNLIGTIPSQIGKLINLGLLNVSSNKLSGEIPSELGQCVLLLSLQMEGNMLDGVIPQSLKTLKGIQHMDLSENNLSGQIPDFFENFSTLYYLNLSYNRLEGSIPTSGIFTNSNAVMLEGNKALCQQIDIFALPICHITSARKRKINERLLLITVPPVIIALLSFLCVLTTVMKGRITQPSESYRETMKKVSYGDILKATNWFSPVNRISSSHTASVYIGRFQFDTDLVAIKVFHLDEQGSLNSFLAECEVLKHTRHRNLIQAITLCSTVDFENNEFKVLVYEFMANGSLDMWIHPRPHQRSPIRVLSLGQRISIAADVASALDYMHNQLTPPLIHCDLKPSNVLLDYDMTSRIGDFGSAKFLSSSLNSTPEGLVGASGTIGYIAPGKLYASFVYGLLNFSFTSLXKXLFTPVLPEYGMGCKISTGGDVYGFGVLLLEMLTAKRPTDTLFGNDLSLHKYVDLAFPNKINEILDPKMPHEEDVVSTLCMQRYIIPLVEIGLMCSMESPKGRPGMR

SEQ ID NO: 280384 - protein, 69 aa, Zea mays
  Clone ID: MRT4577_18811C.1.pep
MAGGRAGDDDVVVVNCGGSCGGDPGAYAAVLNRKLDLYCAAVAKSMGWFLLLLPLQRLDLSRPTCVLVV

SEQ ID NO: 280385 - protein, 88 aa, Zea mays
  Clone ID: MRT4577_18812C.1.pep
MEKDTAAAATRVCRRCKAKYSPSGNTPQSCRFHPSYFVCRRHDDQKRYYELKEGDPPYAAKFYDCCGAEDPATAGCATGFHLSYDDPE

SEQ ID NO: 280386 - protein, 123 aa, Zea mays
  Clone ID: MRT4577_18813C.1.pep
KVLGFCSTTLPLRSSPSRFEAPPQPSCNWFFKPPVFLKKTLLPRKKKFKFWAKGAVYPFWGPLGEGDPPLAFVLGKLLSSSEREIWALLFPPVFFCWGGIECPFLFGPLFFSVCQGSAEGGPS

SEQ ID NO: 280387 - protein, 114 aa, Zea mays
  Clone ID: MRT4577_18814C.1.pep
HNKKPPKPLKERKGPGPTKIPPPRPPKILALGVYRRVHHTIEPFRALSFAPPRAPPGVRPPVTGPITHGGALSSGAGFLRAPGQRLPPPTSSSPPFFPKSFTGPPSLLPIGGPG

SEQ ID NO: 280388 - protein, 136 aa, Zea mays
  Clone ID: MRT4577_18815C.1.pep
LISWTIMIAGYGMHGFGKHAMALFEQMRGSGIEPDAASFSAILYACCHSGLAAEGRRFFKAMQKEYKIEPKLKHYTCIVDLLSRTGDLKEALEFIESMPIEPDSSIWVSLLHGCRIHKNVKLAEKVADMVFKLEPE

SEQ ID NO: 280389 - protein, 62 aa, Zea mays
  Clone ID: MRT4577_18816C.1.pep
WPGILVQHLESEWVVLHVAAVQEPCGQRFVLLVMDPPVGLIQPPVLDVRTWCKMTENTSSSR

SEQ ID NO: 280390 - protein, 136 aa, Zea mays
  unsure (1)..(136): unsure at all Xaa locations
  Clone ID: MRT4577_18817C.1.pep
MARTKQTARKSTGGKAPRKKLAPKGGRKWAPATGGVKKPHRFRPGTVAFREIPKYQKSPELLIRKLPFQRLVGEIAQNFKTALGFQSSPVPPLQKAPKGYLVGLFXDPNLWAIHAKRVPIMPKEIQLGPRIRGKRA

SEQ ID NO: 280391 - protein, 123 aa, Zea mays
  Clone ID: MRT4577_18818C.1.pep
IVDGAKDVGKFAIHHAPTIISIGEHVAKDGAQDGGDAVEMFGIHNIVDGAKDAGKFAEHHAGTIASVGMHVAEDGAEDGGDVEMFGWHNVVDGAKAVGKFADKHQKTIVSIVSHIASHHNNDE

SEQ ID NO: 280392 - protein, 111 aa, Zea mays
  unsure (1)..(111): unsure at all Xaa locations
  Clone ID: MRT4577_18819C.1.pep
MPRTSVGTPPCGGVTIGDAVLNLELGSTQGXIRFHDYFCYGYGIMFSHPADVTXVCTMXMASTVVNATEREKCGGKLLGMSSEHVQRYRLWSKDVEALCGKHMLRRRRLPR

SEQ ID NO: 280393 - protein, 92 aa, Zea mays
  Clone ID: MRT4577_1881C.1.pep
ARGTPPRSKCFLRRISACGRWRQGVRLVSSVSLSLALLQPAMLLLGACRLPLALHWTASTRSPVGNGIIRVSWWCAGSLRTRRSIRTGPCGR

SEQ ID NO: 280394 - protein, 172 aa, Zea mays
  Clone ID: MRT4577_18820C.1.pep
CGAQAAVPCYPRHSSPSRSRNLITKSSRHGGRALLHLAAVEQFNGYTFQGRPLRVNCGPPPPRDGSAPRAPRGGGGGGGGGSFVDSGNKVYVGNLAWGVDNSTLENLFSEQGQVLDAKVIYDRDSGRSRGFGFVTYGSAEEVNNAISNLDGIDLDGRQIRATVAESKPRREF

SEQ ID NO: 280395 - protein, 289 aa, Zea mays
  unsure (1)..(289): unsure at all Xaa locations
  Clone ID: MRT4577_18821C.1.pep
LGTSRPAGVLSPPFVTSQVPEPYHQILFSTSLSPRFLALSSPKPAAPAASAFLPFTLPLRSVSAPAPARRVFEPVAVAVSSEYGTEGAEQQDGEFSEDLKLFVGNLPFSVDSAQLAGLFEQAGSVEMVEVVYDRMTGRSRGFGFVTMSSAEEAGAAVEQFNGYTFQGRPLRVNCGPPPPRDGSAPRAPRGGGXGGGGSSFVDSGNKVYVGNLAWGVDNSTLENLFSEQGQVLDAKVIYDRDSGRSRGFGFVTYGSAEEVNNAISNLDGIDLDGRQIRVTVAESKPRREF

SEQ ID NO: 280396 - protein, 56 aa, Zea mays
  Clone ID: MRT4577_18822C.1.pep
FSPIMYLVRGRAFQKSRVITPSTQQCEETHVVSGFIKESHTRRGDQINVLLVIQIS

SEQ ID NO: 280397 - protein, 276 aa, Zea mays
  unsure (1)..(276): unsure at all Xaa locations
  Clone ID: MRT4577_18823C.1.pep
HWVPRGRPGCYPRHSSPARSRNLITKSSRHGGALFSTSLSPRFLALSSPKPAAPAASAFLPFTLPLRSVSAPAPARRVFEPVAVAVSSEYGTEGAEQQDGEFSEDLKLFVGNLPFSVDSAQLAGLFEQAGSVEMVEVVYDRMTGRSRGFGFVTMSSAEEAGAAVEQFNGYTFQGRPLRVXGGGGSSFVDSGNKVYVGSLAWGVDNSTLENLFSEQGQVLDAKVIYDRDSGRSRGFGFVTYGSAQEVNNAISNLDGIDLDGRQIRVTAAESKPRRQF

SEQ ID NO: 280398 - protein, 81 aa, Zea mays
  Clone ID: MRT4577_18824C.1.pep
STRSNHPTTQAGPPTSCGRQKSGHGDCKPTYKTERARTELIAPSQGGQEQEVVATEVHQQPEEPFPQMTMRSACLPAKRGV

SEQ ID NO: 280399 - protein, 268 aa, Zea mays
  Clone ID: MRT4577_18825C.1.pep
MAAALFSSSLSPRFLALSSPKPAAPAATAFLPFRLPPRAVSAPGRRVFEPVAVAVSSEYKTEGAEQEGEDGSEEFSEDLKLFVGNLPFSVDSAQLAGLFEQAGSVEMVEVVYDRMTGRSRGFGFVTMSSAEEAESAVEQFNGYAFQGRQLRVNCGPPPPRDESTPRAPRGGGGGGGGGFVDSANKVYVGNLAWGVDNSTLENLFSEQGQVLDAKVIYDRDSGRSRGFGFVTYGSAQEVNNAISNLDGIDLDGRQIRVTAAESKPRRQF

SEQ ID NO: 280400 - protein, 267 aa, Zea mays
  Clone ID: MRT4577_18826C.1.pep
MAAALFSTSLSPRFLALSSPKPAAPAASAFLPFTLPLRSVSAPAPARRVFEPVAVAVSSEYGTEGAEQQDGEFSEDLKLFVGNLPFSVDSAQLAGLFEQAGSVEMVEVVYDRMTGRSRGFGFVTMSSAEEAGAAVEQFNGYTFQGRPLRVNCGPPPPRDGSAPRAPRGGGGGGGGGSFVDSGNKVYVGNLAWGVDNSTLENLFSEQGQVLDAKVIYDRDSGRSRGFGFVTYGSAEEVNNAISNLDGIDLDGRQIRVTVAESKPRREF

SEQ ID NO: 280401 - protein, 61 aa, Zea mays
  Clone ID: MRT4577_18827C.1.pep
RVSSDPTPDQQLIAHLLAASDHSLAALALALASSLATRSCSHQPFFFLPMAHCPRLRAPGT

SEQ ID NO: 280402 - protein, 66 aa, Zea mays
  Clone ID: MRT4577_18828C.1.pep
PIYMRHGSIIILTPYYIFYSITRNHALIHITFLNELYLLQQHIFTPIPNSPHYINMTIRRFSYTFI

SEQ ID NO: 280403 - protein, 259 aa, Zea mays
  Clone ID: MRT4577_18829C.1.pep
GENCEGVIPDIPGLRDFPAGEVVHSSSYKSWKNYAGKRVLVVGCGNSGMEIAYDLAYNGVETSLVIRSPVHVMTKGLIYLGMRLLKWHLPVKLVDFIILTLANIQFGDLSRYGIVRPDMGPLLLKAKTGRSAVLDVGTTQLIKTGDIKVVGAISRIRGNTVEFEDGKERDFDSLVFATGYRSTANTWLKDGGSLLDDNGMPKKKAGLQQGSRPWKGGNGLYCVGLGMAGLAGISRDAVSVAADIKAAVDSMVGPPAFWF

SEQ ID NO: 280404 - protein, 103 aa, Zea mays
  Clone ID: MRT4577_1882C.1.pep
MELCQTCATFQVVIDFTAAWCGPCRAIAPLFVEHAKKFTQVVFLKVDVDEVKEVTAAYEVEAMPTFHFVKNGKTVATIVGARKDELLAQIEKHAAPAPASASA

SEQ ID NO: 280405 - protein, 54 aa, Zea mays
  Clone ID: MRT4577_18830C.1.pep
PLTTIHLLHPQLPLQTIQTHPHQQNPYHTIHTRSKPSFLKRTPLSTFSSCSPLT

SEQ ID NO: 280406 - protein, 57 aa, Zea mays
  Clone ID: MRT4577_18831C.1.pep
RGSGREKFRYYSYSIPRARPATTRRKQDDDDPGDGDHGHPGGRDSDGAAQAGDGGGP

SEQ ID NO: 280407 - protein, 74 aa, Zea mays
  Clone ID: MRT4577_18832C.1.pep
RGNPLGFYYALAKGFNPRGDLFFIGSPLSPVVEQAPSYTFPSPSFGFNGLSKKKKKKKKKKKKKKKKKKKKKNS

SEQ ID NO: 280408 - protein, 54 aa, Zea mays
  Clone ID: MRT4577_18833C.1.pep
LGLINLSYRLVFNCLINFIIRLYLIYLMDIQTFSVTNFSLWNQTLPVITYGLQS

SEQ ID NO: 280409 - protein, 63 aa, Zea mays
  Clone ID: MRT4577_18834C.1.pep
KVFPMWFLMEQAGGQSFKEKKGVFVLFPTKIPDGSPIFLESYDDVEKIKALSPNQAKSSSVSS

SEQ ID NO: 280410 - protein, 611 aa, Zea mays
  unsure (1)..(611): unsure at all Xaa locations
  Clone ID: MRT4577_18835C.1.pep
SGSSRAPASARPLARHRLPASARHRRLLPPHPASGHRSPVSAPGVHRPVSDTRPSATAVQHQFPQQRGHRRRHLGRLLRIDGXTLRLYTSHWAPERWQEYEPLLNYCRDNGIKLVACGTPLEVVRTVQTEGIRSLSKAQRKLYAPSAGSGFISGFTSISGRSLIDKISSTCGSPFGPSSYLSAQARVVDDYTMSQTIMKEIGNGDPSGMLVVVTGASHVMYGPRGIGVPARISKKMQKKNQVVILLDPERQSIRREGEIPVADFLWYSAAKPCSRNCFDRAEIARVMNAAGRRREALPQDLQKGIDLGVVSPEILQNFFDLEKYPVMAELIHRFQGFRERLLADPKFLNRLAIEEAISITTTLLAQYEKRKGRFFEEIDYVLTDTIRGSVVDFFTVWLPAPTISLLSFADDGGCESVELLKGILGSLPDNAFQKGIVGQNWNINQRFASVLMGGLKLAGVGFISSIGAGVASDVLYGARRXLKPSANMEVGRKRSPIWKSAAVYSCFLGTSANLRYQVIAGLIEHRLGENLMAYYDQPLIANLLSFVSRTVNSYWGTQQWIDLARVTGVQRTNKDLPSPEVSSASEMPLLECGTAEVQNADDSSNQSNDLT

SEQ ID NO: 280411 - protein, 46 aa, Zea mays
  Clone ID: MRT4577_18836C.1.pep
VYSAHYINFTFHTITGHTRARRIHARITTETSTHKKLTTTAILKSG

SEQ ID NO: 280412 - protein, 33 aa, Zea mays
  Clone ID: MRT4577_18837C.1.pep
GRRRATAHQQPPGDVEVGRQRTASSHLIWLLNY

SEQ ID NO: 280413 - protein, 48 aa, Zea mays
  Clone ID: MRT4577_18838C.1.pep
KPFEPPYCPLLGDRDIGPSLQLPALSQSLSAIAICSLSCVRAVSSTLF

SEQ ID NO: 280414 - protein, 113 aa, Zea mays
  Clone ID: MRT4577_18839C.1.pep
MELGIIPKGPTSISILQRRDRKYQTVAEAVAEEVATVVRMDLALGSYVLLLVWALLQRAAAAVVLAQKMEDDAGRLGFHLGKELPRAASAFMHNLCSRGAHLFGNTSASSVWC

SEQ ID NO: 280415 - protein, 47 aa, Zea mays
  Clone ID: MRT4577_1883C.1.pep
LKLLKAPFWMVYIITSSNVDVSGLSFSIFSIFTLPYLSFLMNHFLCS

SEQ ID NO: 280416 - protein, 43 aa, Zea mays
  Clone ID: MRT4577_18840C.1.pep
DDYGTSFIRASNSLGRTSHGEVGELQAWSPAQGVAHTSSSKWI

SEQ ID NO: 280417 - protein, 49 aa, Zea mays
  Clone ID: MRT4577_18841C.1.pep
IFSGYRLPIHKDILSQLCRQNPSRADRMRNVGTEVKLLIPRRNNMSKKM

SEQ ID NO: 280418 - protein, 61 aa, Zea mays
  Clone ID: MRT4577_18842C.1.pep
MGKEQVHISIVVIGHVDSGRSTTTGHLIYKRGGVDKRVIARFEKEAAEMNKRSFKYAWVLD

SEQ ID NO: 280419 - protein, 226 aa, Zea mays
  unsure (1)..(226): unsure at all Xaa locations
  Clone ID: MRT4577_18843C.1.pep
HWYLEPAELVSACALLSXLRLFCVRAAPMHVERSXRVCSPRCAALSLDFCVSVLSGNVSLLYLPGSFCHACEVTTPFFCAGFXLXMTVKGQACVTYRTLETDRTAVLIIRVDKTMFLLYXVITRILFSGVRWMWTTLTATLLSSYGYKINSMNLLLYVAPLSGMFLIPRTIFMLDHVEEXTFELARDDVTIDRLLWLIPGCTHLVHMDDYLVSITTIALTLLVLSC

SEQ ID NO: 280420 - protein, 110 aa, Zea mays
  Clone ID: MRT4577_18844C.1.pep
ARAANLSTLFNDLPSLIDRYSAILKCSYKFESIECQAPYKHTLQEWKHALDSNSKINLPKWDLINSPAVFDVFDQLPSEQQYNHLVLKPVIDYATALNVKKVHLMMSDLK

SEQ ID NO: 280421 - protein, 96 aa, Zea mays
  Clone ID: MRT4577_18845C.1.pep
DGLRKIQNLEAPQVTSLTPPTRLQSLHSYPRPNLSPSLSSGAIGAVPKSYLSSCRSLARLRTIHPWSGWLVGWLFCFRSSYSACGEGGLIMGSLPL

SEQ ID NO: 280422 - protein, 306 aa, Zea mays
  unsure (1)..(306): unsure at all Xaa locations
  Clone ID: MRT4577_18846C.1.pep
MDQIATPDETAHASAPSVHKLFDAKLGHHSVMDGTLASTSQSSNIKTQLIRSSSLSRSISVNLEKRSPESDPESPQSHVSHPKFAEPMFSNSSTFCTSLFSSSSTXEPCRQMGTLPFLPHPPKCEQQVSAGHSSSSSLLLSGDTGLDVAEQSDDLNDLLNLSGDASDGSFHGENNALAFDEQMEFQFLSEQLEIAITDNEKNPHLDDIYGTPPQLSSLPVSSCSNQNLGSPVKVQLSSSQSSSSSATANKSRLRWTLELHERFVEAVKKLEGPEKATPKGVLKLMKVEGLTIYHVKSHLQKYRLAK

SEQ ID NO: 280423 - protein, 54 aa, Zea mays
  Clone ID: MRT4577_18847C.1.pep
ESTPLNVIRFTHKPHRLYPLMLRARIWAVIVTATSFSLVVIYVHEYVQLIRFGA

SEQ ID NO: 280424 - protein, 77 aa, Zea mays
  Clone ID: MRT4577_18848C.1.pep
PQGQQKAQEKHPNFRPKGPPLKGHITGAKSIGGHRKPPPEALVLENYPPRGTICQKNELAFNVYPPPPDGKEVIPPG

SEQ ID NO: 280425 - protein, 69 aa, Zea mays
  Clone ID: MRT4577_18849C.1.pep
VFNDHDSIMTVIGVLVIMVIKDPVQLHIAIACSHWLIIYTDNQGQSSVHDIIASRRPSFLGWALQVVHG

SEQ ID NO: 280426 - protein, 64 aa, Zea mays
  Clone ID: MRT4577_1884C.1.pep
SCPVLGKKRKSSCKRIPTASPSTSPLHLARHRLSVARHLRLALGTHRLPADALSQPHKPSRSSF

SEQ ID NO: 280427 - protein, 75 aa, Zea mays
  Clone ID: MRT4577_18850C.1.pep
RRIIESYDTRLHRERPYHYIYSHRDAQPITGSPARQIAMTCVCPITSRTSLIKPCVEIMQLKYCDIQIKLEIRAV

SEQ ID NO: 280428 - protein, 36 aa, Zea mays
  Clone ID: MRT4577_18851C.1.pep
HQQSATNKWNGTVSIPIVIVVKQRQRKEQGSIKLTC

SEQ ID NO: 280429 - protein, 99 aa, Zea mays
  Clone ID: MRT4577_18852C.1.pep
MVDPGSNKVMGKFELVGALCTHHQLHARPTLEQALKILVADSVPSPLNIPERPLPDAANLGENERADSNSGSGQLFSPSGFRPYIHAYEDADLVGAKDT

SEQ ID NO: 280430 - protein, 656 aa, Zea mays
  unsure (1)..(656): unsure at all Xaa locations
  Clone ID: MRT4577_18854C.1.pep
HASAANKLSRLKEQAEEYAALIMEELDPEGLGYIELWQLETLLLQKDTYMNYSQALSYTSQALSQNLAGLRGLSPIRKISTTLSYYLEDNWKRLWVPLSYTSQALSQNLAGLRKRSPIRKISSTLNYYLEDNWKRVWVLAVWIGIMAGLFIWKFIQYRNRYVFDVMGYCVTTAKGAAETLKLNMALILLPVCRNTITWLRNTKAARALPFDDNINFHKTIAAAIVVGVVLHAGNHLVCDFPRLISSSEVKYAPLRQXFGENKPTYLXLVKVNAFWYSHHLFIIVYLALIVHGQFLYLIHVWYRKTTWMYLAVPVCLYVGERVLRFFRSGSYSVRLLKVAIYPGNVLTLQMSKPPAFRYKSGQYMFVQCPAVSPFEWHPFSITSAPGDDYLSIHVRQLGDWTRELKRVFAAACEPPVGGKSGLLRADETTKKALPKLLIDGPYGSPAQDYSKYDVLLLVGLGIGATPFISILKDLLNNIIKMEEEEEASTDLYPPVGPNKPHIDLSTLMTVTSRPKRVLRTTNAYFYWVTREQGSFDWFKGVMNEIAELDQRNIIEMHNYLTSVYEEGDARSALITMLQALNHAKNGVDIVSGTKVRTHFARPNWKKVLSKIASKHPFAKIGVFYCGAPVLAQELNKLCHEFNGKSTTKFEFHKEHF

SEQ ID NO: 280431 - protein, 122 aa, Zea mays
  unsure (1)..(122): unsure at all Xaa locations
  Clone ID: MRT4577_18855C.1.pep
LGEIVNNRDASSRMTKWPLSLSGLDINYIPRTVTKSXALTDFIAEWIEAQEPPTIKDPEYRIMYFNGSYLKTRSGTGVVLMSPXRAQTPYAIFLHFDSAINVAEYEALVNGLRIASEVGVQR

SEQ ID NO: 280432 - protein, 88 aa, Zea mays
  Clone ID: MRT4577_18856C.1.pep
IGPNVPSQLAIDLNAQGLARYAIICQENGLAPIVEPDILVDGPHDIDRCAYVTETRLAVCYKALNEHHVLLEGTLLMTNMVTPGSDCK

SEQ ID NO: 280433 - protein, 128 aa, Zea mays
  Clone ID: MRT4577_18857C.1.pep
PAGNLVHHRRRPVARTSTTSRRSTATTCPCSFLCAIPTCILTCGAPSDVHTSTCVPPTTPIPMPATHNSLYHATFCPRDLSRQARGRVAARRCHMQRMLQSSSFFAYNKHDVWPMTVLAWKVEEETIQ

SEQ ID NO: 280434 - protein, 88 aa, Zea mays
  unsure (1)..(88): unsure at all Xaa locations
  Clone ID: MRT4577_18858C.1.pep
RPAFFFFFFFFFFFFVFFXXFFFFWLFYSTQERELNKQTAKTLKYNIHFTYFICLQDALRGVSNVKTTFRLSKLVYKVIKPKHFVGAN

SEQ ID NO: 280435 - protein, 37 aa, Zea mays
  Clone ID: MRT4577_18859C.1.pep
VGTSRKHVDNMICHFKDMNRENIGNRFSQPAMTLALL

SEQ ID NO: 280436 - protein, 90 aa, Zea mays
  unsure (1)..(90): unsure at all Xaa locations
  Clone ID: MRT4577_1885C.1.pep
MEVPYCIFKRKAPLGLFVPKKTATVLCLAPVKKXGKLEFTKILEAIKGNFNSKFYKVRKKWGGGIMGSKSQAKTKAREKFLAKKAPHRIR

SEQ ID NO: 280437 - protein, 149 aa, Zea mays
  Clone ID: MRT4577_18860C.1.pep
GGAQAAVRKSPRQTLGIVMAVTTKISSSRRKSHKAHFGAPSSVRRKIMSASLAKDLRSKHSVRAIPIRKDDEVRIVRGKYKGREGKVTQVYRKKWVIHVERVARDKSNGASAPIGIHPSNVVITTLKLDKDRRAILERKGRKPAEETVD

SEQ ID NO: 280438 - protein, 65 aa, Zea mays
  Clone ID: MRT4577_18861C.1.pep
GRGFVFFFLGGSPIPTHFFWVMAGGTGTEGSREAKITLGGAGPPRLKVARGTGTRVPAPIRGGLS

SEQ ID NO: 280439 - protein, 88 aa, Zea mays
  Clone ID: MRT4577_18862C.1.pep
AKQSKTKQSRSKGLPAEQRFVTMLTGACVQALLLVTICAGGHGARGPGGARRTWLRRPTAWRRCCCLLPFGTRHTRVQISRVAPHCAS

SEQ ID NO: 280440 - protein, 55 aa, Zea mays
  Clone ID: MRT4577_18863C.1.pep
HQPDYNALKLLLALFGTFAETHTISTCTLETPIKPIPLISNPNKRSTCTILIVRL

SEQ ID NO: 280441 - protein, 91 aa, Zea mays
  Clone ID: MRT4577_18864C.1.pep
PSLDLSLPRLRADRYGIYCTRKRRGCLLSQKAMLPKRYMHHQALRIAFLQYLKRLNTTNESGSDCTAHLEGYTTWTGRFVPSLPLAVISIY

SEQ ID NO: 280442 - protein, 65 aa, Zea mays
  Clone ID: MRT4577_18865C.1.pep
DGGFFFFFFFFGFFFFFFFEAKLFLTFCLFHRKGKPEPSVKTGARGNQNLRGGGEKPFCQISPKP

SEQ ID NO: 280443 - protein, 81 aa, Zea mays
  Clone ID: MRT4577_18866C.1.pep
FFFFFFFFFFFFFFFFFFFLGATAARKTLTFACNLLVDYTTQQINLSCPPLPFLEQHHLQFLLDMPPHTQGYTLHKEHGEL

SEQ ID NO: 280444 - protein, 79 aa, Zea mays
  unsure (1)..(79): unsure at all Xaa locations
  Clone ID: MRT4577_18867C.1.pep
KKYHTSFRWTRYIQVQNINWMYSRKDCGYNTEKKVSTSQNSSKNRFLVIFSRCKSXVAQLIVPMTEVHNRTLLDETDNF

SEQ ID NO: 280445 - protein, 232 aa, Zea mays
  Clone ID: MRT4577_18868C.1.pep
MGSPRSLPVLLLLLCCLSWQQPWLLNALPLCTDSRAPAPLNGTLGFCSYSGSSCCDVAADAALKKLFEAMRVSDAACAAVVKSLLCAKCSPFSAELFNSSSKIRMVPLLCNYTSSRGSAQSKDSTQDYCKLVWETCKNVTISNSPFQPSLQGSGRLPSSASKLTDVWQSENDFCTSFGGSSDDNSVCFSGNAVSFNTTKPSPSPKGVCLERIGNGSDLNMAPPPDGSKEISC

SEQ ID NO: 280446 - protein, 136 aa, Zea mays
  Clone ID: MRT4577_18869C.1.pep
MATEEVAKPSPIPPYPEMILAAIEDLGDKSGSNKSAISRHIEGKYDGDLPPAHASLLAAHLARMKESGELVFVKNNYFRADAPDAPPKRGRGRPPKARDPGTPVSPPSGRGRGRPPKPKDPLDAAVKQATAGMPRA

SEQ ID NO: 280447 - protein, 394 aa, Zea mays
  Clone ID: MRT4577_1886C.1.pep
MASLLRRSAVPARQLLLLPRHFAAAGSAPALSRSFSRFNPRDDSSMFDPPEPPVNWGVSIVPEKKAYVVERFGKYLKTLGSGFHLLIPAVDRIAYVHSLKEETIPIPHQNAITKDNVTIQIDSVIYVKIMDPYLASYGVENPIYAVLQLAQTTMRSELGKITLDKTFEERDALNEKIVSAINEAATDWGLKCIRYEIRDINPPAGIRQAMEMQAEAERKKRAQILESEGMKQAQILESEGKKTAQILESEGAMLDLANRAKGAAEAILAKSEATARGMRLVSDAMTTEGSAKAASLKLAEQYIEAFSNLAQKTNTMLLPGDSASPASFVAQAMKTYEQIHSHSQALKSHPQIEELKESGETSPAPSSEASKTPPLIEEADSNQTFSLQRPKNKQ

SEQ ID NO: 280448 - protein, 52 aa, Zea mays
  unsure (1)..(52): unsure at all Xaa locations
  Clone ID: MRT4577_18870C.1.pep
VHGLLRASVAFIGPELMAAILGXPLWHQXLPFVSVLSKTSKAGGRPASTALT

SEQ ID NO: 280449 - protein, 135 aa, Zea mays
  Clone ID: MRT4577_18871C.1.pep
DVAPPYAISVYRPSVCAIFSCQMISRAIFSSLGPWGEALIEENAPFSMCCSEFLRVSPLICLVVSLYGPRFFFGLVWCVALSVSALCFSSSAVVAAPFPPACLARCAGRGLPPRALVLLPQSWCCVSTCSYERLE

SEQ ID NO: 280450 - protein, 128 aa, Zea mays
  unsure (1)..(128): unsure at all Xaa locations
  Clone ID: MRT4577_18872C.1.pep
MATEEVAKPSPIPPYPEXLTDGASCWLGVPXMILAAIEDLGDKSGSNKSAISRYIEGKYDGDLPPAHASLLAAHLARMKESGELVFVKNNYFRVDAPDAPPKRGRGRPPKARDPGAPVSPPSGRGRGP

SEQ ID NO: 280451 - protein, 73 aa, Zea mays
  Clone ID: MRT4577_18873C.1.pep
CMIFSEMNLEDFLTLSFIHYSVGYHHLFGFKFYSYAFLFYVKLLFVICFIFSYILFFCGCFYFLFLFYIIYVY

SEQ ID NO: 280452 - protein, 75 aa, Zea mays
  unsure (1)..(75): unsure at all Xaa locations
  Clone ID: MRT4577_18874C.1.pep
WLGFGGXGVGGLGEGETPTVNIYHLFGRQLGYNFYLWRGVIYNWLDQIWEEHKGLRQTPPHTKFFRKKNIKEVIK

SEQ ID NO: 280453 - protein, 249 aa, Zea mays
  Clone ID: MRT4577_18875C.1.pep
LGSGCEWKLLQLPADQCLGSSSYSNFGHLKTLRLWGVTELGSGCGWKLLLHMPEGLRSLISLQSLTVSACSALVVLRVSLPKLHIHICHGLSSLPQSMRQFASLQVLAIDACYGLHRLPECLGELCSLRQLRISDCPRLACLPQSMSGLTSLQQLQIIECQGLASLPRGMMSSLASLENLVVDGCPGIKSLPQDTKGLTTLMGLRIRRCPDLERRCEAGQGEDWHLISHIPTLMIGLSVACIIWYLNQG

SEQ ID NO: 280454 - protein, 132 aa, Zea mays
  Clone ID: MRT4577_18876C.1.pep
LHIASATLKAIGAALQRSLTSPFKGDNGSNTYFKDIMFAVFRANMGNLDLVHDRYLNGGSTTTNYVKYAEQHKFAPDSITLPSGTQAHWLGKSNASKVLVYFHGGSKWRLCSPCWTWPYTLARRLPKISRSR

SEQ ID NO: 280455 - protein, 104 aa, Zea mays
  Clone ID: MRT4577_18877C.1.pep
TTIDVPGPEATKRRKARAVLGELDDEGGRPAATRIKSDAARCAEAASATWAAKWKTMRHSPVSNAAAGDGTWRRWRARTRPSIGDIVEVGRRMQRRGGRDGAGI

SEQ ID NO: 280456 - protein, 82 aa, Zea mays
  Clone ID: MRT4577_18878C.1.pep
VKQRAVKIYLSLLPQQLVQSITENRKNSLIEEESRELLLLFRFKSLSSRELFSDLNHFLPGPEATKRRKARAVLGELDDEGG

SEQ ID NO: 280457 - protein, 90 aa, Zea mays
  Clone ID: MRT4577_18879C.1.pep
IHSARLKTSKSMTTAAMDRHWRRLQATPPPLGAVQYYRELIHSLDTPVQAAPIMVDTEPGQAMAIVGASRSKCYHLITPAQAAYYYRVVG

SEQ ID NO: 280458 - protein, 99 aa, Zea mays
  Clone ID: MRT4577_1887C.1.pep
ANVCWLASVWDAIKAFIYHQLGLEQPQEPTDVLLKLINAFQVLHHIGHLAFVTSMIFLSEMVPNEKVSKETLDRSLDRRNCISMQWPSLSLFTRNAIER

SEQ ID NO: 280459 - protein, 146 aa, Zea mays
  Clone ID: MRT4577_18880C.1.pep
PAGPPRALGGQPTSPPNPNHSGALPPPPRRALPPPQSSRRQSLSLPVATAPPLPSPPCSRPSPPPLRPPPRLPHAMAGGPRPVSPPTSRSPSICPARRSAPHPTPRCSRARRRFCLPHLPAGPISSPPSLVLNPGPRTPSPPALDA

SEQ ID NO: 280460 - protein, 103 aa, Zea mays
  Clone ID: MRT4577_18881C.1.pep
KGKVFSPGPSKWAKNRGGFFFGFLPLFFWWSFSQGGLLSPPFWVLIFQNPAPGGFSSGGANFGRALKKKKKKKKKKKKKKKKKKKKKKKKKKKKKTRKRGPGT

SEQ ID NO: 280461 - protein, 209 aa, Zea mays
  unsure (1)..(209): unsure at all Xaa locations
  Clone ID: MRT4577_18882C.1.pep
EVLQVLTAAIHDPEIRRVCGDVSTEQLLEKMFGVFMDHANLLGDISTIPEVNSPELSECNLYGYIHQYIHLLESDVRVDVLEALNEKIRKRFKTPKLTNSNFAKICKHASLSWCRCILIKLASITPLPESMDTDNQPVPLSNGLLLYVDLQPDELLISSXDGPTQFKGLDMNWFETLARXKNIPIRQTSEDNMETAVTVMKSTYHFYRD

SEQ ID NO: 280462 - protein, 287 aa, Zea mays
  unsure (1)..(287): unsure at all Xaa locations
  Clone ID: MRT4577_18883C.1.pep
TSTSRAAQAFDLVHYDLWTSLVINLSGYKYYLIILDYFSHFLWTFPLRLKSDTLSTLTHFFAWVSTQFCRPIRALQCDNGREFDNSDSCSFLSHGVXLRLSCPYTSPQNGQAKRIIRTTTNMIXACLLFQASLPASYWAKALNTTTHLLNPXPSKAVSHHTPHFALYSTAPSYDHFRVFSCACYPNTSTTAPHKLSPRSTRCLFLGYSPDHKGYHCLDLLSHRVIVSRHVILDKDVFPLAGSTLPPDLDSLLEYDLDPPPMIPPLAPLPTPRAIQAPHHTRPRRPRL

SEQ ID NO: 280463 - protein, 135 aa, Zea mays
  Clone ID: MRT4577_18884C.1.pep
STSFFFFFFFFFFFFFFFFFFFFGNKTLFFSFKRGIQGVGHTGTTPPGGAGPMITPTPARKGPTGWDPGRDPAQGDTPHTRARASRGPTPLQGGRTGSHRIGPGRKIEQVNKPPPKGPEPKKGQAGGAPPEAPPT

SEQ ID NO: 280464 - protein, 123 aa, Zea mays
  Clone ID: MRT4577_18885C.1.pep
IFIFFLLFFFFSCWGFGWKKKLLAGGWGALITNHFPLPLGFCSTLNYFCRYLPGLEWSQSLNGDGPPNIFTYKASNENCCGYGPSPKENFIPGFFFLLGDGVGVVWLFKRKIFIPTLAPDGTF

SEQ ID NO: 280465 - protein, 82 aa, Zea mays
  Clone ID: MRT4577_18886C.1.pep
SSRSCTLKPINFHECYAIQARFDCVHSSALSVRIGAQYILYVAMTLILLGRRMQYVSVIRQDIFCMSTCKVSIGRVAYILYV

SEQ ID NO: 280466 - protein, 59 aa, Zea mays
  Clone ID: MRT4577_18887C.1.pep
VEKKKKKKKKKNFSRATAADSRTGSQGKAGHPQPLPYYPKPLSIRSRCAHAASKPRNRP

SEQ ID NO: 280467 - protein, 111 aa, Zea mays
  unsure (1)..(111): unsure at all Xaa locations
  Clone ID: MRT4577_18888C.1.pep
LVFVVAVSCXXSALLPPLLCLRXWWRLCFPXGFSPALGLXXSSCFLAFGXXLLWAVACSFLLLLVVAASGSXSCSLXSXSSSPAPLSLLLCSVPAWRRRLVWAVLLLLPAR

SEQ ID NO: 280468 - protein, 64 aa, Zea mays
  Clone ID: MRT4577_18889C.1.pep
ASNTKSTKQKCIATPSGILSSCVTSSQVFFVCEPCKHPGLKKISHPLFFCTEGCDGARTRPTNA

SEQ ID NO: 280469 - protein, 112 aa, Zea mays
  Clone ID: MRT4577_1888C.1.pep
CSPPPPPQVARPLWAEGPRLWSGPDHQWKRVQRVGFKRLAFVEGIPGVPLGGRIVFLGPVRIAQNLANRVEVCPFVGPKKTPRSVPPKCFVWIGPQCPGRPPRIKFFPPAGG

SEQ ID NO: 280470 - protein, 73 aa, Zea mays
  Clone ID: MRT4577_18890C.1.pep
MPVSRIAVGSHREVYEVGALKAALAEFISTLIFVFAGQGSGMAFSEFLPLSSQRLILYITTRSLACGSLIRRN

SEQ ID NO: 280471 - protein, 88 aa, Zea mays
  unsure (1)..(88): unsure at all Xaa locations
  Clone ID: MRT4577_18891C.1.pep
PKGGAPPRGXVPKGPPPVGNRIGETRGFPLSPFGPKKLGWVFLPGKGPKPPGGESNKVFVGNTQGKLVAPMLEAPKEWGGKPLPLNIK

SEQ ID NO: 280472 - protein, 203 aa, Zea mays
  unsure (1)..(203): unsure at all Xaa locations
  Clone ID: MRT4577_18892C.1.pep
MARPHDDVINMFEEIHRSRNRKASGHHKKDIPMMNTTSQTCNLTHMIVYRAPSTXSTTTAVPIRYQLYATQLNDSRALKISDMEDQEITVLRMKMXDLCDDVVVIAHKVEYFCRAYSIXYSDYRYSTMEDAQMVYESYLLDLRXAFSFFFICNYLLRIIKSLAXMCNXFMIEPLSEXLMNTRIMHICNEERLNLNVQAMTTLS

SEQ ID NO: 280473 - protein, 70 aa, Zea mays
  Clone ID: MRT4577_18893C.1.pep
HAHRIFRQGKASYDPVGKTRLCGMCTIAISLPPPNDQKRNHQLRNSDPPHATEINDCGRAEDPNDSGLPD

SEQ ID NO: 280474 - protein, 98 aa, Zea mays
  Clone ID: MRT4577_18894C.1.pep
MRARAVRGSSIEGAPFFSFLNTNIRHKGGTFVERRRLDNPPRTPNLIGRPDMGTEGLHDQPPGRDHHLNVNRCVRVQGSIDRLHTWGASILFSEPSTM

SEQ ID NO: 280475 - protein, 216 aa, Zea mays
  unsure (1)..(216): unsure at all Xaa locations
  Clone ID: MRT4577_18895C.1.pep
DKQRLYSRTTYPQETCETCSYQDTSRSKKAVVHSLQRTQGVLANGESSLVYNEVHDLLWACRXICSQTQAPTVTWTXNQTHIILTWHIATCYCEVQTLKCLYPRVGGALKLHLDIATILSKYCAYLVVSAPKLLPGNYYDSSLVFDAVAVEAAQFLQKVEDKYEALRSLPVSTETSILQRGDEVGXQLEEMECXQCLEVLADFWQEMXLYIAPSKM

SEQ ID NO: 280476 - protein, 105 aa, Zea mays
  Clone ID: MRT4577_18896C.1.pep
NFYTGRFFFFFIGTGGEKVGLSHTYLPLTFTTCMRTNLQRAPQTMMMGMRSSLPQDFLDTVFYSKYEERKEKKRPFLFLLKKGLNALHFVWPLGWIKILGDQINI

SEQ ID NO: 280477 - protein, 110 aa, Zea mays
  Clone ID: MRT4577_18897C.1.pep
LQAFAYQHALEPLSYRKIYSGEFCTELITPYYLEPVERWEEIAGTVFQHFELDGHRLISADELAHELNVSPTHYFIVHDWITKSDGMLNFFGFTRILHGVTILGLNTIRH

SEQ ID NO: 280478 - protein, 74 aa, Zea mays
  Clone ID: MRT4577_18898C.1.pep
IKRAPSFFLKFYITLQEPHFFIIYQGLYNIQSPRGVQIFFYKSILFPYQLYNNPPIHLFFGHIKNDNGARLKRG

SEQ ID NO: 280479 - protein, 82 aa, Zea mays
  unsure (1)..(82): unsure at all Xaa locations
  Clone ID: MRT4577_18899C.1.pep
VRPQPMVVVKVERAAHAXVSTVPEVVLGRCPLHGSHSVNPSRTEGATRALRSLPARPRPGRRSLPPRTRRAPSPSPPPQRAA

SEQ ID NO: 280480 - protein, 137 aa, Zea mays
  Clone ID: MRT4577_1889C.1.pep
MAPKAEKKPAEKKPTEEKAEKKPRAEKRVPGKEGGEKKGKKKAKKSVETYKIYIFKVLKQVHPDIGISSKAMSIMNSFINDIFEKLAAEAAKLARYNKKPTITSREIQTSVRLVLPGELAKHAVSEGTKAVTKFTSS

SEQ ID NO: 280481 - protein, 97 aa, Zea mays
  Clone ID: MRT4577_188C.1.pep
IICGERLCSLLAPSPSRAPGSGGAPYGDLSSLGDVLGTGRHSRDFEWEDLKEEVESGPVFSYHLSPFLDPAASTTSPPQPSSEAWRSFHRRHASGKF

SEQ ID NO: 280482 - protein, 64 aa, Zea mays
  Clone ID: MRT4577_18900C.1.pep
KQSKTRGVGTKVFSHNTTTIKKMEDPRTDSKRERRTLLDQNELKPEKRLRRKPKLDSQRKHTHH

SEQ ID NO: 280483 - protein, 101 aa, Zea mays
  Clone ID: MRT4577_18901C.1.pep
FYGTLGAPQNIEFFKKIKNPCTVFRGRVIPPQGGRVYKKPVLFFNCPIFISPQHFPPFFFPRGFKKGCNLGDPQKIPFWHFGIPQFIYVGGGGHQYNRDPF

SEQ ID NO: 280484 - protein, 61 aa, Zea mays
  unsure (1)..(61): unsure at all Xaa locations
  Clone ID: MRT4577_18902C.1.pep
MNCFINDIFEKHAEEADKLRRYNKKSTTHLXETQTYDPLVLTGELFRHAPYEATKGVTKFT

SEQ ID NO: 280485 - protein, 78 aa, Zea mays
  Clone ID: MRT4577_18903C.1.pep
GGTIHIVAPTIYHSRGKPATHPRSPLDVVFSPPCLYLIIGEEMLVKEQNKCEGAAGSHFEGRRVAGRPWRGCPLICVG

SEQ ID NO: 280486 - protein, 260 aa, Zea mays
  Clone ID: MRT4577_18904C.1.pep
VSRHGFHTPEGAKLAKKQVKILGRYFMLSFFRGFFQWFFSGGDDCGFKNFPTLGLEAYKNRFYFDFSPTYVGVGMICPHIVNVSVILGGIISWGIMWPLIGKKKGSWYPASLPESSLHGLQAYRVFISIALILGDGLYNFVKVLIRTIAGFISMVHKNSKAMLPVSDNGSPTAEAMSFDDERRTELFLKDQIPMAVAYGGYAVVASISIGTLPQIFPQLKWYYILVAYVVAPILAFCMAYGSGLTDWSLASTYGKLAIFV

SEQ ID NO: 280487 - protein, 77 aa, Zea mays
  Clone ID: MRT4577_18905C.1.pep
RYTALHTVSLSLSYSHGKNMSLSRRTFGRASRVYTISTVASLSVHTTSIESSFTLLKQLDRTIRSPTSSPLRLRLTL

SEQ ID NO: 280488 - protein, 149 aa, Zea mays
  Clone ID: MRT4577_18906C.1.pep
MIRRYRLDCLLYISLFISCSLSFSYFFFLDPFNSPVESSLCLSNPMFAYVCSTTCFYHGEQVHQLLALSTGSEETPVKVTRSIMIKRPAGYPSSPRSAASTPPASPLGTTPPISPFAGAGGRFRRKSSSDAYERATPPGTTSHPPPFEV

SEQ ID NO: 280489 - protein, 127 aa, Zea mays
  Clone ID: MRT4577_18907C.1.pep
PFWFFSQGGGPPPFPFFLGGSKIPLGQIPLVWPPLCNFNLPPHFSRFFCVRFSRFCLGASLRGAHITKHFFAPHTGFFFFRSPPKKKEAFLKNPLFNVIPVPLVFFHRGEPPVPFIKFCIPPLRGFL

SEQ ID NO: 280490 - protein, 65 aa, Zea mays
  unsure (1)..(65): unsure at all Xaa locations
  Clone ID: MRT4577_18908C.1.pep
ARXKKKKEKKKKKKKKKKKKKKKKKKKKKKKKKGKKKKKKKKKKVKKKPPKKGGGGKSFLFSPPP

SEQ ID NO: 280491 - protein, 43 aa, Zea mays
  Clone ID: MRT4577_18909C.1.pep
TNAPRKHTVTCETAGDAYYIDTLLGQPHLDVLTALFHTTFMMV

SEQ ID NO: 280492 - protein, 76 aa, Zea mays
  Clone ID: MRT4577_1890C.1.pep
FTKVPAGCLHSGEFAELLMDPLPVGTLSTKLGALGNNDPRMVAWGHPGFKAQDQLWLVRWTWPISTRTWRWAPSYI

SEQ ID NO: 280493 - protein, 93 aa, Zea mays
  Clone ID: MRT4577_18910C.1.pep
MPALAKPASRTAKPAAAPKPKPAAAKPKAATAGASHPPYFEMIKEAITALKERTGSSSQAIAKYVGDKHGASLPANFKKMLSIQLQEVPSRRP

SEQ ID NO: 280494 - protein, 170 aa, Zea mays
  Clone ID: MRT4577_18911C.1.pep
MPALAKPASRTAKPAAAPKPKPAAAKPKAATAGASHPPYFEMIKEAITALKERTGSSSQAIAKYVGDKHGASLPANFKKMLTTQRGGSAAKGKLVKVKASYKLSDAAKKASPKTKAKPAKAAAAKTTAPKRKVPEKKVVAKPKKSPAAKAKAKPKTVKSPASKKARKASA

SEQ ID NO: 280495 - protein, 169 aa, Zea mays
  unsure (1)..(169): unsure at all Xaa locations
  Clone ID: MRT4577_18912C.1.pep
MPALAKPASRTAKPAAAPKPKPAAAKPKAATAGASHPPYFEMIKEAITALKERTGXQLRGSAAKGKLVKVKASYKLSDAAKKASPKTKAKPAKAAAAKTTAPKPAKAAAAKSKKAAAAMPKKAAAAGTKRKVPEKKVVAKPKKSPAAKAKAKPKTLKSPASKKARKASA

SEQ ID NO: 280496 - protein, 65 aa, Zea mays
  Clone ID: MRT4577_18913C.1.pep
CALPTADITKANGQTATVLLMLGTGRIIFGCNVVLGEQLLFPAVPLPVGVRTSRLWRVAHLQKTR

SEQ ID NO: 280497 - protein, 208 aa, Zea mays
  unsure (1)..(208): unsure at all Xaa locations
  Clone ID: MRT4577_18914C.1.pep
MPALAKPASRTAKPAAAPKPKPAAAKPKAATAGASHPPYFEVSLVDLRSVFIDXLVSVGIGVDGISCFVVQMIKEAITALKERTGSSSQAIAKYVGDKHGASLPANFKKMLSIQLRGSAAKGKLVKVKASYKLSDAAKKASPKTKAAAAKSKKAAAAKPKKTAAAGTKRKVSEKKVVAKPKKSPAAKAKAKPKTVKSPASKKARKASA

SEQ ID NO: 280498 - protein, 83 aa, Zea mays
  Clone ID: MRT4577_18915C.1.pep
CLMVHVILVADCVILGGSSALILYYEFITSLACEQIDRSHVIFLFWGITFLDNWIGLAHCVVPLLTCPALFSCWNSVHGPLSI

SEQ ID NO: 280499 - protein, 83 aa, Zea mays
  unsure (1)..(83): unsure at all Xaa locations
  Clone ID: MRT4577_18916C.1.pep
AQRSPERRPRQRAVPAPAPARVPRTHGPPRRPRGRPRPRAAPRRRGTPCRGVMSLFAVLIDLCRADLCRRPRVXWLRWHTPAG

SEQ ID NO: 280500 - protein, 196 aa, Zea mays
  Clone ID: MRT4577_18917C.1.pep
MPALAKPASRTAKPAAAPKPKPAAAKPKAATAGASHPPYFEMIKEAITALKERTGSSSQAIAKYVGDKHGASLPANFKKMLSIQLRGSAAKGKLVKVKASYKLSDAAKKASPKTKAKPAKAAAAKTTAPKPAKAAAAKSKKAAAAKPKKAAAAGTKRKVPEKKVVAKPKKSPAAKAKAKPKTVKSPASKKARKASA

SEQ ID NO: 280501 - protein, 344 aa, Zea mays
  unsure (1)..(344): unsure at all Xaa locations
  Clone ID: MRT4577_18918C.1.pep
MARSTSLSEAEAGISCFASSLPGFRGVLKHRYADFIVHEVARDGALVQLTSFDLPTESVGVNEEDKAAPSAEADHSQALESFRSLCGDADCNALRGLLEKVSGEGGGDVSPVILSPDADKAHRSEVHNFFKKTFKFLVTDTVEHSDGVQKCIRVRFGSEAGVGRGAGGRGRGRKRKNMGSSDWRDGRPFDSRGSSNWPDNVGKFLRFHLYKENKDTQEALGVIGKMLGLQPRSFGFAGTKDKRAVTTQQVTVFKVQASKLLALNKRLFGIKVGNFCYVKEGLALGELTGNGITITLXGVTAESEDVCYVLLISFGTSYPNQNVACSDIRQEGSAKKRIQNISIQ

SEQ ID NO: 280502 - protein, 164 aa, Zea mays
  Clone ID: MRT4577_18919C.1.pep
MSAPNDNEHEMTFDSADAGASLTYPMQCSALRKNGFVVIKNRPCKIVDMSTSKTGKHGHAKVHLVATDIFTGKKYEDLSPSTHNMDVPNVSRREYQLLDISDDGFLSLMTDDGDTKDDVPLPDNEVGQKITKLFKEEEKDTNVIVLTSMGEECAMEAKEAPNQG

SEQ ID NO: 280503 - protein, 142 aa, Zea mays
  Clone ID: MRT4577_1891C.1.pep
MKKVVLKLDVHDDRQKQKALKAVSALHGIDNMGVDVKDQKMTVVGSMDPVDVVAKLRKVFPGVDIVSVGPAKEDKKDDKKDGDKKDGGGDKKDGDKDKKDESKQVVYPPHYWYPPPPPQHHHPHPYYFVRSAEEDPNSCVIC

SEQ ID NO: 280504 - protein, 48 aa, Zea mays
  Clone ID: MRT4577_18920C.1.pep
MGGHQLHLSSTAVLGHVTPALRDLYAVGRKLGQGQFGTTYLCTELVHG

SEQ ID NO: 280505 - protein, 94 aa, Zea mays
  Clone ID: MRT4577_18921C.1.pep
KCHIVQEAMLASILQVLTFTLQQPYAILQQASLVHVYLQRIAGQQLQQLLLPTINQAVCANLAAYLHEQQFFPLNQLDGVYPAIYFDAQHLLPF

SEQ ID NO: 280506 - protein, 66 aa, Zea mays
  unsure (1)..(66): unsure at all Xaa locations
  Clone ID: MRT4577_18922C.1.pep
PAARSLIGXGLFRSFFGVFHPRTTPHVTASQGHGNSTEERDGKKEHAWHPGSTTRIDMPLKKRTTP

SEQ ID NO: 280507 - protein, 54 aa, Zea mays
  Clone ID: MRT4577_18923C.1.pep
EGVSPAQPLCKPFVWFVSETKLPPGLVYLLEIIIKNLGWATLWGDNCSYREETQ

SEQ ID NO: 280508 - protein, 62 aa, Zea mays
  Clone ID: MRT4577_18924C.1.pep
LSLVLVCCCFNVQPLCPTFPLLVPNYQFGPSSRSNGLASPLWCHMELFRFLLSWLWPGEMVG

SEQ ID NO: 280509 - protein, 90 aa, Zea mays
  Clone ID: MRT4577_18925C.1.pep
DMELSLLKKGPLQKLVKFFQISLHQYLANILAPFLKIIPNIFWVKNTSVSQWFNTFALSKPCQSNFGGPKSGETCIQKKLGLPLVPPVVF

SEQ ID NO: 280510 - protein, 45 aa, Zea mays
  Clone ID: MRT4577_18926C.1.pep
HLNLDDNKKEILYPQIQGVTYKLKTTKYHDLLALPSHLVIVIVLA

SEQ ID NO: 280511 - protein, 78 aa, Zea mays
  unsure (1)..(78): unsure at all Xaa locations
  Clone ID: MRT4577_18927C.1.pep
FRSESGGTATVILWASXKIFMDGASIVETSFRDTKSEAGGGVDSPPSSATRRKRRQHCSRGSATSSMEDTTGGEGGAE

SEQ ID NO: 280512 - protein, 56 aa, Zea mays
  Clone ID: MRT4577_18928C.1.pep
ARGIYRIPLLPLHGITSPVLVTNIYKHRGYGREYSRIYCYSIDHSRSYCLFTYYSC

SEQ ID NO: 280513 - protein, 114 aa, Zea mays
  Clone ID: MRT4577_18929C.1.pep
RRVTRPASHVRRELAHSSASSSATPHSHQVASKLRARTTNGSIASLSSCSRLSSGRGAAAIQRQPAGTGAVLDLSCTWSAGGTVRAASAAKAVAPAAVELQYNGVSLGTCAEFE

SEQ ID NO: 280514 - protein, 79 aa, Zea mays
  Clone ID: MRT4577_1892C.1.pep
QLTLFIYQPKSAFYTRGFFSLRQVLQDLTQISVLFRFCSIMILFWWRSHITPFFAQVFHISLDSGSRLVLTSSSAMLVY

SEQ ID NO: 280515 - protein, 81 aa, Zea mays
  Clone ID: MRT4577_18930C.1.pep
GGREPWLSAHSLSPGLRSGSGSAASAGYLYNSHECLLTRSARLSAATAKSSLSLSIASMKCSRFQVSIFKITIPQLCTSII

SEQ ID NO: 280516 - protein, 76 aa, Zea mays
  Clone ID: MRT4577_18931C.1.pep
WQKMPRCRRPPSTRRRPLRLFTAVVRRLPAAAYHGSARGIAARSRPSPRPRSGPLPWRAQPRASLHDPWRWRAIRA

SEQ ID NO: 280517 - protein, 66 aa, Zea mays
  Clone ID: MRT4577_18932C.1.pep
RTRGRTLCSPLPMPLRGGSQPCLSSTSYRHGGAASPSELDTALCLPCTITIHPAHTDKTPDLVGSV

SEQ ID NO: 280518 - protein, 91 aa, Zea mays
  Clone ID: MRT4577_18933C.1.pep
ATRAPGSPLAPTKTCSPLEPKLSGRPLLPSPWRSPRRSARWPRHARVKATSGSTWTEATAREHKERKKVQRCGGSYRDEGNNRAPGRFMGT

SEQ ID NO: 280519 - protein, 125 aa, Zea mays
  unsure (1)..(125): unsure at all Xaa locations
  Clone ID: MRT4577_18934C.1.pep
MSGYRLLQYSSMATNIFFLLMLLALSACVANATLFPQCIQAPIASLLPPYLPSMIARVCENPALQPYRLQQGIAESNIPXSPLGXQSTGLSLXQALGQTMRXQQXXXLXLPCINQKGLXTLSAYS

SEQ ID NO: 280520 - protein, 94 aa, Zea mays
  Clone ID: MRT4577_18935C.1.pep
GGVACLGRRWVGPQQVSADNQVQTVIGLQGPRAAIRGPEDIVFVQSMFGRLRGNNACLSCRQPPLESRAAWEFGSAEPVFPCCRKHRTKAGPRG

SEQ ID NO: 280521 - protein, 68 aa, Zea mays
  Clone ID: MRT4577_18936C.1.pep
FQCVTKCEDESALSRCHNADLFSLLMECAFVCLRLLCGYRQGNRICHGRYVHITVNVVRRTCTLWSGL

SEQ ID NO: 280522 - protein, 76 aa, Zea mays
  unsure (1)..(76): unsure at all Xaa locations
  Clone ID: MRT4577_18937C.1.pep
SEXVGFXGGXCREGDARRXRPFAELANGCXAIMGRARRPXXTYXGFXAPXAGWGXQGGARWXGLEVRGXDTSRXPP

SEQ ID NO: 280523 - protein, 126 aa, Zea mays
  Clone ID: MRT4577_18939C.1.pep
LCATGFVLPLRYHHPLHPRRQSPLCSATCFSSRPGPLLAGALDSGSLHRPPLVCALDPPVLILSASCSRALRDIGSKTGTQERHEEDAACACVELHSTLSCLHRTCSVFTALSSLRVSLLSGYAIA

SEQ ID NO: 280524 - protein, 117 aa, Zea mays
  unsure (1)..(117): unsure at all Xaa locations
  Clone ID: MRT4577_1893C.1.pep
KKKKKATIDRPENQADRASEKLQAPGDQTPEIDRKSTGAHEGGSPQTXTYPKGFAVKFYTRQGNMDLAGNNMPVVVIRDGMNIPDMGHTLKPNPKTNLQENMKNIKIFFFNHSREPT

SEQ ID NO: 280525 - protein, 171 aa, Zea mays
  Clone ID: MRT4577_18940C.1.pep
AAGPSPPGCAASSLAWEGCFGCCAKPTPIIAVDEPSKRLRIQGRSVRKASLSEDFWSTSAHEMENSGIQSQRSMSSISTLAQSSDQHASGSCSNPNEFMNQGLMLWNQTRQQWVGSKKRHSRSQQPREPKLSWNTTYESLLGSNKPFSQPIPLGEMVDLLVDAWEQEGLYD

SEQ ID NO: 280526 - protein, 34 aa, Zea mays
  Clone ID: MRT4577_18941C.1.pep
IRGRTAVTSLSMYVLGQNHQFIASFNVLNSDAVA

SEQ ID NO: 280527 - protein, 64 aa, Zea mays
  Clone ID: MRT4577_18942C.1.pep
LLLKYYRRPVSACTTRLSQRTAHSWLPSSLWPAVLDIYSVFGLMVWLIHRGLAPDEVVLHFLAE

SEQ ID NO: 280528 - protein, 56 aa, Zea mays
  Clone ID: MRT4577_18943C.1.pep
SCRPCVVPALQESPVDGAEGLQALAAQDGRSCTASCSAIQTVKPALEAAPEVVSPA

SEQ ID NO: 280529 - protein, 185 aa, Zea mays
  Clone ID: MRT4577_18944C.1.pep
MAKAAATANAILLLALFFAGAHANVPCILPVCKTVGGGSRFFDVQFCLAALGSDGRSVDHCLDYQVYSAIAADLLAANLTATAAKINGLLRKSGGSADEATTRCLRSCQALYGDMERRQTGCAAAVRGVRKGEATRCLEEVASAAEECEDGFQRSKVASPVMAENQQVFKLAKLAVALLRTVYAR

SEQ ID NO: 280530 - protein, 126 aa, Zea mays
  Clone ID: MRT4577_18945C.1.pep
LGDDDLDLSRTRHSILHVPHPVVPVLDLALEIPVIRVTLRILMTARWIEGRRRQSTKRGDCPAARQLRQEICTAPGFFTWNWWCSQCGFLRPSTARLMDSRGTVASLKKSAWTRSWCGGPHLSPLR

SEQ ID NO: 280531 - protein, 79 aa, Zea mays
  Clone ID: MRT4577_18946C.1.pep
LQSGICIHHFSHYTIDTLYHVQDLHTTLSEISTIWSLLRATTTDPTTRCDCINRRSDLSKLVLHLLMVLSNYITRYTMM

SEQ ID NO: 280532 - protein, 132 aa, Zea mays
  unsure (1)..(132): unsure at all Xaa locations
  Clone ID: MRT4577_18947C.1.pep
QFHGAKELFLSDHFDLQSAHTIEGKCVVHSFKNYTRLDNVGPEDFFCRFEYKAATGSFTPDRVAVYXLLNPSIAGCPFYCACIFSLLVMISAPGFSQXCKCEMPYNPDDLMVQCDACKHWYICYNDLQFTFH

SEQ ID NO: 280533 - protein, 46 aa, Zea mays
  Clone ID: MRT4577_18948C.1.pep
QCVTRCYSWHYSAVPQPTGLAESENPTVDPIGYNRQSIVVSYLDHP

SEQ ID NO: 280534 - protein, 263 aa, Zea mays
  unsure (1)..(263): unsure at all Xaa locations
  Clone ID: MRT4577_18949C.1.pep
ARLRSCKITISSRPITNGQNRVFFGARLHSFPVVAAQSTRSRLASPGAHAAASPGARAAASPCLELAQPPRLDLVLGLEPGSSHSRLYPRLELALGFLSQPPLLRCYLQKRVLNSSKGPAICALRAQPDKREYAIEMKNSVESTENLFIREAMATEVLIGKNXDTIEGVCTFFSMDXYAPSVVLSTRTFMSVSGAKLLGSWGVDLPIRPLHTLHLYWRVKPGQEQTVSTSAGFPTFSSYGDPPVYGAPSLELPGLIKISCIRS

SEQ ID NO: 280535 - protein, 56 aa, Zea mays
  Clone ID: MRT4577_1894C.1.pep
VRGCSISPIMNLPPGEIVSLPSFPIPVALYGKTLRWVCLYRGHLVKFLYTSYSPCP

SEQ ID NO: 280536 - protein, 250 aa, Zea mays
  unsure (1)..(250): unsure at all Xaa locations
  Clone ID: MRT4577_18950C.1.pep
MLLRLRPPRHPSTAAATTLSSFLPSTSFRRLIPLPRWRPPPRRRLSAAAKDSSGRLDPRQERYDVIVVGGGHAGCEAALASARLGARTLLLTLNIDRIAWQPCNPAVGGPAKSQLVHEVDALGGEIGKITDRCYLQKRVLNSSKGPAVRALRAQTDKREYAIEMKNSVESTENLFIREAMATEVLIGKNDSIEGVRTFFGMDFYAPSVVLTTGTFMSGKXIGVGRTSMPCWRAGESASHGLTENWQVLGF

SEQ ID NO: 280537 - protein, 64 aa, Zea mays
  unsure (1)..(64): unsure at all Xaa locations
  Clone ID: MRT4577_18951C.1.pep
PHSSRPGSCSSCAGKVVSGSVYQSDQSSLDEGQISQTXALTPHAYPTSDVVLDTPKEQEPTGAK

SEQ ID NO: 280538 - protein, 148 aa, Zea mays
  unsure (1)..(148): unsure at all Xaa locations
  Clone ID: MRT4577_18952C.1.pep
RDPAXARLPAATRTTPAXXXXGPGPRGAGAGPXXAXPARXPXNPPYDXXAXRGSPXKEXSXXRGRTGRXXTDXXTXADTDXXXXGAGSAGLXXAXEXAKGPAXXXRPXEQXXXPGGGAGXGGQXGXAPGGRKPAXXGRDEXGGAGRRA

SEQ ID NO: 280539 - protein, 99 aa, Zea mays
  Clone ID: MRT4577_18953C.1.pep
EKLGCSLDIRLEIIHFLCLQHSSEILDVLFDVRHNMHFLSKGGCSCRLECVSNIIRLHSCCHQRSRPPLPRRMDCPQCPHHLGPWVNHFPLDLPTGTPF

SEQ ID NO: 280540 - protein, 89 aa, Zea mays
  Clone ID: MRT4577_18954C.1.pep
SYTTMADGAITSTARFVMTVDPHYNSLGNLLCGGKREQRAGRTIPRAGRSRPSKATEGVAVPLPRSLIFRSLQHGRQAAAVREVEFVER

SEQ ID NO: 280541 - protein, 87 aa, Zea mays
  unsure (1)..(87): unsure at all Xaa locations
  Clone ID: MRT4577_18955C.1.pep
GQSETHGNQQGAVQAWQVXRGTGXKRVGETTPQTKKKYPKLANWPMTNPQGGGRGSLGAALSARRETRADVVFTVWSMPDTSVMNWL

SEQ ID NO: 280542 - protein, 86 aa, Zea mays
  unsure (1)..(86): unsure at all Xaa locations
  Clone ID: MRT4577_18956C.1.pep
DXGXWXTXRRLGCKXARXSDFXXRGGVGXRGPRRLAXSSRLRXFFLASXSHXXVVTPSACXXXLXAXFQFHLFFFLWXCYLILPAL

SEQ ID NO: 280543 - protein, 222 aa, Zea mays
  Clone ID: MRT4577_18957C.1.pep
MKVSSMSCLRILLLVPLFLSSGMSGCLASSSSASSGCSCGDSTAHDLSSFTSDSAAELVLLKDAGISNGVLHLTADSSRNRNRSGAALMPGPVTLWCQDPDDDAEAKQDASFEASFTMGIVSNPSPDEEGAVQRKGDAGGGGGGLALVMVASLNSPALGILGLSNNPSDQVSSSSASSGFVTFTFNTVKLKQSNGDPDDSNGTVINLDVVGSVSGAVFARSP

SEQ ID NO: 280544 - protein, 93 aa, Zea mays
  unsure (1)..(93): unsure at all Xaa locations
  Clone ID: MRT4577_18958C.1.pep
KVRXXXXXXPXTPTTXNLTHXXQQPPXNQRNTHEXXXXXXLSFLLHLITXXQGALIINPLQRYXYASHSHLLTCFFSFKLVPLKLYFDPATRQ

SEQ ID NO: 280545 - protein, 53 aa, Zea mays
  Clone ID: MRT4577_18959C.1.pep
KTWVFSGLLVWFQSTPGFRPCKKPFGISKQLQISRGRLNFGLCIFSKIFGSFF

SEQ ID NO: 280546 - protein, 131 aa, Zea mays
  unsure (1)..(131): unsure at all Xaa locations
  Clone ID: MRT4577_1895C.1.pep
LHYHPHRGDKTGGYMXEGAATHKDXAXGQRGTIKAGDEQRMTGRRGIVQHETPAXGPAPHRGTEDRGNLYNMNRRTAPDHQETQSKDKGSTQHGYQSGTVRMIDEQTMGVRSQXHTQTATTVLGLTARPHR

SEQ ID NO: 280547 - protein, 171 aa, Zea mays
  unsure (1)..(171): unsure at all Xaa locations
  Clone ID: MRT4577_18960C.1.pep
MDFSTGGSVRAAEAPRPRAGERWLEIAEKLLXARDLVGCKXFAXXSVEANPLLAGVEXLLAVADVLLXSQFMGTSGQPDXLAILQLPPGVSPDQAAVSRAFRRLALLLGPSNPXPGAEMALRLVNDAYAFLSDXSRRPPPPADPATXXPYSSQYPAXAAPASDTPEFWTAC

SEQ ID NO: 280548 - protein, 151 aa, Zea mays
  unsure (1)..(151): unsure at all Xaa locations
  Clone ID: MRT4577_18961C.1.pep
MGTYKCCLVFKRRYRWTDAPPPDDVRALFAVHSGGAATMGADGLRRYLESSXPTPPTTPRARRTACWTRSACRDTSTSAPARASRASAAASCXLDDFHRFLFSADLNPPVRRPQVHHDMSQPLSHYYVYTGHNSYLTGNQLSSDCSDVPII

SEQ ID NO: 280549 - protein, 144 aa, Zea mays
  unsure (1)..(144): unsure at all Xaa locations
  Clone ID: MRT4577_18962C.1.pep
SRCCRLGSVWLAFLLLRACCGALCPRGWRFLVLRSWXAPXAXGLCAVGVLWRSLVCVASXPXPXXADAGGPCPPVGVGVLWSCRGVSPPVKSRVLGGVWSARLXSSGCPLSGFGGACSSSPSLVXRGXSVPALSAPRXSGRSAA

SEQ ID NO: 280550 - protein, 83 aa, Zea mays
  unsure (1)..(83): unsure at all Xaa locations
  Clone ID: MRT4577_18963C.1.pep
FLAGSGDPSYPXGPLFNPLGLGKTKKEMNKLKPKEIKNGRLPMLPTLGYFIQGLVTGVGPFQNRLAPPPDPVNNKVLPSLKFH

SEQ ID NO: 280551 - protein, 62 aa, Zea mays
  Clone ID: MRT4577_18964C.1.pep
SPVVVPAAISIALAVGAVLASGLFGLGGLGSVSGVLGVLGGTSGTVGGGVGDAKRRVADALG

SEQ ID NO: 280552 - protein, 53 aa, Zea mays
  Clone ID: MRT4577_18965C.1.pep
GCWATALVVRPTRIKKLGYFKTVVQELFCFPAKLNRSGLSEGVNQKCHVCIRL

SEQ ID NO: 280553 - protein, 120 aa, Zea mays
  unsure (1)..(120): unsure at all Xaa locations
  Clone ID: MRT4577_18966C.1.pep
RGSCLLSVGRPVARFLRARAFRSARVPSLLRGVAPSVGFPGXFVCVXXVXCVGSXXWCGXCPVLWFFGLFVPFPFVXGFLXCAVFXPVVLLLCVXGVARVVWGXFSWLPPFGFFXXPKVG

SEQ ID NO: 280554 - protein, 52 aa, Zea mays
  Clone ID: MRT4577_18967C.1.pep
KPIVSNMQPKICFLALGFCSVYRPFPHVQLYVPFPIPYRGLMGNQCNLRPTE

SEQ ID NO: 280555 - protein, 282 aa, Zea mays
  Clone ID: MRT4577_18968C.1.pep
MDQAADSSELLRRIEELQREKDEKQNSLELLLRRIEGLQYEMDEKVDLVEVLTRQVENLQRERDELRKDIEQLCMQQAGPGYVSVATRMLTQRTAALEQDIENLQKKLGGCLRENQNLQEELAEAYRIKSQLAELHGAALSKNKDLEKQVRFFQSSVAQAFAERDSSLMECEKAKEREEAVSRKFADFEERMREYQSEIDEQKHLNDDLQRELTELKAHTELSLKVILKFYDLRCRDSGCSSSLTIEEKCSILLGDSADNWSFSSDGGTSTLKYIVNHPYPL

SEQ ID NO: 280556 - protein, 286 aa, Zea mays
  unsure (1)..(286): unsure at all Xaa locations
  Clone ID: MRT4577_18969C.1.pep
MRDRPAAGCIVHPAALAGFVRARAAGTASASCRFSYGKALAACATASAPFAFAEQRGCAACFYGLSRDAYICSTMVDLLAKHGRLGDALRAFEDGEYRGSVVCWNTAISGAVRNGEHALGVEMFLDMVRGSTCEPNSFTYSGVLSACAAGEELGVGRAVHGMVLRRDSEYDVFVGTSIVNMYVKCGQMGAAMNEFWRMPIRNVVSWTTAIAGFVQQEDPVNAMLLLTEMLRSGVAINKYTATSILLACSQTSMIREANXVHGMIIKSELYLDHXVKXALIXTYANA

SEQ ID NO: 280557 - protein, 59 aa, Zea mays
  Clone ID: MRT4577_1896C.1.pep
LCCDFSLVLFLFLGFFFFFFFFFFFFFSQSSFFPYTLHSLSHFKWFIQVIAHTATHGDG

SEQ ID NO: 280558 - protein, 74 aa, Zea mays
  Clone ID: MRT4577_18970C.1.pep
VQPSHNSQYQIMMSEQQCIHVHLIVRVVYGGVSLLTELMYAAGMVHQGDSAYTVYMLGEPPSLVKAPPWSVVAE

SEQ ID NO: 280559 - protein, 47 aa, Zea mays
  Clone ID: MRT4577_18971C.1.pep
TQPKRPQKKVVGKPKKFPPPKGKAKPKTVKFPASQKARKAPALKGVL

SEQ ID NO: 280560 - protein, 46 aa, Zea mays
  Clone ID: MRT4577_18972C.1.pep
ARYCYALCSLRMLYVSAKSSIIAQCSHASIAFLLTLYFSSMIALVC

SEQ ID NO: 280561 - protein, 302 aa, Zea mays
  Clone ID: MRT4577_18973C.1.pep
MATPTATALTCSCRPSSPSSSSAAFRRLNIFAPVSGAHSPPRRRLRLAPLHVVDDSKNPPEERSETDKMVDGMDFGELCSDFECISSPYVESTARQVARDILELREDNRAFNCYAVSVKYKDPLRTFVGREKYRRPLWITKALENPVVTVQEMSMQSTSNLTIRWALRGKPKNPLFASVGGDVIVRVESRFVLNQISGQVLEQAESWDLSASSLPAQAYFWLSRRVYSAVESGKDAIEAAKSAASSGLTTKGDQNLEAYPDPSADPTKFFQRPDDGFSQDVYQIGLLLAVIYFIVQFLKATL

SEQ ID NO: 280562 - protein, 80 aa, Zea mays
  Clone ID: MRT4577_18974C.1.pep
CDVAVCVLSSSCVWNISWADDLGDLVLVQVRYTVEKDTGLLSSGAWRVAAIDDLDQSSQALQVSARVIQDMGIKHQFRSL

SEQ ID NO: 280563 - protein, 188 aa, Zea mays
  Clone ID: MRT4577_18975C.1.pep
MVNLRTQKRLASAVIGCGERKIWLDPNEQSEISNANSRQTIRKLISDGLIIRKPVTQHSRSRARELNLARREGRHRGYGKRKGTADARMPSQVLWMRRLRVLRRLLVKYRASGKIDKHLYHELYHSSKGNAFKHKRALVEHIHRAKAEKARETALQEEMDAKRAKNKAARERKQERAAAKRNALLAEE

SEQ ID NO: 280564 - protein, 93 aa, Zea mays
  Clone ID: MRT4577_18976C.1.pep
SKKECDEVFIKVGSDKYKNKFNAERYERTNKSVSISEFLKPPEVVRYDADRASEMGRGDRGGFRGGCGGGYSSGPAAAAPAIEDQAQFPSLGG

SEQ ID NO: 280565 - protein, 78 aa, Zea mays
  Clone ID: MRT4577_18977C.1.pep
MEMGGDEMMMTLGATGRIVPVFRSVMSRRALLRLAVALHSLFLWLLLLVGRRRRPDAASPEEPGRLLNARRRSRDEEG

SEQ ID NO: 280566 - protein, 55 aa, Zea mays
  unsure (1)..(55): unsure at all Xaa locations
  Clone ID: MRT4577_18978C.1.pep
KKLVLFGRACRSVEEASVVETLPVXCWEGGGEQFREGDAQVKNAGHQSINDAVGP

SEQ ID NO: 280567 - protein, 90 aa, Zea mays
  Clone ID: MRT4577_18979C.1.pep
MFFSAALRARAAGLTAHWGRHVRNLHKTAMQNGAGGALFVHRDTPENNPETPFDFTPENYKRIEAIVKNYPEGHKAAAVLPVLDLAQRQN

SEQ ID NO: 280568 - protein, 62 aa, Zea mays
  Clone ID: MRT4577_1897C.1.pep
DGFLRGKKKEKKPALPFKKGRPGGGSSLNSRGGKNRYPRVYSLGQKNLKKLLVVDLTIAIDG

SEQ ID NO: 280569 - protein, 53 aa, Zea mays
  Clone ID: MRT4577_18980C.1.pep
YVSSFQASMLKVETKNKINNFQQIKVSVTPELPIQIIYYQLETRTKHHPSRKV

SEQ ID NO: 280570 - protein, 41 aa, Zea mays
  Clone ID: MRT4577_18981C.1.pep
LVRSLLSNSKSIMPSSMKSAYLRFQRPSSIKSTRLVVRSFI

SEQ ID NO: 280571 - protein, 70 aa, Zea mays
  Clone ID: MRT4577_18982C.1.pep
MPEWFQKHGIPQTNQSVLTGRIIDERRRRLKSDVVEMLTCIKNWEDAEARMQHMVDDKELEETFENVYLD

SEQ ID NO: 280572 - protein, 42 aa, Zea mays
  Clone ID: MRT4577_18983C.1.pep
PSSGYREPRHALGRRLLVGAHHIVAALLVIYERETQRQHERH

SEQ ID NO: 280573 - protein, 123 aa, Zea mays
  Clone ID: MRT4577_18984C.1.pep
FAGVCGFKPEDGNMACHTDAAVQGSDRVGALSLFSARCICSTCTMHDDEVSCLHAVVAAGALVNLIPLLWRWSVAGPGRQPALPWRFGWFKPRFYSTRTEATDSVSTGWFYELHWFAINGEQP

SEQ ID NO: 280574 - protein, 311 aa, Zea mays
  Clone ID: MRT4577_18985C.1.pep
MAATEVYSPTTAAAAQQQRGKAASQAWRAVVGWIGFFLQVLLQILRGTPSCAQLLSFVGFRYPLLSGPAASEPLPEVAFMPLHSEIPADAAPAPKPASEPLGRLTVVLDLDETLVSAYESSSLPAIVRTQAVEAGLHCFDMECISSDKDVEGKQKVNHVTVFERPGLHEFLRKTSEFADLILFTAGLEGYARPLVDRIDVHNRFRLRLYRPSTVTTEYREHVKDLTRVSKDFGRIVIVDNNPFSFILQPLNGIPCVPFSAGQHSDDQLMTVIFPLLKHLSLQKDVRPVLRERFHMPEWFQNHGIPQVSQAV

SEQ ID NO: 280575 - protein, 63 aa, Zea mays
  unsure (1)..(63): unsure at all Xaa locations
  Clone ID: MRT4577_18986C.1.pep
PLNGIPXVPFQLXQHSDDQLMTVIFPLLKHLSLQKDVRPVLRERFHMPEWFQNHGIPQISQAV

SEQ ID NO: 280576 - protein, 311 aa, Zea mays
  unsure (1)..(311): unsure at all Xaa locations
  Clone ID: MRT4577_18987C.1.pep
MAAAEVYSPTAAAAAQQQREKAASQAWRTVVGWIGFLVQVLLQILRGTPSCAQLLSFVGVRYPLLSGPTALNPSSALSFLPSRFVLLPPPASSALLRRSRLAGLLRGGDRDDRGPSAWQWSXIGTTFRTXLCDAVGHCFDMECISSDKDAEGKQKVNHVTVFERPGLHEFLQKTSEFADLILFTAGLEGYARPLVDRIDVHNRFRLRLYRPSTVTTEYREHVKDLSCVSKDFGRIVIVDNNPFSFILQPLNGIPCVPFSAGQHSDDQLMMVIFPLLKHLSLQKDVRPVLHERFHMPEWFQKHGIPQTNQSV

SEQ ID NO: 280577 - protein, 63 aa, Zea mays
  Clone ID: MRT4577_18988C.1.pep
RAVFQRIHHWFWWWCDQRMMTYQLFFRRPLGTEDGRYQIVLKGQRLTEGYITHLNIEADRPTR

SEQ ID NO: 280578 - protein, 61 aa, Zea mays
  Clone ID: MRT4577_18989C.1.pep
SSPSTWSRVTFYCLRSYIFFLPSLKLTLFDGTFHHYCCHNLPFTQLFSTVLHTICFPFRYF

SEQ ID NO: 280579 - protein, 72 aa, Zea mays
  Clone ID: MRT4577_1898C.1.pep
PASGGKNHEKKGARGAKSRIRAPPPGGAGGRKPRLGPPPPNPRSAKGRRLVGFLYTPVVAPYLGGPLKGFRS

SEQ ID NO: 280580 - protein, 62 aa, Zea mays
  Clone ID: MRT4577_18990C.1.pep
HSVKHSLPSACRVTSLIVFKKNKTIFVKCLSYCTPLRQLWRLSLPGHSDMPSFKIKYHFDYC

SEQ ID NO: 280581 - protein, 153 aa, Zea mays
  Clone ID: MRT4577_18991C.1.pep
WPGGSSRLRRCVGLPDSDGQRPSWVPCPRNPGRREERTPIAFSSCTIRLTVSSSCLAHTPGPWAGACRTVGGLTKPYDLSCIPRLGVCLPLRRIERCEELWRTAAPIHLVRLALLWPLSLEHQHRRPPEAVDLGSTQPEQQHYLPGAAPSTST

SEQ ID NO: 280582 - protein, 261 aa, Zea mays
  unsure (1)..(261): unsure at all Xaa locations
  Clone ID: MRT4577_18992C.1.pep
MAASALHLRLHPSPPAGVKLQQRQLRSKIQRQGGLSRRFSKVVSYYGLTTPPYKLDALEPYMSKRTVELHWGKHHQDYVDGLNNQLATSPLYGYTLEDLIKEAYNNGNPLPEYNNAAQVWNHHFFWESMQPEGGGLPEGGVLQQIEKDFGSFTNFREEFIRSALQLLGSGWVWLVCEFLSIFSEVQAPLIQATDFLNCSFYSKFISSVYIPLXFVAVKRNERKLSVVHTRNAISPLAFGDIPIISLDLWEHAYYLDYKSLL

SEQ ID NO: 280583 - protein, 77 aa, Zea mays
  unsure (1)..(77): unsure at all Xaa locations
  Clone ID: MRT4577_18993C.1.pep
FSFDNGTKXRGRFKYTCGRLHKYSIXSPKFNSLSYALQLQNWKNHAPTQLYLLATHFLFTSLHYTKHPPNNHPSQQN

SEQ ID NO: 280584 - protein, 146 aa, Zea mays
  Clone ID: MRT4577_18994C.1.pep
MGYAEIAIRPSGSGKKIQRQGGLSRRFSNVSYYGLTTPPYKLDALEPYMSKRTVELHWGKHHQDYMDGLNNQLATSPLYGYTLEDLIKEAYNNDNPLPEYNNTAQDDKLTYVTNFMDHLVSWHTVTLRMMRAESFVNLGEPNILEA

SEQ ID NO: 280585 - protein, 179 aa, Zea mays
  unsure (1)..(179): unsure at all Xaa locations
  Clone ID: MRT4577_18995C.1.pep
MGYAEIAIRPSGSGKKIQRQGGLSRRFSNVSYYGLTTPPYKLDALEPYMSKRTVELHWGKHHQDYMDGLNNQLATSPLYGYTLEDLIKKAYNNDNPLPEYNNTAQXKRNERKLLVVHTRNAISPLAFGDIHAYYLDYKDDKLTYVTNFMDHLVSWHTVTLRMMRAESFVNLGEPNILEA

SEQ ID NO: 280586 - protein, 56 aa, Zea mays
  unsure (1)..(56): unsure at all Xaa locations
  Clone ID: MRT4577_18996C.1.pep
RRSXARXDSPXLLAATPFFSPLAGRPLPLWQPSSIASSPKISPYAQRINKRRGTMN

SEQ ID NO: 280587 - protein, 155 aa, Zea mays
  Clone ID: MRT4577_18997C.1.pep
QRQLRSKIQRQGGLSRRFSKVVSYYGLTTPPYKLDALEPYMSKRTVELHWGKHHQDYVDGLNNQLATSPLYGYTLEDLIKEAYNNGNPLPEYNNAAQPIISLDLWEHAYYLDYKDDKLTYVTNFMDHLVSWHTVTLRMMRAESFVNLGEPNIPEA

SEQ ID NO: 280588 - protein, 493 aa, Zea mays
  Clone ID: MRT4577_18998C.1.pep
CFAMTELGHGSSVRGIETIATYDSETREFIINTPCESAQKYWIGGAANHATHTIVFCQLHINGRNEGVHAFVAQIRDEDGTVLPNIHIADCGHKIGLNGVDNGRIWFQNIRVPRENLLNLVADVLPDGRYVSMIDNPDQRFAAFLSPLTLGRVNIAVNSVYISKVSLAIAVRYSLSRRAFSIAPDAPEMLLLDYPSHQRRLLPLLAKVCLMSSAGNFMKNMYVKRTPEMSKDIHIYSSALKATLTWQNMITIQECREACGGQGLKTENRIGIFKSEFDVQSTFEGDNNVLMQQVSKALYAEFLGAQKKQQPFKGLGLEHLNGSSPVIPDKLTSSILRSSKFQMDLFCLRERDLLKQFVEEVSLHLAQGESREKALMLSYQVAEDLARAFTERTILQIFLEDEMNVPSGSLKEVLGLLRSLYVMVNIDESTSFLRYGHLSRDNVALVRKEVLKLCSELRPHALAVVSSFGIPDAFLSPLAFDWIEANALSTGSH

SEQ ID NO: 280589 - protein, 111 aa, Zea mays
  unsure (1)..(111): unsure at all Xaa locations
  Clone ID: MRT4577_18999C.1.pep
NSLAHITRVLARLLITSPLYGYTLEDLIKEAYNNGNPLPEXFGSFTNFREEFIRSALQLLGSGWVWLVCEFLSIFSEVQAPLIQATDFLNCSFYSKFISSVYIPLNICCSE

SEQ ID NO: 280590 - protein, 88 aa, Zea mays
  Clone ID: MRT4577_1899C.1.pep
LYILGLESNNYLISNITIIKITYLTTILKHLIHTYFQLKQFQHFPHTSLQLYDDSPSIDQKTTSLSTLIYLTPNIPFVTLLTPLSSHS

SEQ ID NO: 280591 - protein, 97 aa, Zea mays
  Clone ID: MRT4577_189C.1.pep
IETFVQKEVLQQTCVSLQKAMGEEIHLLESQLDQSKIHFAHLLNQTQEKEQLIGKLKNEELNVLLRLMSEVLKTNSTVRELRIGFNTLQSSLYMSLK

SEQ ID NO: 280592 - protein, 156 aa, Zea mays
  Clone ID: MRT4577_18C.1.pep
MDNFRKIDIDQYDEDVISNDELVEPYPKASEQALADAKAKSTEVRSLIGRSDTAGALALVLSDYPYGPNVEEAKHVTLQSLLEIVNSTKSSDIPAAVKSISIDQRDALMKYLYKGLELGGEGEGINCAVLLGWHERLTEVAGTGCIVRVMSDRRTV

SEQ ID NO: 280593 - protein, 99 aa, Zea mays
  Clone ID: MRT4577_19000C.1.pep
PNGRLRHARPWTDTLRELGVGRPIHSVAHHTTVNEHQPRNALALVIPILGGTVHFLYIRMYRGHMMITEGGVSTRAGPTSVGLAGRDRDCKALSYRLTH

SEQ ID NO: 280594 - protein, 202 aa, Zea mays
  unsure (1)..(202): unsure at all Xaa locations
  Clone ID: MRT4577_19001C.1.pep
KLNGSSPVIPDKLTSSILRSSKFQMDLFCLRERDLLKQFVEEVSLHLAQGESREXFDAGKIQISLCTIFRCSIVSLFXLIQVTFSQSYQVAEDLARAFTERTILQIFLEDEMNVPSGSLKEVLGLLRSLYVMVNIDESTSFLRYGHLSRDNVALVRKEVLKLCSELRPHALAVVSSFGIPDAFLSPLAFDWIEANALSTGSH

SEQ ID NO: 280595 - protein, 258 aa, Zea mays
  Clone ID: MRT4577_19002C.1.pep
MAASALHLRLHPSPPAGVKLQQRQLRSKIQRQGGLSRRFSKVVSYYGLTTPPYKLDALEPYMSKRTVELHWGKHHQDYVDGLNNQLATSPLYGYTLEDLIKEAYNNGNPLPEYNNAAQVWNHHFFWESMQPEGGGLPEGGVLQQIEKDFGSFTNFREEFIRSALQLLGSGWVWLVLKRNERKLSVVHTRNAISPLAFGDIPIISLDLWEHAYYLDYKDDKLTYVTNFMDHLVSWHTVTLRMMRAESFVNLGEPNIPEA

SEQ ID NO: 280596 - protein, 258 aa, Zea mays
  Clone ID: MRT4577_19003C.1.pep
MAASALHLRLHPSPPAGVKLQQRKLRSKIQRQGGLSRRFSKVVSYYGLTTPPYKLDALEPYMSKRTVELHWGKHHQDYVDGLNKQLATSPLYGYTLEDLIKEAYNNGNPLPEYNNAAQVWNHHFFWESMQPEGGGLPEGGVLQQIEKDFGSFTNFREEFIRSALQLLGSGWVWLVLKRNERKLSVVHTRNAISPLAFGDIPIISLDLWEHAYYLDYKDDKLTYVTNFMDHLVSWHTVTLRMMRAESFVNLGEPNIPEA

SEQ ID NO: 280597 - protein, 199 aa, Zea mays
  unsure (1)..(199): unsure at all Xaa locations
  Clone ID: MRT4577_19004C.1.pep
MAASALHLRLHPSPPAGVKLQQRKLRSKIQRQGGLSRRFSKVVSYYGLTTPPYKLDALEPYMSKRTVELHWGKHHQDYVDGLNKQLATSPLYGYTLEDLIKEAYNNGNPLPEYNDAAQVWNHHFFWESMQPEGGGLPXXGVLQQIEKDFGFTNFREEFIRSALQLLGSGWVWLVCEFLSIFSEVQAPLIQATDFLNCSF

SEQ ID NO: 280598 - protein, 51 aa, Zea mays
  Clone ID: MRT4577_19005C.1.pep
APNHPLLLSFLFVSVNQPSRSTATDASISNPLNLPTNSVLEYLSLATSFLN

SEQ ID NO: 280599 - protein, 137 aa, Zea mays
  Clone ID: MRT4577_19006C.1.pep
FGGKNTGLRGPGHFTLGGCLTILEALLQLPNSFFFSWSKISLTRVGCPSNRGVFSHNFVFQLGVWISPKGARIAPPRFFWRPPGFLRPPDPARAPTPEGFSPPPSALVPSPSSLSFPGLLYGVFSSLLRLPSPPYGV

SEQ ID NO: 280600 - protein, 197 aa, Zea mays
  Clone ID: MRT4577_19007C.1.pep
MSSAPPPPPSLNPEAPPRIVRAPPRRPPPRAPGPPPWAERRPAVSVDLDRGRRSVRTEVDGVRTASLPARHRLRVEGNRWQRDWKVSEVVARLLALPRADADAVDAVLNCWAGRFARRNFPLLIREIAISGSLKHAVHVFRWMKNQENYCARNDIYGMMIRLHARHNQVDQARGLFFEMQEWRCKPNTDTYNFDPCS

SEQ ID NO: 280601 - protein, 82 aa, Zea mays
  Clone ID: MRT4577_19008C.1.pep
VLYLKKRTKGGVFFGGALAVSRPKLEGGYRDPWAKVHFLNRMELDPGGMYQGPRIYIHEPMQWTRETITGAAVGPPGDQGTF

SEQ ID NO: 280602 - protein, 94 aa, Zea mays
  Clone ID: MRT4577_19009C.1.pep
PFQLSAPTVLPRRTLVSAGLRCLSGQDRALLRVSVRLLKLSPVPSLHWACVPRVLLYRLYGQLRDLIAAWLLVSLSAWVIAFPPLRINPAASSP

SEQ ID NO: 280603 - protein, 36 aa, Zea mays
  Clone ID: MRT4577_1900C.1.pep
GIPGWTDSSVVCVHGLPLSGFSRVRVIHVLVDKGKW

SEQ ID NO: 280604 - protein, 78 aa, Zea mays
  Clone ID: MRT4577_19010C.1.pep
MTASDPARPLLYTLDRSPGPLMEGGTPATAAAEAMEATGKAKNDGVVKEVIRLERESVIPIIKPKLVMKLAYLIGISI

SEQ ID NO: 280605 - protein, 74 aa, Zea mays
  Clone ID: MRT4577_19011C.1.pep
RLARVVLLRATGSATARSRAVNIKTGQSTLVCNDAHECFVFSRLLCSLVSYTGQRVSVLTSWISLGCSCTVLLL

SEQ ID NO: 280606 - protein, 119 aa, Zea mays
  unsure (1)..(119): unsure at all Xaa locations
  Clone ID: MRT4577_19012C.1.pep
RCLAPGLQGRLKARARSGPGVCHGSTAYDGPNLHRQSDTQPGLTRNLSCSERAHRRRMTHETRLYLPLQTATRPPQVAGIVTGSLEEERLLGEQDQIREGVVPLSTHEEDDQXRAAEHA

SEQ ID NO: 280607 - protein, 66 aa, Zea mays
  Clone ID: MRT4577_19013C.1.pep
FRGRANKNRPPMAQFGFKVFKREKAPPLQNFCLEARWSNPPQHLKTPFCLPLKAPFKPVAIGFFGF

SEQ ID NO: 280608 - protein, 71 aa, Zea mays
  Clone ID: MRT4577_19014C.1.pep
PGEAAARTSHAIVAGTSLIGSRSRLEQPGASYSLISRFVSRSSVHRSKVQYIILHENIYRPSSACVRTGIL

SEQ ID NO: 280609 - protein, 63 aa, Zea mays
  unsure (1)..(63): unsure at all Xaa locations
  Clone ID: MRT4577_19015C.1.pep
HPQWELATQYFADRDMFCTXEVPEEDLKRXMMACGGSIQTSVNALSADVLCRCQVFEETQIGG

SEQ ID NO: 280610 - protein, 186 aa, Zea mays
  unsure (1)..(186): unsure at all Xaa locations
  Clone ID: MRT4577_19016C.1.pep
LGTSRPAGFDSSICGIIAFCFGIVVYYQPAYDILLVRPFFGHDGRLGRFLVDPQHFLPNHELPMXLFLKKRWKVYAILXRNPLTGLKDDTIDDISYPQXFPTVFRSHTDXPASKLVDTLFCASSTTISSLLPISNPTTASSRMDLLLRVLDDTMNGDNARDTEASSAVHGTARIVTTFMRPSAPLL

SEQ ID NO: 280611 - protein, 57 aa, Zea mays
  Clone ID: MRT4577_19017C.1.pep
HPERHQCIGTRRGRIRLTETTTADQRACNSGPNNAHINRHIERKMRTSHHRYASSTP

SEQ ID NO: 280612 - protein, 114 aa, Zea mays
  unsure (1)..(114): unsure at all Xaa locations
  Clone ID: MRT4577_19018C.1.pep
MLGIRLEVRPDPRCSWQCLQQGKDAESAVGCQKDLAQDSPLPWNLPXDPRPFSVSSLRLTSGVRIITHTVLKALQYTPLTTKGMERAPNTLENAXKGLQELGKKEIFTTMTFFL

SEQ ID NO: 280613 - protein, 126 aa, Zea mays
  Clone ID: MRT4577_1901C.1.pep
EGDTVAALIRGALRCYAREGRMPLLGTDPAGFVLSTANGGSGALGEDERISFNGCRNFLLWQKAAAQGAAANHAGSDALTATLSPGRKGSGGFKATDPSHGRKGGGGWKAGLNNKNALHWFVCFFN

SEQ ID NO: 280614 - protein, 162 aa, Zea mays
  unsure (1)..(162): unsure at all Xaa locations
  Clone ID: MRT4577_19020C.1.pep
PPRKTQKFWGAPSWGQDKGVPPPSPPRAGGAPPXGEKPLGPPPRGKKLKGRPPKGEXKTPPPPPGKSXEGPQKHPGPRXSRGFLKGGNPPPPPPGPRPPXSKNPGGWAPPXPRKSRGKPPGGPPPPWTLGRGMYPPENFGNQRGPPPGKAPVKAKPGRPFFP

SEQ ID NO: 280615 - protein, 57 aa, Zea mays
  Clone ID: MRT4577_19021C.1.pep
GVAAAASSAASALPSDMCKPGAYSLGSRVARIMSNGATFSVVGFAVGLTGAAISMRA

SEQ ID NO: 280616 - protein, 159 aa, Zea mays
  Clone ID: MRT4577_19022C.1.pep
MAPNETAQKLLLQGAQNAWDMLSEEQSQKHITTGSGDLNGILGGGIHCKEVTEIGGVPGIGKTQLGIQLAINVQIPVDYGGLGGKAIYIDTEGSFMVERVYQIAEGCISDIMEYFPCHHDKSSSGQENLQPESFLAGIYYFRICSYTEQIAVINYLEKF

SEQ ID NO: 280617 - protein, 123 aa, Zea mays
  unsure (1)..(123): unsure at all Xaa locations
  Clone ID: MRT4577_19023C.1.pep
QDTEKTWREGHGKVLDRERGLNLTLDRTSGSGIHPKNEYLFGKIYMQITLVPDNFDRTLTTFYLLFHGDTHDEIDIXSCATTGGDPYTLLTNGVTRAQGHRKXKILLWVDPTSDFHTYSILWN

SEQ ID NO: 280618 - protein, 106 aa, Zea mays
  unsure (1)..(106): unsure at all Xaa locations
  Clone ID: MRT4577_19024C.1.pep
CERDPRAVRRRFPSLLSXKMCKAKDFLCNRYYPHNLARIVSFYSEWQCSTEKEALGHVKEYPENGTLLDEEFFDGLLKLXRLAIPPHSKGEIRKTCRWVHRPLGRE

SEQ ID NO: 280619 - protein, 280 aa, Zea mays
  unsure (1)..(280): unsure at all Xaa locations
  Clone ID: MRT4577_19025C.1.pep
MRSMFATRSLLAAAASAPTVLRASAFPSRSLLLSLPFPRGRAARNMLGAARSISSAAPSRVGGRAAMEVRAAQSGEIHVIVGPMFAGKTTALLRRVQAEAGXTGRSVALIKSDKDNRYGLDSVVTHDGTKMACWALSELSSFHDKLGIEAYNKVDVIGIDEAQFFDDLYDFCCKAADRDGKIVVVAGLDGDYKRRKFGSILDIVPLADSVTKLTARCELCGRRAFFTLRKTQETKTELIGGADVYMPVCRQHYMDGQIVIEATRIVLDLDRSTVTAKALK

SEQ ID NO: 280620 - protein, 42 aa, Zea mays
  Clone ID: MRT4577_19026C.1.pep
QGPRAGIYDIRGAGITTTNYNSETKLQTGRQRSTRGLIIWNY

SEQ ID NO: 280621 - protein, 237 aa, Zea mays
  unsure (1)..(237): unsure at all Xaa locations
  Clone ID: MRT4577_19027C.1.pep
ALLFSSXGAPRRRRRRHSRSSSRQQLRPRAPRRSSSAGRATSRRSSSRRRSSRPARARSTRPPRAQCRRSQAARTRATCSTSRQRRTTAPTSRRRRTWTSTTSSSXADGGGRRRRARRRPPVAQRAXSSSPRSPGARTTRSCSSAAPALALALRTTTTRRRRTRTAGPRTWRSTSAWRATRTRPGRWRAPRPRAPTSSRGASRXRADELXRPRQRSRPCRPSRRRRRSSQRWESIEG

SEQ ID NO: 280622 - protein, 67 aa, Zea mays
  Clone ID: MRT4577_19028C.1.pep
LPGRSPFPPSSGTAQEEEQQQGQGQPQRKRPPLAGKFLFPPHLLRSFCSLALSFASKCCSRGVICKR

SEQ ID NO: 280623 - protein, 403 aa, Zea mays
  Clone ID: MRT4577_19029C.1.pep
MCLLSRTLGTLANGTRLLSPRVPRLPPSTFTSVAGARCFGPAARCQATAAGGVAAAGPPSSELEAIRWGSAKLQGARDEMEDEVLLRPGSLLDGFSFAAVLDGHAGFSAVQFLRDELYKECAAALDGGAVLSTKNLDAITASIQRAFAAVDAKLSTWLEQTDKDDSGATATVMFLRSDVLVVSHIGDSCLRVISRGGRSEALTGSHRPYGNNKTSLEEVKRIRAAGGWIVDGRICGDISVSRAFGDIRFKTRKANEMLEKRTRVRVKQGRWTDKFISRIQFKDDIVISSPDVSLVELGPDVEFVLLATDGLWDYIKSSEAVAFVREQLRQHGDVQLACEALGQKALDQRSQDNISIVIADLGRTNWKALPDERPNLFLELSQAVATVGVVSIGIWVSSFLGLQ

SEQ ID NO: 280624 - protein, 170 aa, Zea mays
  Clone ID: MRT4577_1902C.1.pep
MAVAVPMKLWRVETRGKAAAAGPDDPLRVLVTVTVLGSAGPLRFIVLEGDTVAALIRGALRCYAREGRMPLLGTDPAGFVLSTANGGSGALGEDERISFNGCRNFLLWQKAAAQGAAANHAGSDALTATLSPGRKGSGGFKATDPSPGRKGGGGWKAGLNKFLLSFSIKV

SEQ ID NO: 280625 - protein, 118 aa, Zea mays
  Clone ID: MRT4577_19030C.1.pep
QKVCLWTLMRKVKPGLCGTQLHSCSYRVQMRMLTCTITRILQNTGLPRDKTFRREQPHILTLVCHSLAVSERWVYDTRHAYLAVIMYPHVNQLLDQVDQVQRLVHPAGCLVAAQSARL

SEQ ID NO: 280626 - protein, 249 aa, Zea mays
  Clone ID: MRT4577_19031C.1.pep
MSYGGSSSGGRGGRRVEYGRTYVVRPKGRHQATIVWLHGIGDNGGSWSQLLDSLPLPNVKWICPTAPTRPVAAFGGFPCTAWFDVDETSLDGHADIEGMDASAAHVANLLSSEPSDVSLGIGGFSMGAAAALHSAACYAHGRFTNGVAYPINLRVVVGLSGWLPSSRTLRSKIESSQLALRKASGLPILLSHGMADEVVTYRNGERSAEILRSSGFQYTYFKPYNGLGHYTIPEEMDDVSKGLRSTMGL

SEQ ID NO: 280627 - protein, 116 aa, Zea mays
  unsure (1)..(116): unsure at all Xaa locations
  Clone ID: MRT4577_19032C.1.pep
MSGRALVLTTATLLLMVAAARAGEAIAGGWSPSRNLNDPXIQELGGWAATEHVRRANDGLMAGEVTDMQEHVVCGMNYKLDLDATDADGKVVGYGHLVYQQPWTNTLELGYFAPAS

SEQ ID NO: 280628 - protein, 352 aa, Zea mays
  Clone ID: MRT4577_19033C.1.pep
MKKVVYYETNSSSPSTSSSDATSVTSKHYERKKYSKMPLRYSRISKRTPLLSVPLGKPPCFDGEDYSMWSDKMRHQLTSLHASIWDIVEFGAQEYNKVQGLKSAKEIWDILKTTHEGDEVTKITKRETIEGELGRFVLNQGEEPQAMYNRLKTLVNQVRNLGSTKWDDHEMVKEVIGKFVSFELMIKGSKHIVDLEQGGTSTPEVQPIAFKATEEKKEESTSSRLPIDASKLDNEEMSLIIKSFRQILKRRREKDYKPLSKRVLKVQHKPLKRSKLGFKRKKQKKPKRTLVWRTGLSGAPGAVQTELFTFGFLESRSAIMHRTIRCTKRSNDYQRNGRLQKHEQCAQKSEQA

SEQ ID NO: 280629 - protein, 674 aa, Zea mays
  Clone ID: MRT4577_19034C.1.pep
MSGKSAKREMETGKKATSHGKAPSRESSTKAKEGSPPCVKSHRRGDKKKKMKRVVYYEIDSSLPFRSDSNATSITSKRQERKKYSKMPLRYPRISKRTPLLSVPLGKPPCFDGEDYSMWSDKMRHHLTSLHESIWNIVEFGVQVPKVGDDGYDSDEVAQIRHFNSQATTILLASLCREESNKVQGLKSAKKIWDVLKTAHEGDEVTKITKRETIEGELGRFILNQGEEPQTMYNWLKTLVNQVRNLGSTKWDDHEMLKVIHRSLTFCNPTQVQLICGDPRYKLMSLEEVIGKFVSFELMIKNSKHIVNLEQGATSTPKVQPVAFKATEEKKEESTSSRLPIDASKLDNEEMALIIKSFRQILKQRRGKDYKPRSKRVCYKCGKPGHFIAKCPMSGDSDRGDDKRGKKKEKKRYYKKKGSDAHVCREWDSDESSIDSSDEDAANIVVNKGLLFPNVGHKCFMAKDGKKKKVQTRTTPKYTTSSDEGSSSEDEDDLLTLFANLNMQQKEKLNELIGAIHDKDELLDSQEEFLIKENKRHVKFKNAYAQEVEKCEKLSKELSICHESISNLRTENANLIANVEKLNVCNDSISNLRKENASLIAKIDELNVCKKSISCLKNENATLHAKIEELNVCKPSTSTIDHCWGLVLKCCELRIRQHKMLKFKALRPLKHYFP

SEQ ID NO: 280630 - protein, 47 aa, Zea mays
  Clone ID: MRT4577_19035C.1.pep
KKKKKKKKKKKKKKKKKKKKRKKKKKKGGRNKKKKKKKKNKKRGGPF

SEQ ID NO: 280631 - protein, 115 aa, Zea mays
  Clone ID: MRT4577_19036C.1.pep
RGSPGLVAPVLVGVVAPGAVPVFVFLVGAVVGLVPVGFAGVLRVPCLLGVPVGFSGVPPLGFLSCWLVPLVVGSWALGPLWALVCFVGLWSPSLPLLGVPGALSLLALGSPRWCV

SEQ ID NO: 280632 - protein, 91 aa, Zea mays
  Clone ID: MRT4577_19037C.1.pep
MALAQTQAHPHLPLGLAPSLLMTLPHAILSPQISLVSQCVPRHLPVKQLAEVAVEGAVGPPQHVVRQLSSWRSAPMCGSAPPPCTTPRARI

SEQ ID NO: 280633 - protein, 79 aa, Zea mays
  unsure (1)..(79): unsure at all Xaa locations
  Clone ID: MRT4577_19038C.1.pep
IANLQWTSFETSDAQENGGKLTQLSLALLALCSEESDTAITHEHFRLTCGTRLHLRQDNNTSVELATXPWHTREHRMIK

SEQ ID NO: 280634 - protein, 89 aa, Zea mays
  Clone ID: MRT4577_19039C.1.pep
MSDLKASVVETKNGFHVEGYEKIEYDFSFLDGVFDPKNNNLASIKVAVNYGNYKNRLGAYHAPMHTFLDFSFLKTLPEAQVRNGFAELI

SEQ ID NO: 280635 - protein, 85 aa, Zea mays
  unsure (1)..(85): unsure at all Xaa locations
  Clone ID: MRT4577_19040C.1.pep
HCFPGYVXATGCVAHKSXAAPQCDKFAKQYLSLCPGEWVKRWFDQRENGSFPEHNVIPQGKKEVGSPFVVGAFSSMVTAPQSAGR

SEQ ID NO: 280636 - protein, 111 aa, Zea mays
  Clone ID: MRT4577_19041C.1.pep
GPKGTHFFTVKKTNPQKGNPRRSLTAAGKKKLLPITKGLKKKKGNWFYGPKALGGQFLTATGEKDLLGRVKSNFNFQLLPWGHNFQKITLLARTTKVKKIFAKALTERGDF

SEQ ID NO: 280637 - protein, 63 aa, Zea mays
  Clone ID: MRT4577_19042C.1.pep
RCYCCRRPARPVRISRWYRRRPLCNESTVVVKFVVVHHLPVSRFLKSTVNGIHHRCKLTNENS

SEQ ID NO: 280638 - protein, 220 aa, Zea mays
  unsure (1)..(220): unsure at all Xaa locations
  Clone ID: MRT4577_19043C.1.pep
MTHQSHAYHIVKPSPXPLTGALSALLMTSGLAMXFHFHSITLLILGLLTNTLTIYQXWRDVTRESTYQGHHTPPVQKGLRYGIILFITSEVFFFAGFFXAFYHSSLAPTPQLGGHWPPTGITPLNPLEVPLLNTSVLLASGVSITXAHHSLIENNRNQIIQALLITILLGLYFTLLQASEYFESPFTISDGIYGSXTFFVATGFHGLHVIIGSTFLTICF

SEQ ID NO: 280639 - protein, 98 aa, Zea mays
  Clone ID: MRT4577_19044C.1.pep
IPFPASKQDQDAICNKASKGISFIASSDHDCSQMVTRNNNTNNNKKASWDRRKATKTKVENLRFSIFSMHSYSKLNIWMHSNRLLLPLIMSTSAFPYR

SEQ ID NO: 280640 - protein, 40 aa, Zea mays
  Clone ID: MRT4577_19045C.1.pep
EQLPVAVDDIRIQIVILLSPESQMATMVLVDTDEELARVG

SEQ ID NO: 280641 - protein, 78 aa, Zea mays
  Clone ID: MRT4577_19046C.1.pep
SVNPAFHTPGLLLEPSNQNKVCYVGPVGSSHNGKSLDLKTATAPPLGWIALRGLCCSPWPVKIYQRQRCRCALKNSMF

SEQ ID NO: 280642 - protein, 190 aa, Zea mays
  Clone ID: MRT4577_19047C.1.pep
ARIPLLSGSRPGRGAHGSPPLSLRHRLCPTRLDSLPPAVATPAMGLAASLPNPRSGLPESAPPPRTGLVVAAGPHVGRLLRCLSCCEGLLPLGRSRTCAPLPCAGISACAAPCHRASHLLIARAIAPAAPPTSSFSCHRCRQHPLPGPAQAPARLDTPCRPPPFFAFAGSVAAAAFPAGSTLLRPFWLDP

SEQ ID NO: 280643 - protein, 58 aa, Zea mays
  Clone ID: MRT4577_19048C.1.pep
YPKAGALKGGGYTYSLNTLTNYNITKRGFDLISYFIQRDLRSTMDISYNMKPKCMSSY

SEQ ID NO: 280644 - protein, 135 aa, Zea mays
  Clone ID: MRT4577_19049C.1.pep
MHVSASLVHFMVNQKLAQALRYAMSQMSDTAKKLQETASLCYTDEDVVDGFKLTQVARSMDEIAEMLEVTAIDCQVSMMDPTSMLEAGYASEDTAVWEDVFRDREIMNQPLEAETLAEHCAKWGLNYNEIWDRSV

SEQ ID NO: 280645 - protein, 101 aa, Zea mays
  Clone ID: MRT4577_1904C.1.pep
NNGTETKAFNHLTTSLSNHYSRSRIRQQVDMVHEEEADYRVRVNMRSSYITPCKRSVRAGSVSPSIGFFMVRGTLLSKACHQRSAPAWRHATVKRHTAELS

SEQ ID NO: 280646 - protein, 299 aa, Zea mays
  Clone ID: MRT4577_19050C.1.pep
METIQGRFLVLLGGHVRKKLPVSSVDWRLVDGEKKYEVWTDLKAHPKLKERTIQEWDAFVVVCGEKEPRGCVRVLGLGLTPQNISTQGLRSYTPTRLQMEVLARKKAEREKAALEQCIAEMEEKMQEQRMAHEMRDVEIISHDGSNTRNHLDTRSGQHVDETHNIAQFHEDEAYVEDELSDGGENLFGSNHDSVTPAVHPSQGNPMNVHLEKNVILYAMLRDQSMAKGTIISTNPSTVLGGVALGKQYCEVVVNVVLKRDALLPHPYGYLEKMGDIDRMSIAWPYKRVISYLLILFHIW

SEQ ID NO: 280647 - protein, 54 aa, Zea mays
  Clone ID: MRT4577_19051C.1.pep
SCLCWSFKRPTEPYYFVQTILISCSNYDFTFSIFYSDSSDSDDEYLDTCICSIM

SEQ ID NO: 280648 - protein, 107 aa, Zea mays
  Clone ID: MRT4577_19052C.1.pep
MDRRILRTSSCNGSGKNPSPSSPAAVSRPASSGGIGSKDDAAAGERKALLPRQPPGGMARKGRKGSNRRVQWKDKHGSKLTDVREFQPSDSSDSDDEYLDTCICSIM

SEQ ID NO: 280649 - protein, 104 aa, Zea mays
  unsure (1)..(104): unsure at all Xaa locations
  Clone ID: MRT4577_19053C.1.pep
NPXXQPXXXQQAXAASNXXXXPXXXQQXPAXXXGQAXXQTXRAQQXQQRGRPRXNQGARANXXPXAQQQQXXPGNQRXTRNPXAXXQQQRXPXSQRATAXXQQQ

SEQ ID NO: 280650 - protein, 151 aa, Zea mays
  Clone ID: MRT4577_19054C.1.pep
GKTPNPGGSLGKRGAPKRRFCPPPFQLKPPGKTMRGGKRRGERKPPPQTPNGKGAPSKNAIRGGWAKIEGRAKAQGGKKAPFKHRGYFKTKFLSSPFPKKGGLYKQSPQGWERGIFPGQETLGGFPTGLRAPTQFRGPGAGEGAPILHFQF

SEQ ID NO: 280651 - protein, 85 aa, Zea mays
  Clone ID: MRT4577_19055C.1.pep
GSLHYPFSTGAEFNQVAEKKVVMAQVMSSSSLFCNLNRRCIVFPTCSHIYVNHQSSSRTFEFQSCIPLVSRVLSVTLGFNLRTII

SEQ ID NO: 280652 - protein, 61 aa, Zea mays
  Clone ID: MRT4577_19056C.1.pep
NELLPGFVVSQGFGGDVHSAFPLVLTKLKAPALLFCSLPAQEFKAKPCPLMLFCWKDLGFS

SEQ ID NO: 280653 - protein, 87 aa, Zea mays
  Clone ID: MRT4577_19057C.1.pep
SVSCYWSTDWLQAVPSFVGSVQTLGGPGDRPECPGTLSPTSARRVGRLEADDRIIGRAGRLGIKLKTGPPIQLKKGARVAIAAVLGC

SEQ ID NO: 280654 - protein, 188 aa, Zea mays
  Clone ID: MRT4577_19058C.1.pep
MTMATSISAVALLCAAIVASFVPLSSAGVSLVSLTCRRTAHERLCISILAPDRRSDAAESVQQLAVIALAVARNSTRDALWRTTVLGGRAPTPLERDLLAQCRALYSECLRETTKTIALVTAASYDAAARASSTLHWYPEKCESLLYMQRVESAMKQTNKQVEEEMIASSDIVHLLLARRGADKLNLE

SEQ ID NO: 280655 - protein, 73 aa, Zea mays
  Clone ID: MRT4577_19059C.1.pep
YWCQAAESDQGPGARERSHHEQCGAIQTMTKKYCRLSSLSRSLKRHERLMRKKKSVQRALLMDYVSQQGFDAI

SEQ ID NO: 280656 - protein, 107 aa, Zea mays
  Clone ID: MRT4577_1905C.1.pep
APSPGGVKKPPPFPPGPVAGGEIPKSQKSRELFIPKLPFQPLVPKIAQDFKTDPRFQSSPVPPFQKAPKASLVGLFEDPNLWPIPPKGVPFMPKEIQFAPRIPGEGP

SEQ ID NO: 280657 - protein, 76 aa, Zea mays
  Clone ID: MRT4577_19060C.1.pep
GTKGPEATRPLIKVLYFLGPVIPMDPIKSRWPGHRPHLYFLLAGDIPLIPFPLFIRGEGIPFGLMGPLGPSLIGQW

SEQ ID NO: 280658 - protein, 49 aa, Zea mays
  Clone ID: MRT4577_19061C.1.pep
RGLPGPRVAGIRCHSSSACGHADPSPSCITYSARQPLVNPRKGWSEHIV

SEQ ID NO: 280659 - protein, 48 aa, Zea mays
  Clone ID: MRT4577_19062C.1.pep
VELHVKMMHAPFKFRNDVLTCNLCPPPPFYLLLDLSCRILKIKYFKYP

SEQ ID NO: 280660 - protein, 410 aa, Zea mays
  Clone ID: MRT4577_19063C.1.pep
MATATSASASPGAFGAKTPAPARGLSTHPVLTPSPAFARPSPRTPACGRSRASLHIGGLGSTSSSSAAAAGNGTGLHVPPTVAPLAVPKMAGSMKTHKNVLLFYCEEMRDLAQQVVARNDDIELRSISWRTFPDGYPNLFISNAHNIRGQHVAFLASFSSPSVIFEQLSVIYNLPKLFISSFTLILPFFPTGTSERMEDEGDVATAFTLARFLSNIPISRGGPSSLVIFDIHALQERFYFGDSVLPCFESGIPLLKSKLQELPDSHNITIAFPDDGAWKRFYKQLQHFPMVICNKVREGEQRIVRIKEGDPRGRHVVIVDDLVQSGSTLIECQKVLAAHGAAKVSAYVTHGIFPNSSWEKFQHDNGEGPEHGLSHFWLTDSCPLTVKAVKGRRPFEILSLAGPIASALQI

SEQ ID NO: 280661 - protein, 340 aa, Zea mays
  Clone ID: MRT4577_19064C.1.pep
AESNIRASPINTDASFSPYVGHMAFSPFPSPGGYSPSSGGYSPSSPVFTPEKGYSPLSPSYSPASPSYSPTSPSYTPGSPTYSPTSPNYSPTSPTYSPTSPSYSPTSPSYSPTSPSYSPTSPSYSPTSPSYSPTSPSYSPTSPVYSPTSPAYSPTSPAYSPTSPSYSPTSPSYSPTSPSYSPTSPSYSPTSPSYSPTSPSYSPTSPAYSPTSPGYSPTSPSYSPTSPSYSPTSPSYNPSSAKYSPSHAYSPSSPRMSPYSQTSPSYSPTSPTYSPTSPSYSQPSPSYSPTSPFNTSGGPSPDYSPTSPNYSPSGSYSPTAPGYSPSSTGQGNDKDDKSAR

SEQ ID NO: 280662 - protein, 102 aa, Zea mays
  Clone ID: MRT4577_19065C.1.pep
HSEFLKAASNLRDNYRFAHTNVEFLVNEYDDNGEGIILFRPSHLTNKFEDKTVAYTEQKMTSGKIKKFIQENICGICPHMTGDNKDLIQGKDLLIAYYDVDY

SEQ ID NO: 280663 - protein, 64 aa, Zea mays
  Clone ID: MRT4577_19066C.1.pep
QGTSSGLQQLTLLWPHLNLEGGQTGWPKCFQTTYSLIEHNRHLVSHGCPERDHLVCHKPVLKPY

SEQ ID NO: 280664 - protein, 126 aa, Zea mays
  Clone ID: MRT4577_19067C.1.pep
TDSSNRDLLGYVQSQGGHDAMQMLKSEMQDHGFHYLPPRKPRKSDGYLRYRRRRLSGGFIFVAHADYYLLLRAFAKLAEIDIRIMHISVLKLEKRLACIEERIERSLNTLHNFSTGTVDELRSVSD

SEQ ID NO: 280665 - protein, 82 aa, Zea mays
  Clone ID: MRT4577_19068C.1.pep
RKNVLFETGRPETLVFITHMRCVSFNGVTWDKKKNLFDTQVITTQHKQHALAFYTHTHTHTRVHVTSTDGHEHTFVSIACYL

SEQ ID NO: 280666 - protein, 450 aa, Zea mays
  Clone ID: MRT4577_19069C.1.pep
MEELQDCNSRSLVALPGSLVLRLFRLFGQQDQSSWQKYILAYFLLVRNEYFSGESKKHSDVFCDISELDFFLYATDLDSEELELKEQKPITKAQSGGDSSGNRSNDCYFPGLHDDLSQDCLAWASRSDYPSLSWLDKRFNLLINSGYLYRLRRKYDIVEHWVYLACSLMPWEAFDPSRKRWMRLPRMPCDECFSCADKESLAVGTQLLVFGREYTGLAIWMYNLLTRSWSPCTPMNLPRCLFASGSSGEIAIVAGGCDKNGQVLRSAELYNSEIGHWETIPDMNLPRRLSSGFFMDGKFYVIGGVSSQRDSLTCGEEYNLETRTWRRILDMYPGGTSASQSPPLVAVVNNQLYAADQSTNVVKKYDKANNAWNILKPLPVRADSSNGWGLAFKACGDRLLVIGGHRGPRGEVILLHSWCPEGGEDGADWEVLSVKERAGVFVYNCAIMGC

SEQ ID NO: 280667 - protein, 96 aa, Zea mays
  unsure (1)..(96): unsure at all Xaa locations
  Clone ID: MRT4577_1906C.1.pep
SFLGAVNHRLKPSIVVVMEQDADHKRPAVSGRLXEAFGYYAALFGRLDAVAAATATASAAGDRAQVERMCLGEEIKNVLLCEGAGRLERHERLSQW

SEQ ID NO: 280668 - protein, 102 aa, Zea mays
  unsure (1)..(102): unsure at all Xaa locations
  Clone ID: MRT4577_19070C.1.pep
VIVRYSSSNKTSXSPCAAAAAPAAAXSSESDCAGPALRRSSSASSEVENPIQGFIAYCKKSQQLASVRKSASDAGFRFLSAAASKIAAESDGLDDLTEICRG

SEQ ID NO: 280669 - protein, 151 aa, Zea mays
  unsure (1)..(151): unsure at all Xaa locations
  Clone ID: MRT4577_19071C.1.pep
FLVXSGLVLXFRSXXXCXSPPXLXXXWXFPXXLXLXPXXSXALXSFXXCLPXPVFPXXLSXXXAXXXPSPXALPFXFSCPSAPAVXVLWARXXXXPXXFFGASALLFLCARAXFLLXAPPPPLRAXGAXWCFCVXGRXXXXPPXXVVWFWV

SEQ ID NO: 280670 - protein, 135 aa, Zea mays
  unsure (1)..(135): unsure at all Xaa locations
  Clone ID: MRT4577_19072C.1.pep
TPSPFGEKEIKLFKGSVNXAARKKILEIAEIFPPKPFYVFNPPVTLQLTGDLDKKVAPQRFLDPYGICEVPKNGQVTLVPELKVESKAPPGYFFPREPCSCDDNGPLKSPAGFLKNKPSPPRFFFAITGLVFFMS

SEQ ID NO: 280671 - protein, 47 aa, Zea mays
  Clone ID: MRT4577_19073C.1.pep
HNQAGETRDRVEWRPFKQMEMPPPRPRGQNLDIMRSTGSRQTNAWVG

SEQ ID NO: 280672 - protein, 48 aa, Zea mays
  Clone ID: MRT4577_19074C.1.pep
LKIKNVLSINSCNMTTKKKVEVDQLRTLKTSRARTIIPHSLRGNLCHL

SEQ ID NO: 280673 - protein, 49 aa, Zea mays
  Clone ID: MRT4577_19075C.1.pep
RGTACSRLSIPSNKLSMIWGPRSWAWYPQLQTSSSWKKKAGELSWPSHE

SEQ ID NO: 280674 - protein, 133 aa, Zea mays
  Clone ID: MRT4577_19076C.1.pep
GGPTDPDGLSPAQAWPRFFFFSRTGAGPPNTRQVFFPPFAGARIILPAHGGEPLIYPRRSKVPAFNKASLCVSLIQAKNVVFSLGPQGKMVYAAWLVVISHLTHAWPCSTNPRGNFFWGGRPLMPLNSPLAQP

SEQ ID NO: 280675 - protein, 92 aa, Zea mays
  unsure (1)..(92): unsure at all Xaa locations
  Clone ID: MRT4577_19077C.1.pep
NSATYLQQLQLPFRHLTASYRDHVIAFNHMTALNSAAYVQTQHLLTFTPIACASKATFLIQPQSLPFYQHTAPNALHLLXQLQQLLSFNQLA

SEQ ID NO: 280676 - protein, 275 aa, Zea mays
  Clone ID: MRT4577_19078C.1.pep
SILVDHMERTLQSLDASGQPRTIGTYNAIISGYLTAWMWDKMEASFQEMVSFHVAPDATTHKLMLRGYAHAGMICKMEQAYERACKLGIKVDILHIRAMLCAYCKFYHVGRIQKIEDLLKKLGPDDYRPWLNVLLIKVYAQEGLTEGMELYISEALERNTIVTAVKVMRSIICNYFQYDAVDRLALFVRRAEDAGWKLCRSLYHCKMVMYGKHYRLEEMHGVLDEMECLKFDRTKKTFWIMYKAYVSCGRRTEANTIIGMMWKHGFAVRDDMSDQ

SEQ ID NO: 280677 - protein, 43 aa, Zea mays
  unsure (1)..(43): unsure at all Xaa locations
  Clone ID: MRT4577_1907C.1.pep
FTFLSFTHSCHIQFLFQEYHKARSKVVPDKIQARXIQLSGDPP

SEQ ID NO: 280678 - protein, 115 aa, Zea mays
  Clone ID: MRT4577_19080C.1.pep
LNLLGRPPFFFLFFFVFSPLDFGCFWEINFPPKNWGFSPGRTYLAGGFLALMCGAPQWTPFWGNSQGGEKFLLGGVVPFRGVFKPFKPLGATLCSSLGRWCIYPWSCCSECFSDA

SEQ ID NO: 280679 - protein, 60 aa, Zea mays
  Clone ID: MRT4577_19081C.1.pep
KNLTVSSAQNSSLRASNSYSSVKNVHGTISTKHKTVDGKAMVSNFICQASTPPGGPQLHP

SEQ ID NO: 280680 - protein, 124 aa, Zea mays
  Clone ID: MRT4577_19082C.1.pep
KKKKKKKKKKKKKKKKKIKGKKIFLILKKKKKNNKKNKKFRGALFKESKFFFPCLQIYIFFFLPPKLNPRAGFLNSVDWKNLGFPQFNCFYKIPFFQIDVIAKVPHPYSFLKNCSLFIVYGTPL

SEQ ID NO: 280681 - protein, 43 aa, Zea mays
  unsure (1)..(43): unsure at all Xaa locations
  Clone ID: MRT4577_19083C.1.pep
EVPLILAPDEDVLAGGASINLLEKLLRHQKPNVYHISPYIXLV

SEQ ID NO: 280682 - protein, 372 aa, Zea mays
  Clone ID: MRT4577_19084C.1.pep
MFLFGDSYRRRVFFKYEKRIRTRSPPEKIFEYFASVHSPEGEMYMLPTDLMRAVVPVFPSSESKNVREGRLKGERHPGELQCAPSEFFMLFDTNGDGVISFSEYIFFVTLLSIPESSFHVAFKMFDLDHNGEIDKDEFRKVMTLMRSYNRQGAAHRDGLRFGRKVGQPVENGGLVEYFFGKDGNEHLHYDKFSSFLKKLHDEIVRLEFSHYDVKSSNTIPVKDFALSMVASADMIYIDKLLDRVEDLDDNLDLKDLRITFEEFKAFADLRRRLEPFRMAIFSYGKVNGLLTKQDLKRAASHVCGVDLTDKVVDIIFHVFDANCDGNLSSEEFLRSLQRRESDIRQPATSGFLGVIACWLNCTKCSLQQMLSQ

SEQ ID NO: 280683 - protein, 110 aa, Zea mays
  Clone ID: MRT4577_19085C.1.pep
PTGWEPPERPPPFFFFFFFFFFFFGFFFFFWGKKTGIRVGLFLSPKRNRCGKFCPTVLFRDPQPKAKALRNWSRPTIETKQGGPWAFLTKFYPGKPTRDLQSLWNKGKGG

SEQ ID NO: 280684 - protein, 113 aa, Zea mays
  Clone ID: MRT4577_19086C.1.pep
SAHIRSSGLALASVLAAALAVSARAAQCGDGADGKLCPDCLCCSKWGYCGSTSDYCGDGCQSQCDGCGGGGTPPPPPPSPSPPPPPPTPTPTPVPPSGCGEASIITEDLFERM

SEQ ID NO: 280685 - protein, 50 aa, Zea mays
  Clone ID: MRT4577_19087C.1.pep
PVKCNNHVSLFKDFNSPSSRDWENLPELLSCRSGKFSQSLDDGDDVQRFQ

SEQ ID NO: 280686 - protein, 275 aa, Zea mays
  Clone ID: MRT4577_19088C.1.pep
DAWVTVDSSNTTALNTAATQGHMDVVRLLLEVDGSLALIARSNGKTALHSAARNGHVEVVRALLEAEPSIALRTDKKGQTALHMAAKGTRLDLVDALLAAEPALLNQTDSKGNTALHIAARKARHEIIRRLVTMPDTDVRAINRSRETPLDTAEKMGNTDAAELLAEHGVQSARAISPGGGGGGGNKQARELKQQVSDIKHEVHSQLEQTRQTRVRMQGIAKRINKLHEEGLNNAINSTTVVAVLIATVAFAAIFTVPGEYVQDPGSLAPGHDLG

SEQ ID NO: 280687 - protein, 104 aa, Zea mays
  unsure (1)..(104): unsure at all Xaa locations
  Clone ID: MRT4577_19089C.1.pep
LGVTVERRPQGMFLHQRXYTVDLLEHAGMAECKPCVTRTVRCSTGLSGVPSGVTANSANGRLQKANSDQLCATARAEVRAGAEGAPDSEQDLSGAPPDCPVAPH

SEQ ID NO: 280688 - protein, 39 aa, Zea mays
  Clone ID: MRT4577_1908C.1.pep
REWKCVTGCHSTRSAQWRGRKQVGRQAPRGSNLENPSLR

SEQ ID NO: 280689 - protein, 145 aa, Zea mays
  Clone ID: MRT4577_19090C.1.pep
MAEPTPSQSPAQTPPPPPTQQTPAAGGLEDMLACVAALEAALLPCLPARELQAVDRSLQSSHQIDVERHARDFMEAAKKLQSYFISLQREEPPSAEEMLRKEITTMEEELKSKSELIAKHKKLIEGWQKELKEQLSKHITELERV

SEQ ID NO: 280690 - protein, 157 aa, Zea mays
  unsure (1)..(157): unsure at all Xaa locations
  Clone ID: MRT4577_19091C.1.pep
MAEPTPSQSPAQTPPPPPTQQTPAAGGLEDMLACVAALEAALLPCLPARGLQAVDRSLQSSHQRYLSVVVSTKLXVDVERHARDFMEAAKKLQSYFISLQREEPPSAEEMLRKEITTMEEELKSKSELIAKHKKLIEGWQKELKEQLSKHITELERV

SEQ ID NO: 280691 - protein, 83 aa, Zea mays
  Clone ID: MRT4577_19092C.1.pep
VATVSVIHGEMWHATSSWRMVCVSLADTLVEDSTPRITADVMAATMSTLVVVSSNCHRHRHVVLLAPVLDSPARIDYIHSWPE

SEQ ID NO: 280692 - protein, 49 aa, Zea mays
  unsure (1)..(49): unsure at all Xaa locations
  Clone ID: MRT4577_19093C.1.pep
MCKTLHGTLLLLAIFVLFLNFSHATAKRTRRGMDILEXNFIDKNNWRVY

SEQ ID NO: 280693 - protein, 41 aa, Zea mays
  Clone ID: MRT4577_19094C.1.pep
AVYSSLDLRAVRTPHVDTHRLSKLHMLTVRTMLDTTFNSAF

SEQ ID NO: 280694 - protein, 394 aa, Zea mays
  Clone ID: MRT4577_19095C.1.pep
ASAEAIKDAFRIEFGDEYRVFVKDLCKDHAGWPLNNMESSYKFMVKHVQLWKVAFHSTSPRWVHNFYLAALASFYAKKVEAGLKKYKPDIIISVHPLMQHIPLWVLKWQGLQNRVVFVTVITDLNTCHPTWFHADVNRCYCPSEEVAKRAALDDLQPSQIRVFGLPIRPSFCRAVLVKDDLRRELELDPELPAVLLMGGGEGMGPVKKTARALGESLFDKELGKPIGQLIVICGRNKTLSSSLQAVEWKIPVKVRGFETQMEKWMGACDCIITKAGPGTIAEALIRGLPIILNDFIPGQEVGNVPYVVDNGAGVFSKSPKETASLVARWFGPDSEELKKMSEKALKLAQPEAVFDIVKDMHELSQEQGVISQISSSLTSSFFLPSPESTPLQLI

SEQ ID NO: 280695 - protein, 48 aa, Zea mays
  unsure (1)..(48): unsure at all Xaa locations
  Clone ID: MRT4577_19096C.1.pep
IQDIEGIPRDXKCMIFDGKQLEDGRTIADYNIQKESTLNVVLRLRGGK

SEQ ID NO: 280696 - protein, 61 aa, Zea mays
  Clone ID: MRT4577_19097C.1.pep
LYENGLSRVEFIFNLYENWTFQGDLVNISNIRFQTVRCGWHMNMIRCLCNPTSEGHSTWHR

SEQ ID NO: 280697 - protein, 82 aa, Zea mays
  Clone ID: MRT4577_19098C.1.pep
PTGGALPGRAGARAPLAQNPGGKKKCMAPPLLWVGGAPSISSSQRIYILSRYHAAGDSLLGGVGNCTTVWLEPLGPRCGDEH

SEQ ID NO: 280698 - protein, 106 aa, Zea mays
  Clone ID: MRT4577_19099C.1.pep
MDVPVDDPVENLTGSPSTLGNEEEATTYANVQDQSKEAGVKQHDATVPDDKKWPGWPGESVFRILVPTTKVGAVIGRKGDFIKKMCEESRARIKVLEGPPAVPERA

SEQ ID NO: 280699 - protein, 132 aa, Zea mays
  Clone ID: MRT4577_1909C.1.pep
AGWRPAASGAFAGAGAGEAPGVRRVLRIHHNPRALARFEEYRDLVRARAARRCGGEGAVVEERCIADGNERLRFHCSTMLCSLGGGVCGSPYCCVCSTLRHRRRRRAAGVQPQSSAPVLCHPLQQQLVGGMT

SEQ ID NO: 280700 - protein, 127 aa, Zea mays
  Clone ID: MRT4577_190C.1.pep
VSHSASAGIQDGNACWELYCLEQGIQADGQPPGDKTIGGGDDAFNTFFSETGAGKHVPRAVFVDLEPTVIDEVRTGTYCQLFHPEQLISGKEDAANNFARGHYTIGKEIVDLYLDRIRKLADNCTGL

SEQ ID NO: 280701 - protein, 508 aa, Zea mays
  Clone ID: MRT4577_19100C.1.pep
MDVPVDDPVENLTGSPSTLGNEEEATTYANVQDQSKEEPEKLYEEPKDPMQDELGNQGHVSMNNEDVGGQNKVDQATPTEHGEEAGVKQHDATVPDDKKWPGWPGESVFRILVPTTKVGAVIGRKGDFIKKMCEESRARIKVLEGPPAVPERAVMISAKDEPDTELPPAVDGLLRVHRRITDGLETETDQPQRATVNTGPTRLLVPASQAGSLIGKQGATIKSIQDASKCVLRIVENVPPVALNDDRVVEIQGEPHDSHKAVELIASHLRKFLVDRSVLPLFETQIKAHNMHREQPMPPPQAWGPPPPSPWGHPPPNLPPGGPGYVGNPHYMPPRPQENYYPPPDVPPVEKQPHYGISSYGRDAPPSAPPGNQNQAHGSSQVTHSMQVPLSYADAVIGAAGASISYIRRHSGATISIQEGAPGEMTVEITGSASQVQTAQQLIKNFMAEASPQGPPAPGPHGQPVDTGYGSYPPYGGASYGSPPGAPAPAPHNGGSYGAAPYSSSYGY

SEQ ID NO: 280702 - protein, 191 aa, Zea mays
  unsure (1)..(191): unsure at all Xaa locations
  Clone ID: MRT4577_19101C.1.pep
HGEEAGVKQHDATVPDDKKXPGWPGESVFRILVPTTKVGAVIGRKGDFIKKMCEESRARIKVLEGPPAVPERXSYCCLRPQVESFVYPNPKIDVQSWLPKYSLVLLCCTXFKPYEYWMKIPVKKLHFLXVMISAKDEPDTELPPAVDGLLRVHRRITDGLETETDQPQRATVNTGPTRLLVPASQAGSLIG

SEQ ID NO: 280703 - protein, 201 aa, Zea mays
  Clone ID: MRT4577_19102C.1.pep
MWSFASNAIAGSIKKKVQPSKGSLSNPDCSDDDGSSCASREEGLECPICCESFNIVENVPYVLWCGHTMCKNCILGLQWAVVKFPTLPIQLPLFVSCPWCNLLSFRLVYKGNLKFPRKNYFLLWMVESMNGDRAKFHSSGHEERQSVCPSSGGTSSSQHHRRTPTARAETSSSARDRNAAANTPNTASVSLQKLMVCFVQL

SEQ ID NO: 280704 - protein, 145 aa, Zea mays
  Clone ID: MRT4577_19103C.1.pep
MPKIKTSRVKYPEGWELIEPTIRELDAKMREAENDPHDGKRKCEALWPIFRISHQRSRYIYDLYYRRKEISQELYEFCLDQGYADRNLIAKWKKPGYERLCCLRCIQTRDHNFATTCVCRVPKHLREEQVIECVHCGCRGCASGD

SEQ ID NO: 280705 - protein, 185 aa, Zea mays
  Clone ID: MRT4577_19104C.1.pep
GYVGNPHYMPPRPQENYYPPPDVPPVEKQPHYGISSYGRDAPPSAPPGNQNQAHGSSQVTHSMQVPLSYADAVIGAAGASISYIRRHSGATISIQEGAPGEMTVEITGSASQVQTAQQLIKNFMAEASPQGPPAPGPHGQPVDTGYGSYPPYGGASYGSPPGAPAPAPHNGGSYGAAPYSSSYGY

SEQ ID NO: 280706 - protein, 59 aa, Zea mays
  unsure (1)..(59): unsure at all Xaa locations
  Clone ID: MRT4577_19106C.1.pep
SVRQTFAQLASLPPPPLKRKLCDSHFLADTIAPARLASRCNNEQXRTTKACERRPFSIL

SEQ ID NO: 280707 - protein, 94 aa, Zea mays
  Clone ID: MRT4577_19107C.1.pep
MAPSATCWCGHCGAVRRLRAEGEFASCAVCGRVLLDLQDDAVAAPPPRQLRRRQRRARDGAAARDIGARPERGDISDAESTVTSTGEDRWIDEK

SEQ ID NO: 280708 - protein, 48 aa, Zea mays
  Clone ID: MRT4577_19108C.1.pep
LPNIFFPYILSLPISRVNSGNCSHCPPGRWVTLRFSSPLNEETSELGT

SEQ ID NO: 280709 - protein, 59 aa, Zea mays
  Clone ID: MRT4577_19109C.1.pep
KRRLKWSFLKLQKDYNSDHFMVLKTNGSENQSIMQNCGIFPIFHIQIYDFQFGIEIPFG

SEQ ID NO: 280710 - protein, 91 aa, Zea mays
  Clone ID: MRT4577_1910C.1.pep
KKGSLPKLEAKAKGLKLPNSKLKQRVSPFQKKKNPLPQILKKKTGHPKKKFSGGGGGGGKGENGGKKPPLPKSYLKIKKGVGLCPVRARLI

SEQ ID NO: 280711 - protein, 79 aa, Zea mays
  unsure (1)..(79): unsure at all Xaa locations
  Clone ID: MRT4577_19110C.1.pep
GLPSRGSCXFFPFGGXGAGRVVGSLAXPVRLGFWLPRXXXWPPGXXXXPVLXGAPRLVFGRPVFSANPPXXXXGGGNRG

SEQ ID NO: 280712 - protein, 94 aa, Zea mays
  Clone ID: MRT4577_19111C.1.pep
VNCFGNFIIFLGKVLVVCFSVFGGLMAFNYNRALQVWAIPLLLVAFFAYLAAHSFLSVLETVLDTLFLCFAVDLETNDGSSEKPYFMDPGFLSF

SEQ ID NO: 280713 - protein, 52 aa, Zea mays
  Clone ID: MRT4577_19112C.1.pep
AQISQSRFYTRRIKRDKDHCCPWLSKRATIEERGRQTANRLESAQHRPCLPT

SEQ ID NO: 280714 - protein, 248 aa, Zea mays
  Clone ID: MRT4577_19113C.1.pep
AMARTMAAIAILLAAFFVLAPDLATAGAAAAAQSAISAVFAFGDSTLDPGNNNGLATLVRADHAPYGRGFPGGAATGRFSDGKLITDYIVESLGIKDLLPAYRGSGLTVAEASTGVSFASGGSGLDDLTAQTAMVSTFGSQITDFQALLGRIGMPKAAGIANRSLYVVSAGTNDVTMNYFVLPVRTISFPTVDQYSAYLIGRLQGYIQSLYKLGARNFMVSGLPPVGCLPITKSLHSLGSGGCVADQN

SEQ ID NO: 280715 - protein, 78 aa, Zea mays
  Clone ID: MRT4577_19114C.1.pep
RIALGNLRSKVITLRNEALEKDKILLSLVERLQSSKARLSAQAKAHEAEVQELKKKVAEATENFNAEVEKHEICEIER

SEQ ID NO: 280716 - protein, 71 aa, Zea mays
  Clone ID: MRT4577_19115C.1.pep
GVNHVLVKHFIRQATKKSGETETLAFLTEFFVYREVYTLSKGLPFVWEILFPPSQKWGGCIKGRVLSLAWP

SEQ ID NO: 280717 - protein, 64 aa, Zea mays
  unsure (1)..(64): unsure at all Xaa locations
  Clone ID: MRT4577_19116C.1.pep
SGHCYTYWDCTDVRSNQFIHLFDNWNAPCIGPLCTSLIVVSLKVTAKLSSSLPPGLXAFFFSFL

SEQ ID NO: 280718 - protein, 149 aa, Zea mays
  unsure (1)..(149): unsure at all Xaa locations
  Clone ID: MRT4577_19117C.1.pep
PPPLVGLAAVFPPVPPPPGGXPKVRFFARSLAKTRVTKKLTXQKRVAPKGCNFGGGFPIEFGXSSRFPSNFLGGRALPNQKKVPFLRAALKFKSKGKKKFKXGSHLFLKWVNQGGFILMKKPWGPGRGEFKGWGPASRNHKSKFAGLLF

SEQ ID NO: 280719 - protein, 177 aa, Zea mays
  unsure (1)..(177): unsure at all Xaa locations
  Clone ID: MRT4577_19118C.1.pep
SLAGRDFSTNMIVLKGQDIDVVLGMNWLAKHKATLNLXQRTIRLSHNQEEILLPIPIPNKINGRVYEVMVPEIKDIPVVCEFPDVFPEDLSGLPPERDVEFVIELKPGTAPISRRSYRMPPNELAELKIQLQDLLEKGFIRPSSSQWGCPAIFVKKKDQTLRMCVDYRPLNEVSIKN

SEQ ID NO: 280720 - protein, 59 aa, Zea mays
  Clone ID: MRT4577_19119C.1.pep
VLLYSKECTRGRQSASIVKLGPNEEPAIGSDRRAAEHVYVRNDMDQVVKVDDLSNRRHL

SEQ ID NO: 280721 - protein, 1316 aa, Zea mays
  Clone ID: MRT4577_1911C.1.pep
MDPKGKGMVVDNNEKESIFNEPKNDKSTDLGSSHKRKDGKKKKTRRIKEIVYYDSDESSSSQKDDDNDYRKTVNSNFSFDYSRIPHSSNSHLLSIPLGKPPHFDGEDYGFWSHKMRSHLFSLHPSIWEIVENGMKFDSSDSPMFINEQIHKNAQATTVLLASLCRDEYNKVSGLDNAKQIWDTLKISHEGNDITMLTKMELVEGELGRFAMIRGEEPTQTYNRLKTLINKIRSYGSTRWTDHDVVRLLLRSFTILDPHLVNNIRENPRYIKMSPEEVLGKFVSGRMMIKEARYVDDALNGPTNEPQPLALKATRSKEALPSKVAQIEATGLNDEEMALIIKRFKSVLKGHKGQPSKTKTKGKRSCFKCGKIGHFIANCPENESDQEHGSKREKKKNYKKAKGEAHLGKEWDSDCSSSDSDNEGLAATAFNKSSLFPNERHTCLMAKEKKVCTRDGTTYDSSSDDESSDEEIDYSSLFKGLDRNKIDKINELIDALNEKDKLLEKQEDLLYEEHDKFVEAQRSHALEVKRNEMLSCELSSCHETISKFRSINDDMNAKLEIANKSNSCEEHVAICTRCKDFDINACSEHLVSISKLNDELASLNAQLKTSKNEFDKLKFARDAYTIGRHPSIKDGLGNKREAKNLTSHKAPISAKEKGKAPMASSVQKNHAFMYHDRRQPRNAYRSCNAYNVFDSHDMVASSSSYMHDRNVGRRNVIHNMPRKNVVNVPRKVNGPSTIYCALNASFAICRKDRKIVARKLGAKCKGDKTCIWVPKDICTNLVGPNKSWVYASGGSSWIIDSGCTNHMTGEKKMFTSYVKNKDSQDSIIFGDGNQGKDKSETQGTLKRFLRRAQNEFELNVKKIRSDNGSEFKNLQVEEFLEEEGIKHEFSAPYTPQQNGVVERKNRTSTGWLYQMDVKSAFLNGPIKEEVYVEQPPGFEDERYPDHVCKLSKALYGLKQAPRAWYECLRDFLIANTFKVGKADPTLFTKTCDGDLFVCQIYVDDIIFGSTNQKSCEEFSRVMTQKFEMSMMGELNYFLGFQAKQLKDGTFISQTKYTQDLLKRFGMKDAKPAKTPMGTDGHTDLNKGGKSIDQKAYRSMIGSLLYLCASRPDIMLSVCMCARFQSDPKECHLVAVKRILRYLVATPCFGLWYPKGSTFDLVGYSDSNYAGCKVDRKSTSGTCQFLGRSLVSWNSKKQISVALSTAEAEYVAAGQCCAQLLWMRQTLRDFGYNLSKVPLLCDNESAIRMAENPVEHSRTKHIDIRHHFLRDHQQKGDIEVFHVSTENQLADIFTKPLDEKTFCRLRSELNVLDSRNLD

SEQ ID NO: 280722 - protein, 96 aa, Zea mays
  unsure (1)..(96): unsure at all Xaa locations
  Clone ID: MRT4577_19120C.1.pep
MDAGYSDEKALRDFXKDSVRLDKRCQKSDRTELTKVTARTEIGFVYMGFIGFFGKLILISIYNINSQFLLGSGRDLHGRSTILWRATDIQELALWN

SEQ ID NO: 280723 - protein, 54 aa, Zea mays
  Clone ID: MRT4577_19121C.1.pep
NNRISSTGTAFRPESTAWLVSHYVGLRPLQIRLCACQNRFEPGSRSKKQTKRTE

SEQ ID NO: 280724 - protein, 57 aa, Zea mays
  unsure (1)..(57): unsure at all Xaa locations
  Clone ID: MRT4577_19122C.1.pep
KTNSCYRFKNLGIHRLTNNVESFASYENIFVTYHLDGSCQIXIVYSYEELYGDLCKK

SEQ ID NO: 280725 - protein, 665 aa, Zea mays
  Clone ID: MRT4577_19123C.1.pep
MARVRSTARVEHEGGETEGSETVPISEAMQRSGLVTLEKIPSDDAEQAEQAVAEAEEEDIEETDPEDDYRIAMPSKPSHLDFGKSTVSKADLSKMVKSGFFNENQKKLLRFGGEETTPKPEKDEIVIFKSFLKAGLRFPLHGIIAEVLKRFGIYFHQLTPNAIVRLSVYIWALRSQAVEPFANSFCRVHELHYQTKARKDGLHDNFGCYNFAYRKTTKFPVISYRSKWAAGWKSEWFYVKVDDDKEKLVQSPLELIFGETRPRCNMTPEGPTQQALNEFRIVAEHISTGDLVQEFLAFKVFPSLKEWEMPKLKGEKKEGELVRLPYYFKFKKYFKTPCQEWLDTIEVMCNEILGNYSKKEDQLMTAAFGTRPKRRLNRVLDALGFEYPDYENLNKGAGGQKRKRITEALNEDEKETPKKKIPKKRKASSPKRKISDEEETPASPSATDVEAILKVMTESLPAKLSPLRPQLTKFFQKEKEPKKMKKTTKVKRQRIIGVTEVIDKTPPRASAQKTPAAEERTDIEITPSEVAAAEAASVEDLNLESTIEHIEGEIDELDEVIAGHGDFCAWVASRGTAAAFLKAGCDHGKVVNRPNFTLSPSILDDIPDLARSISNRFVKMIWTKGGREKAGDEARSHLEPVRNHTLCLPLSSSSILTYNNLIHVG

SEQ ID NO: 280726 - protein, 932 aa, Zea mays
  Clone ID: MRT4577_19124C.1.pep
MAGGNTLAGAKERWLADEGECGAKRGSNGSWCGFLRETLGDTGVSQMVTTEENPTAETEQTTAVEEEEENTEETDLEDDSHIAAPSKPSHLDFGKSTVSKADFPKMVKSGYFTENEKKLLRFGGEETTPKPEKDEIVIFKSFLKAGLRFPLNRIISGVLDKFGIYFHQLTPNAIVRLSVYIWALRSQAMEPFADSFCRVHELHYQTKARKDGLHENFGCYNFAYRKTTKFPVISYRSKWPAGWKSEWFYVKVDEDKEKLVQSPLELTFGETRPRCKMTLGGPSLAAVSEFKIIAEHIGTRDLVQEFLSFRVFPTSKEWEMPKLQGEKKKGELVRLPYYYKFKKYFKKPCQEWLDTIEVMCNEILGNYSKKEDQLMTAAFGTRPKRRLNRVLDALGFEYPDYKNLNKGAGGQKRKRVTEALDEGEKEPIKKKIPKKRKASPPKQQLSEAEETPASPSAAVVEEILKVMTESLPAKLSPLGPQLTKFFQKDKEPEKSKKTIKAKKQRIITVTEVIDKTPPRASAQKTQVAAEGADTEIVPSEAAAAEAASAEDVNLESTIEHIDQILLDMAAEEATTAAEEAMTAASKKEKEVAEEASEDEAFVFQNLVGGHLSKTEIEELKEYAKSCGYKPGALLFRGVDDEKIDCIRDQTGAKVISTLSKSIGFPKLETDISRYRRQHVVGSLFYSNFKSMLLSKALQMQQDVEDKKHEVIIGNLESKIKEQSDAFEKKNFELQATEGLLAEAEAKISELNTKLLRQSEQFEREKQDLNAKLEAEAQQNSDLRKLLTGLQEKCLEFSNKCIQRLRKIFYSVGASSEKFTPSAEDLPKTFEHIEGEIDELDEVIAGHGDFCAWVASRGTAAAFLKAGCDHGKIVNRPNFTLSPSILDDIPDLARSISNRFIKMIWTKGGREKAGDEARSHLDPDDEAEADDQK

SEQ ID NO: 280727 - protein, 523 aa, Zea mays
  Clone ID: MRT4577_19125C.1.pep
MDATQLNRSMDATPTRLFLGALLLLVPAALLLLLRARGRRRLPPGPPSLPLLGSVVWLTNSPAEIEPLLRRLFERYGPVVALRVGARLSVFVADRRIAHEALVDRGATLADRPALASVKFLDESDNTITRASYGPVWRLLRRNLVAETLHPSRVKLFAPARAWVRRVLVEKLGEAGPDAAPPRVVETFQYAMFCLLVLMCFGERLDEPAVRAIASAQREALIYRSKNMQVFAFLPVVTKHLFRARLEKARALRRRVKELFVPLINARREYKKRGGEPRRETTFEHSYVDTLLDIKLHEDGDRPLTNDEIILLCSEFLDAGTDTTSTGLQWIMAELVKNPAIQEKLYSEIKAATDDNKEGVSEEDVHSMPYLKAVILEGLRKHPPAHFVLPHKAAEEMEIGGYLIPKGTVVNFMVAEMGRDEQEWKNPMQFSPERFLPGGDGEGVDVTGTKAIRMMPFGVGRRICAGLGIAMLHLEYFVANMVREYEWKEVPGDEVDFAEKNEFTVVMKKPLRPRLVPRRSHLN

SEQ ID NO: 280728 - protein, 680 aa, Zea mays
  unsure (1)..(680): unsure at all Xaa locations
  Clone ID: MRT4577_19126C.1.pep
PRDQRQEAXLVEVFPVKMSATLQGHSLTLSGPDDASQLTIDLLGCTVAAVSASNLPSRKWAKRYPIKLESKESGICRGSKVCYVYADTSWEKESWCKALRLASTTDKDKLKSHEMLTQEFRSYMSSLKAGYPSFLGPSTLSSQEHVLVDNTVKNDGPSKLRGFLKRLVGKKASAKASQESKTGPAPSKQDTSQPSTPSSTMSFNSQLPASPSAKVDEKLADDGTLCWNLLISRLFFDAKMNDEMNKAIRARIQRTLSNTRTPAYIGEITLTDLNLGKLPPSLHRMRVLPLDLDESWAFEVDFECSSGILLHIETRLEVQAPELEKDIMKTDIRGNPNGDASSDFLDSIEQYGNQFGPSEVSDFAAEVNDEADTLRKSKSAGWASTYMSRWRSILNSIADQVSQVPLSLAIKISSVRGTMRIHLKPPPGDRVWYGFTSMPEIEWELESSVGDRKISSSYIASLIGNRIKASVRQILVMPNCESFPISWMIADTDDWVPRRIAPFIWLNREPADRRAADTTREMMPGEASTSKAXLQXEQVESAAXSTKRITNGSWNKTKIRVDGQEQEQAEASTSSQSWLVSANGDATREQLRMPLLSSSGDERAGPVEEQQASPSAAEEEGDAKKRKRRARVMDLGRRMGDKLEEKGKRFVGKMRENARNNRLLLPDLEQATTPPAPAPS

SEQ ID NO: 280729 - protein, 50 aa, Zea mays
  Clone ID: MRT4577_19127C.1.pep
NQRPPQPKRSSSQRNRPPLEPTAHSKFKPPGVIITTSPERGPPPRPRAEF

SEQ ID NO: 280730 - protein, 374 aa, Zea mays
  unsure (1)..(374): unsure at all Xaa locations
  Clone ID: MRT4577_19128C.1.pep
PLERKLCILKGVFPRQPKKKVEGNHKTYYHTKDIAFLAHDPLIEKFREIKVHRRKVKKAVAKKNRDLADRLLNRPPTYKLDRLVLERYPTFVDALRDLDDCLTMVHLFAALPAVDGERVEVKRIHNCRRLSHECLTFISVKGIYYQAEVXGQKITWLTPHALQQVLTDDVDFNVMLSFLEFYETLLGFVNFKIYHSINVNYPPILDPRLEALAVELYALCRYMSAGSRRMIGNSQTDEVMEDKDEKSKAEEVIEEEKVVKNKASSKADESEFRLAQLQHQLPTNEPGALMNLVEESTADDADDDDTKDCKGLFKNLKFYLSREVPRESLLFIIPAFGGTVSWEGEGAPFKEIDEDITHQVDSICNNLLHQSLTI

SEQ ID NO: 280731 - protein, 128 aa, Zea mays
  unsure (1)..(128): unsure at all Xaa locations
  Clone ID: MRT4577_19129C.1.pep
MAYYQEVDYCSEEVRSVTPVGFVHHFAPHNDGHQWRNLSQKKINNTHFPMSYYTCPLQGQHXCPSTNHVRHKYHTDPPLFALTYYYDHSCYIAFLPLSPSQFLLHTSSVKVVSICFDSSSATLALVAN

SEQ ID NO: 280732 - protein, 424 aa, Zea mays
  Clone ID: MRT4577_1912C.1.pep
MDPKGKGMVIDDKEKESFINEPKDDKPTDSGSSQKKKDGKKKRRIKKIVYYDSDESSSSQKDDGYKEKKKTVNSNFSFDYSRIPHNSNAHLLSIPHGKPPHFDGEDYGFWSHKMRSHLFSLHPSIWEIVENGMRFDSSDNSMFINEQIHKNAQATTVLLASLCREEYNKVSGLDNAKQIWDTLKISHEGNDVTMLTKMELVEGELGRFAMIRGEEPTQTYNRLKTLVNKIRSYGSTRWTDHDVVRLMLRSFTVLDPHLVNSIRENPRYIKMTPKEILRKFVSGRMMIKEARYVDEALNGPIYEPQTVALKATSNRETLPSKRFKTALKGRKEHPNKSKTKGKRSCFKCGKVGHFIANCPDNDSDQDQEKKREKKKTYKKAKGEAHLGKEWDSDCSSNDNEGLATSAFNKSSLFPNEHHTCLMAK

SEQ ID NO: 280733 - protein, 63 aa, Zea mays
  unsure (1)..(63): unsure at all Xaa locations
  Clone ID: MRT4577_19130C.1.pep
AGSAASVSRFSKSEAPGGPFLVNKTGMGDDPNPHFGRQTVCYPSTRKGCCVNHTTAVLWSWKX

SEQ ID NO: 280734 - protein, 629 aa, Zea mays
  unsure (1)..(629): unsure at all Xaa locations
  Clone ID: MRT4577_19131C.1.pep
MARVRSTAWVEREGNETEASETVPISEAMQRSGLLTSEEVPNDDAEQAIAEAEEEDIEETDPEDDYRIAMPSKPSHLDFGKSTVSKADLSKMVKSGFFTENQKKLLRFGGEETTPKPEKDEIVIFKSFLKAGLRFPLHGIIAEVLKRFGIYFHQLTPNAIVRLIVYIWALRSQAVEPFADSFCRVHELHYQTKARKDGLHDNFGCYNFAYRKTTKFPVISYRSKWAAGWKSEWFYVKVDDDKEKLVQSPLDLIFGETRPRCNMTPEGPTQQAMNEFRIIAEHISTRDLVQEFLAFKVFPSLKEWKMPKLQGEKKEGELVRLPYYFKFKKYFKTPCREWLDSIEVMCNEILGNYSKKEDQLMTAAFGTRPKRRLNRVLDALNFEYPDYENLNKGAGGQKRKRITEASNEDEKETPKKKIPKKRKASSPKRKISDEEKFPASPSATDVEAILKVMTESLPAKLSPLGPRLTKFFQKDKEPEKSKKTIKAKKQRIIIVTEVIDKTPPRAAAQKTPAYAEETDVEITPSEVAAAEAASAEDLNLESTIENIDRILLDMAAEEATTAAEEVVTAASGKGKEIADEASEDEAFMFQNLVGEXLSKAEREELREYAKSCGYKPGALLFGGIDDEKL

SEQ ID NO: 280735 - protein, 325 aa, Zea mays
  unsure (1)..(325): unsure at all Xaa locations
  Clone ID: MRT4577_19132C.1.pep
SILFGGIDDEGLGCIRDQTGAKVVGTLSKSIGFPKLEADISRYRRQHIVSSLFYSNFKVNILSLTLISFGTKIFSNEGYLSXSMLLSKALQMQQDFEDKKHEVIIENLESKIKEQSDAFEKKNFELQATEGLLAEAEAKITELNTKLLRQSEQFEQEKQDLNAKLEAEARQNSDLRKLLTSLQEKCLEFSNKCIQRLRKIFYSVGASSEKFTPSAEDLPRTFEHIEGEIDELDEVIAGHGDFCAWVASRGTAAAFLKAGCDHGKIVNRPNFTLSPSILDDIPDLARSISNRFVKMIWTKGGREKAGDEARSHLEPDDEAEAEDQE

SEQ ID NO: 280736 - protein, 263 aa, Zea mays
  Clone ID: MRT4577_19133C.1.pep
MQQDFEDKKHEVIIENLESRIKEQSDAIEKKNFELQATEGSLAEAEAKITELNTKLLRQSEQFEREKLELNAKLEAEAQQNSDLRKLLTSLQEKCLEFSNKCIQRLRKIFHSVGASSEKFTPSAEDLPKTFEHIEGEIDELDEVIAGHGDFCAWVASRGTAAAFLKAGCDHGKIVNRPNFTLSPSILDDIPDLARSISNRFVKMIWTKGGREKAGDEARSHLEPLGVAVPRRYSCRMTKPKLMIKNDAEAEAPWRLNSSLDST

SEQ ID NO: 280737 - protein, 37 aa, Zea mays
  Clone ID: MRT4577_19134C.1.pep
VWGVGSPKKKKKKKKKKKKKKKKKKKKKKKKKKKKKK

SEQ ID NO: 280738 - protein, 235 aa, Zea mays
  Clone ID: MRT4577_19135C.1.pep
QRRVREEETPASRSATDVEEILKVMTESLPAKLSPLGPQLTKFFQKEKEPEKTKKTTKTRRQRIIAVTEVIDKTPPRASAQKIPAAEEITNIEVAPSEIAATEATSTEDLNLETTIEHIDKMLLNMATEEATTAAEETMAAVSGKEKEIADGTSEDEAYMFQNLVGQELSKTEIEELKEYAKSCGYKPGALLFGGIDDEKLDCIRDQTGAKIIGTLSKVFGFPKLETDISRYRRH

SEQ ID NO: 280739 - protein, 816 aa, Zea mays
  Clone ID: MRT4577_19136C.1.pep
MARVRSTARVEREGGEAEGSETVPISEAMQRSGLVTSEEIPTVEAEQATAEAEEENIEETDPEDDYRIAMPSKPSHLDFGKSTVSKADLSKMFPVISYRSKWAAGWKSEWFYVKVDDDKEKFVQSPLELIFGETRPRCNMTPEGPTQQVLDEFRIISEHISTRDLVQEFLAFRVFPSLKEWKMPKLEGEKREGELVRLPYYFKFKKYFKTPCQEWLDTIEVMCNEILGNYSKKEDQLMTAAFGTRPKRRLNRVLDALGFEYPDYENLNKSVEGRKRKRGAEASDKDEKEPAKKKNIPKKKKVLSPKQKISDKEETPASPSAFDVEEILKVMTESLPMKLSPLGPQLTKFFQKEKEPEQTKKSTKTKRQRIIAVTEVIDKTPPRASAQKIPEAEGLTNIEVAPSEMAATEAASTEDLNLESTIEHIDKILLDMATEEATAAAEEAMAAASGKEKEIADEASEDEAFMFQNLIGQELSEAEMEELKEYAKSCGYKPGALLFGGIDDEKLNCIRDQTGAKIISTLSKSIGFPKLETDISRYRRQHIVGSLFYSNFKSMLLSKALKMQQDLEDKKHEVIIEILESKIKEQSAIVEKKDFELRTTEGLLAEAEAKVAELNSKLLCQSEQFEQEKQELSVKLEAEVQQNSDLKKLLANLQEKCLEFSNKCIQRLRKIFHSVGASSEKFTPSAEDLPKIFEHIEGEIDELDEVIAGHGDFCAWVASRGTAAAFLKAGCDHGKIVNRPNFTLSPSILDDIPDLARSISNRFVKMIWTKGGREKAGDEARSHLEPLGFDPQQLNLCRMTKLRPMLKKHDAEAEAP

SEQ ID NO: 280740 - protein, 815 aa, Zea mays
  Clone ID: MRT4577_19137C.1.pep
MARVRSTARVEREEGEAEGSETVPISEAMQRSGLVITEEIPTAETEQATAEAEEGNIEETDSEDDSHFAIPSKPSHLDFGKSTVSKADFSKMFPVISYRSKWPTGWKSEWFYVKVDEDKEKLVQSPLELTFGETRPRCRMIVEGPTWAALGEFKIIAEHIGTRDLVQEFLAFRVFPTLKEWEMPKLQGEKKKGELVRLPYYYKFKKYFKTPCQEWLETIELMCNEILGNYSKKEDQLLTAAFGTRPKRRLNRVLDALGFEYPDYENLNKGVGSRKRKRITEALNEDEIEPSKKKIPKTRKVSSPKQKVSDEEESPASRSATDVDEILKVMTESLPTKLSPLGPQLTKFFQKEKEPEKTKKTTKAKRQRIIAVTEVIDKTPPRASAQKIPAAEEITNIEITPSEVAAAEATSIEDLNLESTIEHIDKMLLDMATEEATTATEEAMAAVSGKEKKIADEASEDEAFKFQNLVGEKLSKTEIEELKEHAKSCGYKPGALLFGGIDDEKLDCIRDQTGAKVIGTLSKSIGFPKLETDISRYRRQHIVGSLFYSNFKSMLLSKALKMQQDLEDKKHEVIIENLESKITEQSTSFEKKNFELQATEGLLAEAEAKITELNTKLLRQSGQFEQEKQELNAKLEAEVQQNSDLKKLLAGLQDKCLEFSNKCIQRLRKIFHSVGASSEKFTPSAEDLPKTFEHIEGEIDELDEVIAGHGDFCAWVASRGTAAAFLKAGCDHGKIVNRPNFTLSPSILDDIPNLVRSISNRFVKMIWTKGGREKAGDEARSHLEPLNFDLQQLNSCRMTKPRPVLKENDAEAEVS

SEQ ID NO: 280741 - protein, 52 aa, Zea mays
  Clone ID: MRT4577_19138C.1.pep
LRSWVLSKRIVEHKQAFLLWLKQCQNSLLGIILMEIIFFLNGNWMEGTRSGF

SEQ ID NO: 280742 - protein, 58 aa, Zea mays
  Clone ID: MRT4577_19139C.1.pep
ISSGPILFNVHRVKIISTNHRASCKISGGFTTWLLFYQICENWGAFTIVWTRETWSYT

SEQ ID NO: 280743 - protein, 1460 aa, Zea mays
  Clone ID: MRT4577_1913C.1.pep
MDPKGKGMVVNDKEKESFLNEPRDDKPTDSGSSHKKKDGKKKRDEYNKVSGLDNAKQIWDTLKISHEGNDATMITKMELVEGELGRFAMIRGEEPTQTYNRLKTLVNKIRSYGSTRWTDHDVVRLMLRSFTVIDPHLVNFICENPRYTKMTPEEILGKFVSGRMMVKEARYVDDALNGPMAIYEPQPVALKATSSNREALPSKVAQVEAAGLNEDEMALIIKRFKIALKGRKEHPNKSKAKGKRSCFKCGKTGHFIANCPDNANDKEQENSGKREKKKAYKKAKGEPHLDKKWDSDCSSSDSDDEGLAASNFNKSYLFPNECHTCLMAKEKKVSTRDTPKYTTSSDDDSSDDEVDYTSLFKGLERTKVDKINELIDALNENNRLLEKQEDILYEEHDKFVSVQKSLALDIKRNEMLSSELSACHETVSSLKSINDDLNAKLEVVNKSSSFTEHVVICNRCKDFDVDACVEHLTSITKLNGEVASLNAQLKTCKNDFDKLKFARDAYTVGRHPSIKDGLGFRKEAKNLTSQRAPIPNKEKGKAPMASSNQKNHAFMYNDRNFSRSSHYNRSYNAFDSHAMIASSSNFNVVARKMGSKCKGDKTCIWVPKTIVTNLVGPNKSWVHASGGSSWIIDSGCTNHMTGEKKMFTSYVKNKDSQDTIIFGDGNQGKVKGLGRIAITNEHSISNVFLVESLGYNLLSVSQLCHMGYNCLFTNVDVSVFRRSDGSLVFKGVLDGKLYLVDFSKEEADLDACLIAKTSMGWLWHRRLAHVGMKNLHKLLKGEHVLGLTNDKSETQGTLKRFLRRAQNEFELKVKRIRSDNGSEFKNLQVEYLEEEGIKHEFSAPYTPQQNGVVERKNRMLINMARTMLGEFKTPERFWSEAVNTACHAINRLYLYRLLKKTSYELLISNKPNVSYFRVFGSKCYILVKKGLVEVSSDVVFDETNDSPREQVDLDDIDEDDVPTAAIHTMAIGDVRPQEQQQQDQPSSSTMVHPPTQDDEQVHQEGACDQGGAQEEQVIEEEVPLAPPTQVRAIIQRNHHVDQILGDISKGVTTRSRLANFCEHYSFVSSIEPFRVEEALQDPDWVLAMQEELNNFKRNEVWSLVPRPKQNVVGTKWVFRNKQDEHGVLDLWQKETFAPVARLESIRILLAYAAHHSFRLFQMDVKSAFLNGPIKEEVYVEQPPGFEDDKYPDHVFKLSKALYRLKQAPRAWYECLRDFLIANAFKVGKVDPTLFTKTCDGDLFVCQIYVDDIIFGSTNQKSCEEFSMVMTQKFEMSMMGELNYFLRFQVKQLKDGTFISQTKYTQDLLKRFGMKDAKPAKTPMGTNGHVDLNKGGRSVDQKAYRSMIGSLLYLCASRPDIMLSVCMCARFQSDPRECHFVAVKRILRYLVATPCFGIWYPKGSTFDLVGYSDSDYAGCKVDRKSTSGTCQFLGRSLVSWSSKKQTSVALSTVEAEYVAAG

SEQ ID NO: 280744 - protein, 918 aa, Zea mays
  Clone ID: MRT4577_19140C.1.pep
MARVRSTARVEREGDETEASETVPISEAMQRSGLVTSEKIPIDDAEQAIAEAEGEDAEETDPEDDYHLATPSKPSHLDFGKSTVSKADLSKMVKSGYFTENQKKLLRFGGEETTPKPEKDEIVIFKSFLKAGLRFPLHGIIAEVLKKFGIYFHQLTPNAIVRLSVYIWALRSQAVEPFADSFCRVHELHYQTKARKDGLHDNFGCYNFAYRKTTKYPVISYRSKWAAGWKSEWFYVKVDDDKEKLVQSPLELIFGETRPQCHMLPEGPTQKAMYEFKIIAENISTRDLVQEFLAFKVFPSVKEWEMPKLKGEKKKGELVRLPYYFKFKKYFKTPCQEWLDTIEVMCNEILGNYSKKEDQLMTAAFGTRPKRRLNRVLDALGFEYPDYEDLNKGAGGQKRKRITEALDEGEKEPIKKKIPKKRKASSPKQQISEAEETPASPSAAVVEEILKVMTESLPAKLSPLGPQLTKFFQKDKEPEKSRKTIKAKKQRIITVTEVIDKTPPRASAQKTPAAAEGADIEIAPSEAAAAEAASAEDLNLESTIEHIDQILLDMAAEEATTAAEETVTAASKKGKEIADEASEDEAFAFQNLVGEHLSKAEIEELREYAKSCGYKPGALLFGGVDDDKLDCIRDQTGAKVISTLSKSIGFPKLEADISRYRRQHVVGSLFYSNFKSMLLSKALQMQQDLEDKKHEVIIGNLESKIKEQSDAFEKKNFELQASEGLLAEAEAKITELNTKLLRQSEQFEREKQDLNAKLEAEAQQNSDLRKLLTNLQEKCLEFSNKCIQRLRKIFYSVGASSEKFTPSAEDLPKTFEHIEGEIDELDEVIAGHGDFCAWVASRGTAAAFLKAGCDHGKIVNRPNFTLSPSILDDIPDLARSISNRFVKMIWTKGGREKAGDEARSHLDPDDEAEADDQK

SEQ ID NO: 280745 - protein, 77 aa, Zea mays
  unsure (1)..(77): unsure at all Xaa locations
  Clone ID: MRT4577_19141C.1.pep
ESFRDAAHSFSQGGLDYLRDPRTLHAQSMLDIXTCHVVLMLFXKGYRDACGSLREWLDLVSPGGSLYPLCLVYDMDI

SEQ ID NO: 280746 - protein, 59 aa, Zea mays
  Clone ID: MRT4577_19142C.1.pep
ACARMGIHNSKYKKQFLVLIYSVLSKEEFSGTVLSVLYSYANSLIYLRLTTTMFTVLHF

SEQ ID NO: 280747 - protein, 130 aa, Zea mays
  Clone ID: MRT4577_19143C.1.pep
PWQLPSPPAHPVLLHEGERWSRVGLLLPLVPAAALLGAERDRGGAATRRQRGGKDGRRTSFIFGTDAPHHNWSCSSPARIHRLCAPMVVGGWVGGHGEAPSAEAMAESKEEGGAMGIERKGARVVRRRRC

SEQ ID NO: 280748 - protein, 155 aa, Zea mays
  unsure (1)..(155): unsure at all Xaa locations
  Clone ID: MRT4577_19144C.1.pep
MPQAAAPACALPLPLPTMPGVARSHAWDWVALLLLVAVDVLLNVIEPFHRFVGAGMMADLRYPMKGNTVPVWAVPIIAVIGPVTIFAVVYIRRRNAYDLHHAILXGILFXVLITGVLTDAIKDAVGRPRPNFYWRCFPDGEAVTTSSSNSIALHF

SEQ ID NO: 280749 - protein, 205 aa, Zea mays
  Clone ID: MRT4577_19145C.1.pep
MAQQQSSSPHSQSAQATPLFPPFSSPKPASSNTEPITRSMAGQPPYSSSQQQHEVAHSFYGQGNTILVPVADHNAQHQQSQSVQLHSQGTCLPQPSKPSHCSVASYAVQGNGQTYSSTYKNPSNCPATVVALLPQPPATASMAYHPLGPQVVHNHPFGNMVETASVVGYSRDQGEILPVVTAVQPVMVDKLNAGSNVTSPREWSA

SEQ ID NO: 280750 - protein, 95 aa, Zea mays
  Clone ID: MRT4577_19146C.1.pep
PAKPPKLARYNKKPPIPSREIKTSVRLVLPGELAKHPVWEGTKAVPKFPWFYPPCCRGRCCLLFKQALSWAASHARSGGWLVCVSGPGAFACVMN

SEQ ID NO: 280751 - protein, 478 aa, Zea mays
  Clone ID: MRT4577_19147C.1.pep
SSASTAASSSFPTALATAAAVEASAVTDDLASYLHKLQPRLLKLLRSNAFKAKPALITLIGASAAVGGDAEVTASIPCLRDAVASDDWAARKAAAEALAALALEHTDLLTTYKSSCVTFFEARKFDKVKIVRESINRMIEAWKEIPGAEEDECSSAPPSASQSQRRYSLTGSASDGRYPAASLGSNSVPSATRRSRLPVSRSSPPDVSPSVTKTYSPSSIRNKKLSPPSYRKARQANNCNYKVEIAVAPDATPIKVVTEEKLLEGGNVRGRLEARRALFQGSQDRSAKLAGHKAGSRVVLRLRIGNLVYWIYFQRFMGKSENGMHSLETRVHGLEMALDEISRDLAFSSGRMTSREDDAKRSLETRVHGLEMALDEISRDLAFSSGRMSSREPDAKTCCIPSPKFWRRHNGGRSSSRFSVSDAANSSDGSRTSYKWERQRFGLQGGFVTNPLAEPNISSAGKTMVTHEGRKKDKTLQK

SEQ ID NO: 280752 - protein, 322 aa, Zea mays
  Clone ID: MRT4577_19148C.1.pep
PPSASQSQRRYSLTGSASDGRYPAASLGSNSVPSAIRRSRLPVSRSSPPDVSPSVTKTYSPSSIRNKKLSPPSYRKARQANNCNYKVEIAVAPDATPIKVVTEEKLLEGGNVRGRLEARRALFQGSQDRSAKLAGHKAGSRVVPYEGGGNLEEISEVEGRSERYAVQKDESLSEIRTQLLQIENQQSSLLDLLQKFMGKSENGMHSLETRVHGLEMALDEISRDLAFSSGRMSSREPDAKTCCIPSPKFWRRHNGGRSSSRFSVSDAANSSDGSRTSYKWERQRFGLQGGFVTNPLAEPNISSAGKTMVTHEGRKKDVTLQK

SEQ ID NO: 280753 - protein, 223 aa, Zea mays
  unsure (1)..(223): unsure at all Xaa locations
  Clone ID: MRT4577_19149C.1.pep
MCLQHSRARLPPDKQLAAEKSFALYCKPVELYNIIQRRAIKNPPFVQRSLLYKIQARRKKRLQPRLLKLLRSNAFKAKPALITLIGACAAMGANAEVTASITCLRDAIASDDWAARKAAAEALAALALEHTDLLTTYKSSCVTFFEARRFDKVKVVQESMNQMIEAGKEIPGAEEDXSAPRSATSVPVTTKIFSYRSASDGRYPAASLGSNSVPLAPGRAYYL

SEQ ID NO: 280754 - protein, 311 aa, Zea mays
  unsure (1)..(311): unsure at all Xaa locations
  Clone ID: MRT4577_1914C.1.pep
VDPRVREHQPNGPVTPVDMVVDFYKFDYEFGEPPRVTSLHNTVPVATFNDFCDDVYFVADQRGYEAVVYYLAGQYLKTDDKSGKIVDPRLQLNKVVREIKYSPGGVTVKTESDLIQXSPSYLSVSCSXSALDPSSADRLSTLNINYSILIXYGRFLLSAPXTWKVRAIYQFDMAVYTKILLKFPRKFWPEGKGREFFLYASSRRSYYGVWQEFEKQYPDANVLLVTVTDEESRRIEQQSDEQTKAEIMQLLRMLXQLRATVRTVYTFGEHTSEHYNGYVHGAYLSGIDSAEILINCAQKKMCKYHVQGKYD

SEQ ID NO: 280755 - protein, 142 aa, Zea mays
  unsure (1)..(142): unsure at all Xaa locations
  Clone ID: MRT4577_19150C.1.pep
CATTSPAPAPSPRRPPHRPRGLSRATGPXAPRAQGPEPXPPTWRPRCSTRSPTCSPAAPRAEGARRSRPPXPPPQLALPAPPPPPPLPPPSPPKPPIVQPRAPPPPLPLPAAVPTPATSVSAEELTGSSESGEDDDWSDAVA

SEQ ID NO: 280756 - protein, 66 aa, Zea mays
  Clone ID: MRT4577_19151C.1.pep
MHNRNKVCYSACINATTLALVYARIPMRDTVTSCSVVYLCSTPLLHRNLPNFHNFSSSLMVIKVKQ

SEQ ID NO: 280757 - protein, 187 aa, Zea mays
  Clone ID: MRT4577_19152C.1.pep
MASPTQFLTIFPLISLVILAAMATASAACVGPLCCYFGCEQEIRFPTYFLYQAHGNTNANQYIIVPSSHAFGFGTIAANDWAILDAPQQGAKVIARARGMQIQVDQAAGNDWQCYFSIEFQDASFGGSTLKVMGENHNGATGEWSIIGGTGKLSMARGTIKYKVVSISEFENYKQLDIYAVYTSLAV

SEQ ID NO: 280758 - protein, 136 aa, Zea mays
  unsure (1)..(136): unsure at all Xaa locations
  Clone ID: MRT4577_19153C.1.pep
XCVSRFEAICVVEALIKQAVSVHFIRSRIMATLILSSSVEYNWWPYIHDVGVIFLIASECLYPFSRVMPSDNEGEDLGTQLSRLLGLMQDVCTIKSGSHLDSKDAYVTVMHVKFATKKGEHPLCKIDSYMKCSELK

SEQ ID NO: 280759 - protein, 89 aa, Zea mays
  unsure (1)..(89): unsure at all Xaa locations
  Clone ID: MRT4577_19154C.1.pep
MPTLLVDLTIKAVNHVTYDTDKILLPFNDDDAPKIAIFTTLDHXFLSXYDLTFNTYPMLLIQNMVTIEQDAFNNLAHSYLQLIIDEGLS

SEQ ID NO: 280760 - protein, 110 aa, Zea mays
  unsure (1)..(110): unsure at all Xaa locations
  Clone ID: MRT4577_19155C.1.pep
LPGFQICKRNQIIFLVLRRFFFSRMICSRADSXTTSRFCLTEPTHFLQKEKERERSFRDSDPHQKKTKKQTPNLYVCRNGEKKEKRNHQDSYFAAADDQVLLLRPCSTLK

SEQ ID NO: 280761 - protein, 55 aa, Zea mays
  Clone ID: MRT4577_19156C.1.pep
RCARLCLLSSSGCLCEHLPSLRSKMSLFVKLCKSPVGFRSVYLCYFLKKKKKKRP

SEQ ID NO: 280762 - protein, 79 aa, Zea mays
  Clone ID: MRT4577_19157C.1.pep
GSREGSFFFFFFYYTNFITIIIGQVEMRQNITCKPWPRLQTHRHYELDMFFYPCIQNRFIFTRLYFINRKPPITFNTLV

SEQ ID NO: 280763 - protein, 63 aa, Zea mays
  unsure (1)..(63): unsure at all Xaa locations
  Clone ID: MRT4577_19158C.1.pep
CMLAVAGVLVVVSVLKHLLQGVVRGMLLWFVLXXVGLGNVLHWALLVFGWTLLNKAVCVVVSW

SEQ ID NO: 280764 - protein, 80 aa, Zea mays
  Clone ID: MRT4577_19159C.1.pep
SSTTRFSAGAPTALGVEPPRGRCHPVQPEPVRFPGWHHKGHRLLQPFQVGFGVCIWKLWRGPVGYWRWALSFWPPSNDCV

SEQ ID NO: 280765 - protein, 946 aa, Zea mays
  Clone ID: MRT4577_1915C.1.pep
MVVNDKEKESIFNEARDDKPTDSGSSHKKKDGKKKRCIKKIVYYDRDESSSSPRDDDDDDSLSKRKTVNQNYSFDYSRMSYNSNAHLLSIPLGKPPHFDGEDYSFWSHKMRSHLFSLHPSIWEIVKNGMHFDSTDNPVMINELIHKNAQATTVLLASLCRDEYNKLVEGELGRFAMIRGEEPTQTYNRLKTLVNKIRSYGSTRWTDHDVVRIMLRSFTVIDPHLVNLIRENLRYTKMTHEEILGKFVSGRMMVKEARYVDDALNGPLPVYELQPVALKATSSKEALPSKVAQVEAANLNEDEMALIIKRFKTALKGRKEYPNKNKTRGKRSCFKCGTRKEREEGEKKSYRKAKGEAHLRKEWDSDCSSSDSDDEGLAASAFNKSSLFPNERHTCLMAKEKKGLDRAKVDKINELIDALNEKDRLLEKQEDILYEEHDKFVSVQKSLALGIKRNEMLSSELSACHETISSLKSLNDELTTKLEGVNKSSCCEEHVVICNRCKDFDVNSCDEHLISIAKLNDEVASLNAQLKTCKIDFDKLKFARDAYTVGRHPSIKDELGFRREAKNLTSHRASVLNKEKGKAPMASSPQRNHAFIYNEKVASRSHYNRNYAHTTYNDSHAMFASSSTFVNCRPRKNNVVSHAPRKMCNEPSTIYHACNTSFVLLCKNAKVVARKLGSKCKGDKTCIWVPKAIVTNLVGPNKSWDKSETQGTLKRFLRRAQNEFELKVKKIRSDNGSEFKNLQVDEYLKEEGVKHEFSAPYTPQQNGVVERKNRTLIDMARTMLGEFKTPERFWSEAVNTTCHAINRLYLHRLLKKTSYKLLTGNKPNVSYFRVFGSKCYILVKKGRHSKFAPKAVEGFLLGYDSNTKAYKVFNKSSGLVEVSSDVVFDETNGSPREQVDLDDIDEDDVPTAAMRMMAIGDMRPQEQQEQDQPSSSTMVHPPTHDDG

SEQ ID NO: 280766 - protein, 84 aa, Zea mays
  Clone ID: MRT4577_19160C.1.pep
DGEGAELEQGEEGGRDAGRNAGKGAGWPRPWRAEDPLAWSCARGWASPMAGSRRTRVEQGGTPWRLGKAATGARGRWNSGNGLR

SEQ ID NO: 280767 - protein, 102 aa, Zea mays
  Clone ID: MRT4577_19161C.1.pep
LLHSSFLVYKLYNFAPSPVELDSQATCPASRAHTKGNNAEPACKAGMPTKMPATRSVNDLLQIPDQRSGRYLKNVRDLQSVKTVSHRLPARSSLREPHRRGT

SEQ ID NO: 280768 - protein, 18 aa, Zea mays
  Clone ID: MRT4577_19162C.1.pep
MARATRGQISRRWTVIPR

SEQ ID NO: 280769 - protein, 201 aa, Zea mays
  unsure (1)..(201): unsure at all Xaa locations
  Clone ID: MRT4577_19163C.1.pep
IGYLEAGRESEIKECHVSQKILSLLGHKNHACSVKGLXIRVWRRTAGAYIEDEEVNMQSLYDTYPLPEPLHRXILSAELSIVAQPVQPHHQHLVVAADALCNEITNQHATDIVRTSPRHGCARRLIIGELLEVPKKKHMTHSQLKKIDRGAHRHFHDHITVIGVLRDSGLVSHVSTHRGPTLSLRGGGRRGGLHSNTLAAT

SEQ ID NO: 280770 - protein, 87 aa, Zea mays
  Clone ID: MRT4577_19164C.1.pep
PPRKEGGQRMGLKFSRGKYWLSIGAPPPNPGQRIFFWGGLFPPPPFFFLARKGGPPYRGPPPPKIGGPLGFQGGPIFYNSQAPEGGI

SEQ ID NO: 280771 - protein, 921 aa, Zea mays
  Clone ID: MRT4577_19165C.1.pep
MARVRSTARVEREGGETEASETVPISEAMQRSGLVTSEKIPSDDAEQAEQAIAEAEEEDIEETDPEDDYRIAMPSKPSHLDFGKSTVSKADLSKMVKSGFFNENQKKLLRFGGEETTPKPEKDEIVIFKSFLKAGLRFPLHGIIAEVLKRFGIYFHQLTPNAIVRLSVYIWALRSQAVEPFADSFCRVHELHYQTKARKDGLHDNFGCYNFAYRKTTKFPVISYRSKWAAGWKSEWFYVKVDDDKEKLVQSPLELIFGETRPRCNMTPEGPTQQAMNEFRIIAEHISTRDLVQEFLAFKVFPSLKEWEMPKLKGEKKEGELVRLPYYFKFKKYFKAPCQEWLDTIEAMCNEILGNYSKKEDQLMTAAFGTRPKRRLNRVLDALGFEYPDYENLNKGAGGQKRKRVTEALNEGEKEPSKKKIPKKRKASSPKQQISDAEETPASPSAAVVEEILKVMTESLPAKLSPLGPQLTKFFQKDKEPEKSKKTIKAKKQRIITVTEVIDKTPPRASAQKTPAAAEGADIEIAPSEAAAAEAASAEDLNLESTIEHIDQILLDMAAEEAATAAEEAVTAASGKGKEIADEASENEAFMFQNLVGEQLSKAEIEELREYAKSCGYKPGALLFGGVDDEKLDCIRDQTGAKVIGTLSKSIGFPKLETDISRYRRQHVVGSLFYSNFKSMLLSKALQMQQDFEDKKHEVIIENLESRIKEQSDAFEKKNFELQATEGLLAEAEAKISELNTKLLRQSEQFEREKQDLNAKLEAEAQQNSDLRKLLTSLQEKCLEFSNKCIQRLRKIFYSVGASSEKFTPSAEDLPKTFEHIEGEIDELDEVIAGHGDFCAWVASRGTAAAFLKAGCDHGKIVNRPNFTLSPSILDDIPDLARSISNRFVKMIWTKGGREKAGDEARSHLDPDDEAEADDQK

SEQ ID NO: 280772 - protein, 875 aa, Zea mays
  Clone ID: MRT4577_19166C.1.pep
MARVRSTARVEREGDETEASETVPISEAMQRSGLVTSEKIPNDDAEQAIAEAEEEDIEETDLEDDYRIAMPSKPSHLDFGKSTVSKADLSKMVKSGFFTENQKKLLRFGGEETTPKPEKDEIVIFKSFLKAGLRFPLHGIIAEVLNRFGIYFHQLTPNAIVRLIVYIWALRSQAVEPFADSFCRVHELHYQTKARKDGLHDNFGCYNFAYRKTTKFPVISYRSKWAAGWKSEWFYVKVDDDKEKLVQSPLELIFGETRPRCNMTPEGPTQQAMSEFRIIAEHISTRDLVQEFLAFKVFPSLKEWEMPKLQGEKKEDQLMTAAFGTRPKRRLNRVLDALGFDYPDYENLNKGAGGQKRKRITEAMNEEKEPLKKKIPKKRKASSPKQQISEAEETPASPSAAVVEEILKVMTESLPAKLSPLGPQLTKFFQKDKEPEKLKKTIKAKKQRIITVTEVIDKTPPRALAQKTPAAVEGTDIEIVPSEAAAAEAASAEDLNLESTIEHIDQILLDMAAEEATTAAEEAVTAASGKGKEIADEASENEAFMFQNLVGEQLSKAEIEELREYAKSCGYKPGALLFGGVDDEKLDCIRDQTGAKVISTLSKSIGFPKLETDISRYRRQHVVGSLFYSNFKSMLLSKALQMQQDFEDKKHEVIIENLESRIKEQSDAFEKKNFELQATEGLLAEAEAKITELNTKLLRQSEQFEREKQDLNAKLEAEAQQNSDLRTLLTSLQEKCLEFSNKCIQRLRKIFYSVGASSEKFTPSAEDLPKTFEHIEGEIDELDEVIAGHGDFCAWVASRGTAAAFLKAGCDHGKIVNRPNFTLSPSILDDIPDLARSISNRFVKMIWTKGGREKAGDEARSHLEPDDEAEADDQK

SEQ ID NO: 280773 - protein, 253 aa, Zea mays
  unsure (1)..(253): unsure at all Xaa locations
  Clone ID: MRT4577_19167C.1.pep
MKTCLTKVAFVQSMLLSKALKMQQDLEDKKHEVIIENLESKIKEQSATIEKKNFELQATEGLLAEAEAKITELNMKLLCQSEQFEQEKQELTAKLEAEVQQNSDLKRLLAGLQDKCLEFGNKCIQRLRKIFHSVGASSEKFXPSVEDLSKTFEHIEGEIDELDEVIAGHGDFCAWVASRGTAAAFLKAGCDHGKIVNRPNFTLSPSILDDIPDLARSISNRFVKMIWTKGGREKAGNEARSHLEPDDEAETEA

SEQ ID NO: 280774 - protein, 97 aa, Zea mays
  Clone ID: MRT4577_19168C.1.pep
RWGPVTSRWFWVRPLWLPKVFLGPGVVGCAPVWGFFPPLLLFLPPLFLSSVLGGPPVFFFVAPFFFCLVISDGPACCWISVHVSLFSRLPGPGLLFV

SEQ ID NO: 280775 - protein, 842 aa, Zea mays
  Clone ID: MRT4577_19169C.1.pep
MARVRSTARVEREGDETEASETLPISEAMQRSGLVTSEKIPHDDAKQAEQAIAEAEEEDIEETDSEDDYHIAMPSKPSHLDFGKSTVSKADLSKMKKLLRFGGEETTPKPEKDEIVIFKSFLKAGLRFPLHGIIGEVLKRFGIYFHQLTPNAIVRLIVYIWALRSQAVEPFADSFCRVHELHYQTKARKDGLHDNFGCYNFAYRKTTKFPVISYRSKWAAGWKSEWFYVKVDNDKEKLVQSPLELIFGETRPHCNMTPEGPTQQAMSEFRIIAEHISTRDLVQEFLAFKVFPSLREWEMPKLQGEKKEGELVRLPYYFKFKKYFKAPCQEWLDTIEAMCNEILGNYSKKEDQLMTAAFGTRPKRRLNRVLDALGFEYPDYENLNKGAGGQKRKRVTEALDEGEKEPVTKKIPKKRKTSSPKQQISEAEETPASPSAAVVEEILKVMTESLPAKLSPLGPKLTKFFQKDKEPEKSKKTIKARKQRIITVTEVIDKTPPRTSVQKTRAALEGADIEIAPSEAAAAEVTSAEDLNFESTIEHIDQMLLDMAAEEAATAAEETVTAASKKGKEIADEASENEVFAFQNLVGEHLTKAEIEELKDMLLSKALQMQQDLEDKKHEIIIGNLENKIKEQSDAFEKKNFELQAAEGLLAEAEAKISELNTKLLRQSEQFELEKQDLNAKLEAEAQQNSDLRKLLTNLQERCLEFSNKCIQRLRKIFHSVGASSEKFTPSAEDLPKTFEHIEGEIDELDEVIAGHGDFCAWVASRGTAAAFMKAGCDHGKIVNRPNFTLSPSILDDIPDLARSISNRFVKMIWTKGGREKAGDEARSHLDPDDEAEADDQK

SEQ ID NO: 280776 - protein, 60 aa, Zea mays
  Clone ID: MRT4577_1916C.1.pep
LFLFFNLFIYFLFIFFFFFFFFFFFFFFFFFFEKKQTPYLLNGILDHKSCSSNQPLALLE

SEQ ID NO: 280777 - protein, 61 aa, Zea mays
  unsure (1)..(61): unsure at all Xaa locations
  Clone ID: MRT4577_19170C.1.pep
KRADRRVRIDXXXLSYMALSSYFIKRITANILTYQSTLHHVCGATHIKYSFLAFSTLDIDH

SEQ ID NO: 280778 - protein, 928 aa, Zea mays
  Clone ID: MRT4577_19171C.1.pep
MARVRSTARVEREGDETEASETVPISEAMQRSGLVTSEKIPSDDAEQAITEAEEEDIEETDPEDDYRIAMPSKPSHLDFGKSTVSKVDLSKMVKSGFFTENQKKLLRFGGEETTPKPEKDEIVIFKSFLKAGLRFPLHGIIAEVLNKFGIYFHQLTPNAIVRLIVYIWALRSQAVEPFADSFCRVHELHYQTKARKDGLHDNFGCYNFAYRKTTKFPVISYRSKWAAGWKSEWFYVKVDDDKEKLVQSPLELIFGETRPRCNMTPEGPTQQAISEFRIIAEHISTRDLVQEFLAFKVFPSLKKWEMPKLQGEKKEGELVRLPYYFKFKKYFKAPCQEWLDSIEVMCNEILGNYSKKEDQLMIAAFGTRPKRRLNRVLDALGFDYPDYENLNKGAGGQKRKRITEAKNEEKESLKKKIPKKRKASSPKQQISEAEETPASPSAAVVEEILKVMTESLPAKLSPLGPQLTKFFQKDKEPEKSKKTIKAKKQRIITVTEVIDKTPPRASAQKIPAAAEGTDIEIAPSEATAAEAASAEGLNLESTIEHIDQILLDMAAEEAATAAEEAVTAASGKGKEIADEASEDEVFMFQNLVGEKLSKAEREELREYAKSCGYKPGALLFGGIDDEKLDCIRDQTGAKIIGTLSKSIGFPKLETDISRYRRQHVVGSLFYSNFKSMLLSKALQMQQDFEDKKHEVIIENLENRIKEQSDVIEKKNFELQAAEGSLAEAEAKITELNTKLLRQSEQFERERLELNTKLEAEAQQNSELRKLLTSLQEKCLEFSNKCIQRLRKIFYSVGASSEKFTPSTEDLPKTFEHIEGEIDELDEVIAGHGDFCAWVASRGTAAAFLKAGCDHGRIVNRPNFTLSPSVLDDIPDLARSISNRFIKMIWTKGGREKAGDEARSHLEPVRNHTFVLTFLCELDFDLQQP

SEQ ID NO: 280779 - protein, 913 aa, Zea mays
  Clone ID: MRT4577_19172C.1.pep
MARVRSTARVEREGGEAEGSETVPISEAMQRSGLVIPEEIPTAETEQATAEAEEGDIEETDSEDDYHIAMPSKPSHLDFGKSTVSKADLSKMVKSGYFSESQKKLLRFGGEETTPKPEKDEIVIFKSFLKAGLRFPLHGIIADVLKKFGIYFHQLTPNAIVRLSVYIWALRSQMVEPFADSFCRVHELHYQTKARKDGLHDNFGCYNFAYRKTTKFPVISYRSKWPAGWKSEWFYVKVDEDKEKLVQSPLELIFGETRPRCQMSLEGPTWAALGEFKIISEHIGTRDLVQEFLAFRVFPTLKEWEMPKLEGEKKEGELVRLPYYYKFKKYFKTPCQEWLDTIEIICNEILGNYSKKEDPLMTAAFGTRPKRRLNRVLNALGFEYPDYEQLNKGVEGRKRKRVAEALNEDEKEPPKEKKIPKKRKVSSPKRKVSDEEETPASRSATDVEEILKVMTESLPVKLSPLGPQLTKFFQKEKEPEKMKETTKTKKQRIIAVTEVIDKTPPRASARKVPAVEEITNIEVAPSEIAATEATSTEDLNLETTIEHIDKILTEEVTTAAEETMAAVSGKEKEISDETSEDEAFMFQNLVGQELSKTEIEEHKEYAKSCGYKPGALLFGGIDDEKLDCIRDQTGAKIIGTLSKSIGFPKLETDISRYRRQHIVGSLFYSNFKSMLLSKALKMQQDLEDKKHEVIIENLESKLKEQSATIEKKNFELQTTEGLLAEAEAKIAELNTKLLCQSEQFEQEKQKLNVKLEAEVHQNSDLKKLLASLQDKCLEFSNNCIQRLRKIFHSVGASSGKFTPSTKDLPKTFEHIEGEIDELDEVIAGHGDFCAWVASRGTAAAFLKAGCDHGKIVNRPNFTLSPSILDDIPDLARSISNRFVKMIWTKGGREKAGDEARSHLEPDDEAETDA

SEQ ID NO: 280780 - protein, 111 aa, Zea mays
  unsure (1)..(111): unsure at all Xaa locations
  Clone ID: MRT4577_19173C.1.pep
KPLRVGEAPVGPPPLPLEGFSPQNSRXPPATKGPSSPWPPPLGWXTKGGVPKTPPPGASVPPPGKNPPGSPRNPPKPGPPSLNPYGWQDGPSFLWVRPPPLAPFKFPAGPW

SEQ ID NO: 280781 - protein, 48 aa, Zea mays
  Clone ID: MRT4577_19174C.1.pep
FFFFAPPKLKPHCLFFNKAGKPYYIRIRYRTEDAWADKWKDAWADAWA

SEQ ID NO: 280782 - protein, 259 aa, Zea mays
  Clone ID: MRT4577_19175C.1.pep
READPLRSYRPTRLPRSLPRSLPVSQFLPVVFHRKSPKQAGELGTRSTAGSWSGRAMGTPPPFQESGHCDVCRCTFNTFRRRHHCRSCGRTLCHEHSSYYMALPQYGIYTDVRVCYGCFNKSSSQGHADNPVSAGSISGAADSFSGLSLGKEDDSSPMKNSTVQSTAALIECKCGMPLCICEAPKPEPSPTPVKNINTVPPTTQSNPRPKKPANTQQKASATSSSNSSPFLNIGLMNNDSNDKGIVDYEVSGEGLRGFI

SEQ ID NO: 280783 - protein, 189 aa, Zea mays
  unsure (1)..(189): unsure at all Xaa locations
  Clone ID: MRT4577_19176C.1.pep
SSIAATAISSICATKVTISSRRSSPFVPPRTDEPPKIYCMQLSTTTHAPARTKLXNFLRKLNIARKARQMFILHLIFHELXTNICNYSMLLHDQTRFQYHNMYNPNHDSTLKVDVIDMDKDIVSKLRARSPCCPNILTITVHYRVCIMDDTNWDHXAAIKLLASTYQHCEAPTTXLTTTFKAPNLTLFM

SEQ ID NO: 280784 - protein, 63 aa, Zea mays
  Clone ID: MRT4577_19177C.1.pep
AYFFWGQRAKPGVFLPFGPLVFWLIAPFYLALSWKKKKKKKKKKKKKKKKKKKKKKKKKKKKK

SEQ ID NO: 280785 - protein, 268 aa, Zea mays
  Clone ID: MRT4577_19178C.1.pep
QHHCRSCGRTLCHEHSSYYMALPQYGIYTDVRVCYGCFNKSSSQGHADNPVSAGSISGAADSFSGLSLGKEDDSSPMKNSTVQSTAALIECKCGIRLCICEAPKPEPSPTPVKNINTVPPTTQSNPRPKKPANTQQKASATSSSNSSPFLNIGLMNNDSNDKGIVDYEVSGEGLREAIKGGDVKGVKKLLTQGVDSNYCDKQGFTLLHLAALFNQTEIALILMDHGANVESKNGQGETPLDCAPAMLQYKMRQRVEELAASASKGPLG

SEQ ID NO: 280786 - protein, 90 aa, Zea mays
  Clone ID: MRT4577_19179C.1.pep
PFGPGPPGPKGLANPAEDGIGPFFPEGPGFLVKFNVNNKFPLPTQEVKDAFGSSLNFGEDGAPPGQGPFVKKTNQGAVLKQNQLSGHSPL

SEQ ID NO: 280787 - protein, 1458 aa, Zea mays
  unsure (1)..(1458): unsure at all Xaa locations
  Clone ID: MRT4577_1917C.1.pep
MDPKGKGMVVNDKEKESFINEPKDDKPTDSGSGQKRKDGKKKKTRRIKEIVYYDDSDESSSSQKDDDTDYEKKKTVNSNLSFDYSRIPQSTNAHLLSIPLGKPPHFDGEDYRFWSHKMRSHLFSLHPSIWEIVESGMKFDSSDSPLFINEQIHKNAQANTVLLASLCRDEYHKVSGLDNAKQIWDTLKISHEGNDVTMLTKMELVEGELRRFVMIRGEEPTQTYNRLKTLINKIRSYGSTRWTDHDVVRLMLRSFTVLDPHLVNNIRENPRYTKMTPEEILGKFVSGRMMIKEARYVDDALNGPIQEPQTIALKETRSKEVLSSKVAQVEAVGLNDEEMALIIKRFKTALKGRKEHSNKNKTKGKRSCFKCGLTATAFNKSSLFPNEHHTCLMAREKKGLDRTKVDKINELTNALNDKNRLLEKQEDLLYEEHDKFVSAQNSLALEVKRNEMLSCELSTCHETISTLKGVNDDLNAKLEVANKSNSCVEHVMICNRCKDFNVDACSEHLACISKLNDEVASLNAQLMTSKSEFDKLKFARDAYTIGRHPSIKDGLGFKREVKNLTSHKASISVKEKVKAPMASSAQKNHAFMYHDRRHSRNVYKSYDAFDSHAMVASSSSIVHDRNFARRNIINHMPRRNVVHVPRKTNSEPSTIYHALNASFAICRKDRKIVARKLGXKCKGDKTCIWVPKAIXVYASGGSSWIIDSGCTNHMTGEKRMFSSYVKNKDPQDSIIFGDGNQGKVKSLGKIAISNEHSISNVFLVESFGYNLLSDKSETQGTLKRFLRRAQNEFELKVKKIRSDNGSEFKNLQVEEYLEEEGIKHEFSAPYTPQQNGVVERKNRTLLDMARTMLGEFKTPKRFWTEVVSTACHAINRVYLHRLLKKTSYELLTVKKGRNSKFAPKAVEGFLLGYDSNTKAYRVFNKSSGLVEVSSDIVFDETNGSPREQVVDLDDVDEEDVPTAAMRTMAIGDVRPMEQKEQDQPSSSTMVHPPTQDDEQVHQEEAHDQGGAQDVHVIEEEAQPAPPTQVRAMIQRDYPVDQILGDISKGVTTRSRLVNFCEHYSFVSSIEPFRVEEALLDPDWVLAMQEELNNFKKNEVWTLVPRPKQNVVGTKWVFRNKQDEHGVVTRNKARLVAKGYAQVAGLDFEETFAPVARLESIRILLAYAAHHSFRLFQMDVKSAFLNGPIKEEVYVEQPPSFEDERYPNHVCKLSKALYGLKQDPRAWYECLRDFLIANAFKVGKADPTLFTKTCDVRRVMTQKFEMSMMRELSYFLGFQVKKLKDGTFISQTKYTQDLIKRFGMKDAKPAKTPMGTDGHTDLNKGDSDYAGCKVYRKSTSGTCQFLGRSLVSWSSKKQTSVALSTTEAEDFGYNLSKVPLLCDNESAIRMADNPVEHSRTKHIDIRHHFLRDHQQKGDIEVFHVSTENQLADIFTKPLDEKTFCRLRSELNVLDSRNLD

SEQ ID NO: 280788 - protein, 180 aa, Zea mays
  Clone ID: MRT4577_19180C.1.pep
CSKDSIPSARMVLIKSYSETEGFKFYTNFNSRKGKELEENPNAAMLFFWDELKRQIRIEGKVIKLSEEESSVYFKSRPIKSQIAAVCSNQSKPIESRDNLEEQFNQVEASFQDDPDNGLKKPPNWGGFTLIPNNFEFWKGQSTRLHDRIVFSKQTDLNSLPKGVMFKQAYKDWIMYRLQP

SEQ ID NO: 280789 - protein, 155 aa, Zea mays
  unsure (1)..(155): unsure at all Xaa locations
  Clone ID: MRT4577_19181C.1.pep
GPITPKTPPPYGKNQGGAPFPLNPPPEKKEVRKRPKMGKPQGFPREKGEKPPPGNLKNPPKRGXGPQKKSQGPPPGKEKNXTPPKGAPAQKKTLIFSKFFPKNGPEQGPNHNIFLFFFFFFFFFFFFFFFFFFFFFIFIPCPEAGQPRKRAEAST

SEQ ID NO: 280790 - protein, 77 aa, Zea mays
  unsure (1)..(77): unsure at all Xaa locations
  Clone ID: MRT4577_19182C.1.pep
SRFIAEEPRHXDRRVVDVGDEVLAYVRRAAETCWGGWRRLXSAVDALEPSGAEQAEVVVLPWRRTPARGPARLARSS

SEQ ID NO: 280791 - protein, 108 aa, Zea mays
  unsure (1)..(108): unsure at all Xaa locations
  Clone ID: MRT4577_19183C.1.pep
RPKSPPKPTPGAGSTPPACVWGPPQKKIGPPIPPPVWPPPWGPCNVVPKKSPCPVMGRYALALKGGGPXGPDLVRPRGRAPGAPWAGAILGSEGPVHRLQMCLPPPVS

SEQ ID NO: 280792 - protein, 46 aa, Zea mays
  Clone ID: MRT4577_19184C.1.pep
SEPDTLFPFRVYLNDTSHNGRKPKMQKISVLSRSLTDMLMSMLTFD

SEQ ID NO: 280793 - protein, 93 aa, Zea mays
  unsure (1)..(93): unsure at all Xaa locations
  Clone ID: MRT4577_19185C.1.pep
MRECIWIHIXQAGVQVANACXQLWGGEHDIQADGQMPGDKTIGGGDDALHTVFNETGAGKHAPSAVFVGLHHSSLDXVRXTGSYWQLFHPGLV

SEQ ID NO: 280794 - protein, 104 aa, Zea mays
  Clone ID: MRT4577_19186C.1.pep
MQQGSWMRWELLPAGVQPQRIPKFQKATVYQGKKCMTNEESTSSRCILFGAELPSLQFEYGVKLKPLVRICDTTKFIKEKKCMTNEESTSSRNNHEPNVYPKDM

SEQ ID NO: 280795 - protein, 69 aa, Zea mays
  unsure (1)..(69): unsure at all Xaa locations
  Clone ID: MRT4577_19187C.1.pep
XPFFLKKKEGYSLQGTVDSTRFPDIWENTKTGSYSRATPHRYVIKRGFFQEENKGWGGGGGVGGDKRGT

SEQ ID NO: 280796 - protein, 58 aa, Zea mays
  Clone ID: MRT4577_19188C.1.pep
IVPWRKTRSELGAEAAAATDIVEGMARWTANKRTCLAEVVLTRTTSRSQTARAEYRAY

SEQ ID NO: 280797 - protein, 72 aa, Zea mays
  Clone ID: MRT4577_19189C.1.pep
LGEVKDRIIVIRSSQEREKEKGGAVVAEEGGAWRERCVGFKEVVSAEGVKVGKQNEWQRERKRKRGEFLNVW

SEQ ID NO: 280798 - protein, 500 aa, Zea mays
  Clone ID: MRT4577_1918C.1.pep
MSSSPSFGLLAVAALLLALSLAQHGSLAATVGPRVIVVGAGMSGISAAKRLSEAGITDLLILEATDHIGGRMHKTNFAGINVELGANWVEGVNGGKMNPIWPIVNSTLKLRNFRSDFDYLAQNVYKEDGGVYDEDYVQKRIELADSVEEMGEKLSATLHASGRDDMSILAMQRLNEHQPNGPATPVDMVVDYYKFDYEFAEPPRVTSLQNTVPLATFSDFGDDVYFVADQRGYEAVVYYLAGQYLKTDDRSGKIVDPRLQLNKVVREIKYSPGGVTVKTEDNSVYSADYVMVSASLGVLQSDLIQFKPKLPTWKVRAIYQFDMAVYTKIFLKFPRKFWPEGKGREFFLYASSRRGYYGVWQEFEKQYPDANVLLVTVTDEESRRIEQQSDEQTKAEIMQVLRKMFPGKDVPDATDILVPRWWSDRFYKGTFSNWPVGVNRYEYDQLRAPVGRVYFTGEHTSEHYNGYVHGAYLSGIDSAEILINCAQKKMCKYHVQGKYD

SEQ ID NO: 280799 - protein, 54 aa, Zea mays
  Clone ID: MRT4577_19190C.1.pep
LGDDNLNLLRTCHSILYAPHPGGPGLDLGLEIPGTNLFFKGLGTSHRSERREPC

SEQ ID NO: 280800 - protein, 183 aa, Zea mays
  Clone ID: MRT4577_19191C.1.pep
MSTQQEVTENYANPKTCFFHVLFKASALAFYILSTLFVNNFVIIFVITVLLAALDFWVVKNVSGRILVGLRWWNEINDEGESVWKFECLDGESLARMNKKDSWLFWWTLYLTAAAWIILGIFSLIRLQADYLLVVGVCLSLSIANIIGFTKCNKDAKKNIQDWTRNALLSGSVRSHLQSAFGV

SEQ ID NO: 280801 - protein, 211 aa, Zea mays
  Clone ID: MRT4577_19192C.1.pep
RRVPLQRTLVFSPRPAAAQLGVSSVHLQLVESPLLTHGAQIFIGHGASSSPPPVPRSMALGCFYSLPCSPMEAAPLPRFSLRRVPSSRARAQPHASAPAQPPAHVFPQPWRASPSLVSMEILLWLLHLDQGRSVCMTLGSCVPWICGAPASAPFFPCSLQTAEQLGAKLPRVRTQPESLPPVQLPVASLAGDGRADRWQLPILWLCSMLAL

SEQ ID NO: 280802 - protein, 194 aa, Zea mays
  Clone ID: MRT4577_19193C.1.pep
PSPPPQAGGGGGAEPHLLSPRVPRFAVGKRQGNGNRAVLRELGRGPPFVCLPCHSPATRGALSCCPLEKGRFPPSINPPLVCRFLPWEDTNAAPWESRAPHGSRHPVFLSQDPVLAFWRSGTEEDDGVSERRVAAARRDLRGAALLSVDAFSFLGGGDFSAEGLGSLLVQSLSLCSLFAFFRYVECGVVGWERA

SEQ ID NO: 280803 - protein, 168 aa, Zea mays
  Clone ID: MRT4577_19194C.1.pep
AKTVTDAKESAKMHATPQGMSNVHASIAKLVSLLQSDDTRTCATALKSVHTLSKNGRNREHLMDCGAYRYILQLTTRPEDVREQIGHALVGIAEGEQYSNMIGEAGAVETLGGLLRSERDKTVENAARALAQLAATEANRVRMKQSGTTAILADVLKDSKNEWNKLFA

SEQ ID NO: 280804 - protein, 97 aa, Zea mays
  Clone ID: MRT4577_19195C.1.pep
LFTFLLTLHLSLSGVITTTFTLVNKRDYTEWPGILSNAGVPPFSTTDLVLQTGAFTTIAAPVYWGGRFWGRTLCSEDSTGEFFCVTGDCGSGKLECF

SEQ ID NO: 280805 - protein, 89 aa, Zea mays
  unsure (1)..(89): unsure at all Xaa locations
  Clone ID: MRT4577_19196C.1.pep
TTEEVKKNERGREMRHRXLRLPRVELLFLGRHEWVGIGIFLLWDSKVQTRTRNSDAFAAMRHSRRGSSNAARSLDLRLSAAQVSEMYPK

SEQ ID NO: 280806 - protein, 165 aa, Zea mays
  Clone ID: MRT4577_19197C.1.pep
MHGHQQQPYPYGLRQDPLRRMRGLDVKSALQASPRTSTVATAALVVPLGAALLCASGIALAATVTGLALATPPLVIFSPVLIPFALAAGLIASGLLASGALGVAGVSALTWAVGYVWQRQGEGGGGVTGMVVQPLDQGSKRHGVQGAAAFVGHRRLPRDIDVAGE

SEQ ID NO: 280807 - protein, 121 aa, Zea mays
  Clone ID: MRT4577_19198C.1.pep
MVKGMPKSRPIKAAAEVVFDPSVSGPRKPRRAEAPSSSSEYHHFMGSNLSNMYHKPAPAKSTDMSDDEPDIDIEKLLKDVELFGATTWKDKNKIQNRKVVELGGKAIKKQRTPLSVAIPAM

SEQ ID NO: 280808 - protein, 88 aa, Zea mays
  Clone ID: MRT4577_19199C.1.pep
MACKPQLLFFTAIAALASIIHPCASVEFHRKLSSWSDGGATWYGAATGAGSDGGACWYRGAVDQAPFSSMIAAGSPSIYNSGKGCGSC

SEQ ID NO: 280809 - protein, 1114 aa, Zea mays
  Clone ID: MRT4577_1919C.1.pep
MDPKGKRMVINDKEKECFINEPKDDKPTDSGSSHKKKDGKKKRRIKKIVYYDSDESSSSQRDDDDEKKKTDTLKISHEGNDATMITKMELVECELGRFAMIRGEEPTQTYNRLKTLVNKIRSYGSTRWTDHDVVRLMLRSFTVLDPHLVNSIRENPRYTKMMLEEILGKFVSGRMMIKETRYVDEALNGPMPIHEPQTVALKETSSREGLPSKAAQVEAAGLNEDEMALIIKRFKTALKGRKEHPNKSNTKGKRSCFKCGKIGHFIANCPDNDSDQEQGKNGKRENKKIYKKAKGEAHLGKEWDSDCSSSDSDDEGLAATAFNKSSLFPNEHHTCLMAKEKKVSTQNTIAYASSSDDESSDDEVDYASLFKGLDRTKIDKINELIDALNEKNRLLEKQEDLLYEEHDKFVSVQKSLALEVKRNEMLSCELSTCHESISSLKSVNDDLNAKLEVANKSSSCIEHVVICNRCKDFNVDACVEHLTSIAKLNGEVASLNAQLNTSKNNFDKLKFARGAYTIGRHPSIKDGLGFKREAKNLTSQRAPIFNKEKGKAPMANSSQKNHAFIYDRKFSRNAYHNRSCNAYDSHAMIASSSSVVHDVSVFRRCDGLLAFKGVLDGKLYLVDFSKEEAGLNACLIAKTSMGCLWHRRLAHVGMKNLHKLLKGEHVLGLTNVTFEKDRPCAACQAGKQVGSSHHSKNVMTTSRPLELLHMDLFGPVAYLSIGGSKYGLVIVDDFSCFTWVFFLQDKTETQGTLKCFLRRAQNEFELKVKKIRSDNGSEFKNLQVEEYLEEEGIKHEFSAPYTPQQNGVVERKNRTLIDMARTMLGEFKTPERFWSEAVNTACHAINRVYLHRLLKKTSYELLTGNKPNVSYFCVFGSKCYILVKKGRNSKFAPKAVEGFLLGYDSNTKAYRVFNKSSGLVEFSSDVVFDETNGSPREQVDLDDVDEEYVPTAAIRTMAIGDVRPQEQKEQDQPYSSTMVHPPTQTDDQVQEEACDQGGAQDDHVMEEEAPQAPPTQVRETIQRNHPVDQILGDISKGVTTRSRLANFCEHYSFISSIEPFRVEEALVDPDWVLAMQEELNSFKRNEVWTLGVGHAGRAQPLDFIVLTLNQVLWL

SEQ ID NO: 280810 - protein, 134 aa, Zea mays
  Clone ID: MRT4577_191C.1.pep
VLVFYQLIDVIVFYFYHWQIFTLSAIPFDIMPTTIEQCVSVLKPGGLLLFRDYGLYDMTMLRFLPHQRIGFREYMRSDGTFSYFFSLDTVRELFHAAGLVELELEYCCVKSVNRKNGKTMRRVWVHGKFQKPPR

SEQ ID NO: 280811 - protein, 64 aa, Zea mays
  Clone ID: MRT4577_19200C.1.pep
LTNNDEDKSYCKGGMPVKMHPHITTVVTPGNSLQVAGLKQAEGDRKAAQDHGLLIRDDNDECGG

SEQ ID NO: 280812 - protein, 96 aa, Zea mays
  unsure (1)..(96): unsure at all Xaa locations
  Clone ID: MRT4577_19201C.1.pep
HAYASSEFVSRRIGQPHFLFQADLHRFLEGLNLLVGTEKATLNTPNLXLGRALTEPRKRYTHEIATLWYNASEVLLEATQYXTGFALWPVGCISTE

SEQ ID NO: 280813 - protein, 54 aa, Zea mays
  Clone ID: MRT4577_19202C.1.pep
PRPGRGVLRGPPPLLPRSDVRSLVLPVRGADRQAAGEEGRRRVRADLRAGALER

SEQ ID NO: 280814 - protein, 96 aa, Zea mays
  Clone ID: MRT4577_19203C.1.pep
PPHTKAAKTKQRRAQAPGGPGTKAPKHGGRGPSRRSSGKEPPKRGKNQSRTNQRPRSRSPRETPPKGSGEDAGRARTGPEKRGPEAERQSNNGGPP

SEQ ID NO: 280815 - protein, 88 aa, Zea mays
  Clone ID: MRT4577_19204C.1.pep
QILTRDAKGISQEQMNEFRASFNHFDRDHSGTLGPEEFKACLISLGYDIGNDPQGEAEFARIMSIVDPNRLGVVTFQAFIDFMSRETA

SEQ ID NO: 280816 - protein, 73 aa, Zea mays
  unsure (1)..(73): unsure at all Xaa locations
  Clone ID: MRT4577_19205C.1.pep
ELLVVNCHYLSSHLFQSLLQNLKSGLTLWKFGTLPPALIAFRGHVHGIDPSWHLLGLXYPDKTDIESVRRAAV

SEQ ID NO: 280817 - protein, 77 aa, Zea mays
  Clone ID: MRT4577_19206C.1.pep
GSTCVPRRVLSICPLSCCLLTWDSSPCCHSRRCRGARADKLAYRGGSVDELLPAPGGLRCWWKRLELKLNVWRKRVR

SEQ ID NO: 280818 - protein, 65 aa, Zea mays
  Clone ID: MRT4577_19207C.1.pep
YVNTGNEKYSSNIQLSAVQYYIAGLSAYLRLRPSLINPQGEKEMTKLTLIYLQGGYPPTAFLAYE

SEQ ID NO: 280819 - protein, 108 aa, Zea mays
  Clone ID: MRT4577_19208C.1.pep
PRVRRRRGGGVGGPPTMTWSENIVMHLILLDFFDRCAYRVSSPLSASLAPPASLLGPSFGCGWCPVCRLPSLGWLASLAMRSCLSSWVALGLALLGLPAFAVGLGAPL

SEQ ID NO: 280820 - protein, 74 aa, Zea mays
  Clone ID: MRT4577_19209C.1.pep
TSSSTQPVHAFERESSCAATCDNHIIAIGLCVLFPMYCLTVDDLISTQAIIGIYVTAIMMTRICGSTNCMSMLS

SEQ ID NO: 280821 - protein, 93 aa, Zea mays
  Clone ID: MRT4577_1920C.1.pep
GGFFLVPTQTPGAQGVPNTKKGRKVFLPRTPVLEQNQKGGVFSLNIKPLLKQIIKRGIGLDSFSTRRSVKNTATQGGRHPVADLFFLNPPKGF

SEQ ID NO: 280822 - protein, 90 aa, Zea mays
  Clone ID: MRT4577_19210C.1.pep
ALAFYQSLCCNLHKHFLYIYTYTYIRGGALWFSEARCGRTAGTCPGPALFLTVVNGDHAGARQCLRLRAQPPHRRGPTSCRSCATSSWSI

SEQ ID NO: 280823 - protein, 66 aa, Zea mays
  Clone ID: MRT4577_19211C.1.pep
VLREMLASDQQVAVRTVCRNLWNSSNTRGLQPMIIRCRLHASATLKYYLLKDVSAGQGGGQHDLGP

SEQ ID NO: 280824 - protein, 122 aa, Zea mays
  Clone ID: MRT4577_19212C.1.pep
VIREQVHACAYSLPRVFWEEVNEPAIFSGRVSAGHCALPLPARPVTASVYGRLARLRGCLEDSYPSALSAQVFLDSPAVGCGLEPRLFIEAALEPPCRATVTSRGQLLDISITKSPGRPCFR

SEQ ID NO: 280825 - protein, 157 aa, Zea mays
  Clone ID: MRT4577_19213C.1.pep
QALVCFYECELQVQERMKRSIAEPVHLVSRKAPMIDSRPTSCTYLKVGRRNKEHPAAISGLSPLFARPLSPRHASYRMFCVQLSFAVWMVYLSKGRKKNLYICSPSRAFYIRILWSTAISPSKDGRSQPFFSCRKCGPLGIWAEHVATTLPKFFLVP

SEQ ID NO: 280826 - protein, 51 aa, Zea mays
  Clone ID: MRT4577_19214C.1.pep
LHETVVGCILGPVKQPGRLLLTLYLVDFDLSPKQLFTFFFWGEGKKLFFFF

SEQ ID NO: 280827 - protein, 146 aa, Zea mays
  unsure (1)..(146): unsure at all Xaa locations
  Clone ID: MRT4577_19215C.1.pep
GGPQKPKERRPPAPAPKXXNHGERDGRQPGPARERPRPKRESSAPTPGTPARPPEPREGARRPTXRPEXPATSRPPAGRARTPQAAQTAEKSPAPPSDRSQATKDPRXRPPTNGTPPAGRHPARSAPGPTAKSPSGRRQRTPTAPP

SEQ ID NO: 280828 - protein, 93 aa, Zea mays
  Clone ID: MRT4577_19216C.1.pep
KICPTKPTKTSPQTPRKPKTIPPTPPSPQPNLQHPFSLLQFSIRPPAPILSPPPPRSSVVPNLYTSTSQQPLASVQSNLWCPTIPHFKKIKGN

SEQ ID NO: 280829 - protein, 82 aa, Zea mays
  Clone ID: MRT4577_19217C.1.pep
HTDGDSIFHLPRHRPQIPKPRPGVDTGPTYVCLRGTQSPCMVGPMPDTAPSPCMRKSRPRRHIGTNIAGARLGHLRLKQRKG

SEQ ID NO: 280830 - protein, 184 aa, Zea mays
  Clone ID: MRT4577_19218C.1.pep
MTPEEILRKFVSGRMMVKEARYVDDALNSPLPVYEPQSVALKATSSREALPRQVAQVEATGLNEDEMVLIIKRFKIALKGRKEYPNKNKTKGKRSCFKCGKTGHFIAQCPDNDHDQGQEKGRKREKKKNYRKAKGEAHLGKEWDSDCSSSDSDDEGLAASAFDKSSLFPKERHTCLMAKEKKFK

SEQ ID NO: 280831 - protein, 222 aa, Zea mays
  unsure (1)..(222): unsure at all Xaa locations
  Clone ID: MRT4577_19219C.1.pep
MAASGEGASLPSPAGGEDSRRRRVSYFYEPTIGDYYYGQGHPMKPHRIRMAHSLVIHYGLHRLLELSRPFPASEADISRFHSDEYVSFLASATGNPTILDPRAVKRFNVGEDCPVFDGLFPFCQASAGGSIGAAVKLNRGDADITVNWAGGLHHAKKGEASGFCYVNDIVLAILELLKFHRRVLYVDIDVHHGDGVEEAFFPXNRVMTVSFHKYEDFFXPGT

SEQ ID NO: 280832 - protein, 346 aa, Zea mays
  Clone ID: MRT4577_1921C.1.pep
LIANSFKGGKADPTLFTKTCDGDLFVCQIYVDDIIFGSTNQKSCEEFSRVMTQKFEMSMMGELNYFLGFQVKQLKDGTFISQMKYTQDLLKRFGMKDAKPAKTPMGTDGHVDLNKGGKSVDQKVYRSMIGSLLYLCASRPDIMLSVCMCARYQSDPKECHLVAVKRILRYLVSTPCFGIWYPKGSTFDLIGYSDSDYAGCKVDRKSTSGTCQFLERSLVSWSSKKQTSVALSTAEAEYVAARLCCAQLLWMRQTLRDFGYNLSKVPLLYDNESAIRMADNPVEHSRTKHIDIRHHFLRGHQQKGDIEVYHISTENQLADIFTKPLDEKTFCRMRSELNVLDSRNLD

SEQ ID NO: 280833 - protein, 54 aa, Zea mays
  Clone ID: MRT4577_19220C.1.pep
PLVCIDIHALMTYPCILRIEFTGNYTNMFSVHGIFAPKGHALSYCFRLGSNGQT

SEQ ID NO: 280834 - protein, 91 aa, Zea mays
  unsure (1)..(91): unsure at all Xaa locations
  Clone ID: MRT4577_19221C.1.pep
XXFGLLLRSIDSIRQRDTSEDTLPDCLEPSTGEDRTHTLQTDDEKNSHTSHRGYAKTIVTGLKMQGQAMKPQAQNQICTKPLAETLLTWTP

SEQ ID NO: 280835 - protein, 69 aa, Zea mays
  Clone ID: MRT4577_19222C.1.pep
CFGTGFQGKDNPRQPCPPQASDICTVMYTSGTSGQPKGVMLTHESHAMYVKGVDLFMDQFDDKVSHILH

SEQ ID NO: 280836 - protein, 106 aa, Zea mays
  Clone ID: MRT4577_19223C.1.pep
NNYHHNYTKLGTKPKSTRNTRQCPPTPPQRAPDLGPSDCTPPPPLKCCSNGKKNTSLQPYRLQQAIAANNILLSPMFPTIDSPSLVQSLRPLPADSSRPIRQHMAA

SEQ ID NO: 280837 - protein, 208 aa, Zea mays
  unsure (1)..(208): unsure at all Xaa locations
  Clone ID: MRT4577_19224C.1.pep
IRSQGSCLLPKLLLFFFETLTGKTITLEVESSDTIDNVKAKIQDKEGIPPDQQRLIFAGKQLEDGRTLADYNIQKESTLHLVLRLRGGMQIFVKTLTGKTITLEVESSDTIDNVKAKIQDKEGIPPDQQRLIFAGKQLEDGRTLADYNIQKESTLHLVLRLRGGMQIFVKTLTGKTITLGVESSGAIDNVKAKIHDKGGIXPPDQQKL

SEQ ID NO: 280838 - protein, 72 aa, Zea mays
  Clone ID: MRT4577_19225C.1.pep
MVHGGYPRRDAAVRRPKSSSSAVVADRKRKWTAAAKNTSLKNQIRSTERFLHKVLTDTWGLGSSRLSSEPLV

SEQ ID NO: 280839 - protein, 63 aa, Zea mays
  Clone ID: MRT4577_19226C.1.pep
YHNTLPGIHVHKIKIKWNNPFSLNIQTLFLQKGRRGCRGVNIQDRLGENKMPRKRAHYIHIGS

SEQ ID NO: 280840 - protein, 53 aa, Zea mays
  Clone ID: MRT4577_19227C.1.pep
PQKINPLPSPDHSKSNVTRESASGHGSSCAWIAFFFLIFLRSNSFESKRDTNC

SEQ ID NO: 280841 - protein, 61 aa, Zea mays
  Clone ID: MRT4577_19229C.1.pep
QHGRAWRRIQEHIGSKTAVQIRSHAQKFFSKVIRESSGDNNNNSVGAPPQLQIPPPRPKRR

SEQ ID NO: 280842 - protein, 106 aa, Zea mays
  unsure (1)..(106): unsure at all Xaa locations
  Clone ID: MRT4577_1922C.1.pep
HSGQGAXQGKKXRXXKEXXPKKGNXRGXHGXARXXAXAXXXXXXAXTPTEXXRGGGSXXREAETXXGXXRRRGTXXGARXRSRXANRXQHRQPADRXAGGRRGPGT

SEQ ID NO: 280843 - protein, 132 aa, Zea mays
  Clone ID: MRT4577_19230C.1.pep
MDADVGAGATNQPWPEPDDAHLSPPPAAPPASAPTPAAEAAAPTASAAVSPPAPAEANGNSDRKRSYCVCYASGSHCTELCGCEPCHNKPPQGAPWTAPVLPLKPVQTLKAGQEIVQHLIRSPMDLIRRKCT

SEQ ID NO: 280844 - protein, 84 aa, Zea mays
  Clone ID: MRT4577_19231C.1.pep
SVYRFSSRCVAVEVLKLVRALARLYSPSQTVQVFGVGHFMVFCRSMLFTARSFRTDLLKGGHIFILCYNLVLFSSLKILRPPSI

SEQ ID NO: 280845 - protein, 109 aa, Zea mays
  unsure (1)..(109): unsure at all Xaa locations
  Clone ID: MRT4577_19232C.1.pep
MDADVGAGATNQPWPEPDDAHLSPPPPPPPAXPRLQPPRLPRPPXSVVVSPPAPAVANGNSDRTRLRKADDGDGCKACSCKKSRCLTLCCVCFASGSPCSDFCGCAPCF

SEQ ID NO: 280846 - protein, 167 aa, Zea mays
  Clone ID: MRT4577_19233C.1.pep
MDADVGAGATNQPWPEPDDAHLSPPPPPPPASAPTPAAEAAAPTASAAVSPPAPAEANGNSDRKRRRKADDGDGCKACSCKKSRCLKLYCVCYASGSHCTELCGCEPCHNKPPQGAPWTAPVLPLKPVQTLEAGQEIVEQLIRSPMDLIRRKCPARSQAALRSTVTA

SEQ ID NO: 280847 - protein, 113 aa, Zea mays
  unsure (1)..(113): unsure at all Xaa locations
  Clone ID: MRT4577_19234C.1.pep
SQPTKSRHLRRQHPAARRGAEHPAGEARRLHTPPFATGAPQEAKGSSPAEAQNXAQGSWAGPANRNGKDDPPNGDKLHQGAEVEGTETKPAEERETKRPKHGLHNPRKAPERG

SEQ ID NO: 280848 - protein, 76 aa, Zea mays
  unsure (1)..(76): unsure at all Xaa locations
  Clone ID: MRT4577_19235C.1.pep
PTGGGDHDNHAPKRPRIPGLASVIVEALKMDRLKTLCSSLEPILLRAASEXVERDLAKLYPATIQGRYKQSTYTSC

SEQ ID NO: 280849 - protein, 162 aa, Zea mays
  Clone ID: MRT4577_19236C.1.pep
MYQEKVNEIDNKMESVSGLMKHWLTFMSKKYLEDLTPEMREPLQNEGGDSYDQCTEDDNSENYALTDMNSLQDCSNANVNFSIGYGADDDERGVQRLLVYEYMPNGSVDDHLSSRSTSTLSWPMRLKVALDSARGLKYLHEEMEFQVTPLLYGHGGHNTCTI

SEQ ID NO: 280850 - protein, 154 aa, Zea mays
  Clone ID: MRT4577_19237C.1.pep
PWSFAPAASSFRRPVGVSSALVLAVAPWPAPLLGLVLVFLPFMTCRGSLPSYVCGHRACQLPQARLTRLRHQSSLDASLYSTWGFSAITLARRGLVDLSSVSRQPCRSFHRVRTSLSAHRSRRHEDYATALGLNGLLICIGGGLVKSGVDRSRK

SEQ ID NO: 280851 - protein, 95 aa, Zea mays
  unsure (1)..(95): unsure at all Xaa locations
  Clone ID: MRT4577_19238C.1.pep
AVXFXNSLSTPRPNNITCNIHVCDHTYLRTHLRVEDHLCLAEGVSYLNQSPSSFSQILQVLVMALKIYTLFHDSSLIKYFNENLTFQKINKIALR

SEQ ID NO: 280852 - protein, 89 aa, Zea mays
  Clone ID: MRT4577_19239C.1.pep
KPQNPQVLFSNANLPLKGAYFPGPDPGIPLAPGPFKGWFFGGFFFFFGPQKPKRRFFFLGGFNTCFWGPRARGFIRFSPELIQPFNKGF

SEQ ID NO: 280853 - protein, 91 aa, Zea mays
  Clone ID: MRT4577_1923C.1.pep
RSVGLLPGLLRSLPSSPPSPAGSPASPTPRIGSDDKVRGKRLGSLFTKLVSRLFAKKVMQLLIVGLYALRYDHTTYSPTLAENYINRRNFF

SEQ ID NO: 280854 - protein, 117 aa, Zea mays
  Clone ID: MRT4577_19240C.1.pep
STIDAHSMLLLSHRHQREELLRRLFCRRLLLPSPLHFTRVSLRFSTSSLSAHPPSPVPPPHGPTSVGHHPLLLPYAVAEIPARFPLPSLPRTNRVQHHLPPCQSEVSSLFYPTGFGH

SEQ ID NO: 280855 - protein, 94 aa, Zea mays
  unsure (1)..(94): unsure at all Xaa locations
  Clone ID: MRT4577_19241C.1.pep
SYALQNPFHLRRFHSPEGGAHITDNAKTMERHPMPQSTQEDEEDLIETQGDNPVIDRAVTNISQTCGRTHRHVDLFLHTXHIYDPFHFLHSKSL

SEQ ID NO: 280856 - protein, 79 aa, Zea mays
  Clone ID: MRT4577_19242C.1.pep
NMSLVISVFLKGELDLFKDSPHLYPTKERQKAHTAAPTGLLDPNNAQCRINALTRKPHVDNTKRQTRPRRTHGGGLYSL

SEQ ID NO: 280857 - protein, 216 aa, Zea mays
  unsure (1)..(216): unsure at all Xaa locations
  Clone ID: MRT4577_19243C.1.pep
MAKTTMSAAKNLVRLLVLVQVSLGLLGGVAALSFDYYGMTCPFAEMMVRSVVYDALMKDPTLAGSLLRLHFHDCFVQGCDASVLIDSADGNTAEKDAQANLTLRGFEVIDRIKELLESQCPGVVSCADVLALAARDAVLLARGPYYGVPLGRRDGTRSVDSDTFTALPPAFFNVTMLMKLFGSHGFTVQDMGPLAGGHTXGVAHCANFRAASPRRT

SEQ ID NO: 280858 - protein, 146 aa, Zea mays
  Clone ID: MRT4577_19244C.1.pep
RPRRPDQEINSIIHPLPAVSCAQMGVVEQKDLNYPSITAFLEQEPYVVNVTRVVTNVGRGTSLYVARVEMPSTVSVTVTPRVLLFKKVNEAKGFTVTIGSMDTSIQKGIAEGHLTWVSPKNVVRTPILVSFKKFVTDNSTTAHLRH

SEQ ID NO: 280859 - protein, 152 aa, Zea mays
  Clone ID: MRT4577_19245C.1.pep
IKISIISQLRKLGVFFFCPCLHAQIQHVKLAFHKVTPTKKLDEPDPLISPKAVSSSSKPDQQSWIDGYICSICGFELPPGFEEERLEHSDFHLAETLQQEEAVDGTRHISNESWVAERPRSTAPTPKKKLKSSKEGKHISIDSFFTKCNKSP

SEQ ID NO: 280860 - protein, 586 aa, Zea mays
  unsure (1)..(586): unsure at all Xaa locations
  Clone ID: MRT4577_19246C.1.pep
ENEQRKEAATKQKIEHLRAQCAVLTDNDISHFQKVADKKMLELEASRDLSKIWLHTDMDAFYAAVETLENPSLKGKPLAVGSMSMIATASYEARKFGVRAAMPGFIGCKLCPDLVFVPPNFERYTHYSELTRKVFQRYDPNFIATSLDEAYLNITNVCIERGITGEEVATELRSAIHQETGLTCSAGVAPNRMIAKIGGIGKVTEQMLHQVLGISTCQEMLQKAAFLCALFSESSADFFLSVGLGLGGTETPEQRQRKSISCERTFTATNDSSLLFXKLASLAENVSDDLQKEGFKGKTLTLKLKTADFEVRTRAVTTRNYIDSKEDILVYATKLIKAEMPISLRLMGLRMSQLHDEKDDPSTSTQKTLDIFFRSSNCNSNGNGTNVQRITNAPGQDNDFISLTSKEEYLAPNAGTSVSTGQQEXSSYMMRSVLXPEQQRSLDNDTKEAVLSDPLGGTKSDDVSSSAKVTPTKKLDEPDPLISPKAVPSSSKPYQQSWIDGYICSICGFELPPGFEEERLEHSDFHLAETLQQEEAVDGTRHISNESWVAERPRSTAPTPKKKLKSSKEGKHIPIDSFFTKCNKSP

SEQ ID NO: 280861 - protein, 75 aa, Zea mays
  unsure (1)..(75): unsure at all Xaa locations
  Clone ID: MRT4577_19247C.1.pep
CPTLIQAILGGAVRVPTLRADVVVKIEPGAVPGHKVVLRGAGLKTINSPYHEDQYVHFNVNLPVDXTFRQRELIE

SEQ ID NO: 280862 - protein, 194 aa, Zea mays
  Clone ID: MRT4577_19248C.1.pep
ERKLVNRPDIKDEPCPSHYCPLQVHDRTPNTQPSLKISARLLLQVAIPISTCRHHIQLLLCVAQWTLGQKGPGQKGPLSGLCGYGLVGVVCLAVREEVVDDHADNRKEEHDESPDDLVGHGAVRLEDLNPCDDIENKNNESNDASSGTSLPWLGFLHGKRSCFSQHEHGELKKQGEDNVEHVCGVEVGVGYEWE

SEQ ID NO: 280863 - protein, 151 aa, Zea mays
  unsure (1)..(151): unsure at all Xaa locations
  Clone ID: MRT4577_19249C.1.pep
REEEQGEREEKRKGIEKKGRRKGGAEKRKRPKNREKGGWEREARKGDSAKERGRRGPQGGGGTGPSVKGTAGKRPEGEGGKEKLGMNMEIKEEETTPPTGGDXGKKNKKRERGKDKAIHLFMKFYNPIHLFKKQPLSVHIESDKARGEFGR

SEQ ID NO: 280864 - protein, 1375 aa, Zea mays
  unsure (1)..(1375): unsure at all Xaa locations
  Clone ID: MRT4577_1924C.1.pep
MELVEGELGRFAMIRGEEPTQTYNRFKTLVNKIRSYGSTRWTDHDVVRLMLRSFNVIDPHLVNLIRENLKYIKMTPEEILGKFVSGSMMVKEARYVDDALNGPLPVYEPQPVALKATSSREALPSKVAQVEAVGLNEDEMALIIKRFKTALKGRKEYPNKSKAKGKCSCFKCGKTGHFIAQCPDNNNDQEQEKHGKREKKKAYKKAKGEAHLGKEWDLDCSSSDSDEEELAASAFNKSSLFPNERHTCLMAKEKKVSVRETPKYTTSSDDDSSDDEVDYTDSFKGLDRAKVDKINELIDALNEKDRLLEKQEGILYEEHDKFVSVQKSLALETKRNKMLSSELSVCHESISSLKILNNDLNVKLEVANKSSSCVEHVAISNRCKDFDVDACVEHLTSITKLNDKVASLNTQLKTCKNDFDKLKFARDAYTIGRHHSIKDGLGFRKEAKNLTSQKAPILAKEKGKGPMASSVQKNHAFLYNRKIASHXIGDMIMMLVYASGGSSWIIDSGCTNHMTGEKKMFTSYVKNKDSQDTIIFGDGNQGKVKXRSDGSLAFKGVLDGKLYLVDFSKEEADLDACLISKTSMGWLWHRRLAHVGMKNVHKLLKGEHVLGLXMYVSKKIXLCSLSSRETGGKHSSQQECDDIIKTTGATTXTSLDPSPTLASGEQNGVVERKNRTLIDMARTMLGEXQTPERFWSEVVNTACHAINRLYLHRLLKKTSYELLTGNKPNVSYFRVFGSKCYILVKKCRHSKFAPKVVEGFLLGYDSNTRAYRVFNKSSGLVEVSSDIVFDENNGSPREQVDLDDIDEDDVPTAAMRAMAIGDVRPQEQQKQDQPSTSMMVQPXTQDDEQVPQEEACDQGGAQEEQXPFRVEEALQDPDWVLAMQEELNNFERNEVWSLVPRPKQNFVGTKWVFRNKQDEHGVVTRNKARLVAKGYAQVAGLEFEETFAPVARLESIRILLAYVAHHSFRLFQMDVKSAFLNGPIKEEVYVEQPPGFEDDRYPDHVFKLSKALYGLKQAPRAWYECLRDFLIANAFKVGKANPTLFTKTCDSDLFVCQIYVDDIIFGSTNQKSCEEFSRVMTQKFEMSMMGELTYFLGFQVKQLKDGTFLSQTKYTQDLLKRFGMKDAKPAKTTMGTDGHVDLKKGGKSVDQKAYRSMIGSLLYVCASRPDIMLSVCMCARFQSDPRECHLVAVKRILRYLVATPCFGIWYPKGSTFDLIGYSDSDYAGCKVDRKSTSGTCQFLGRSLVSWSSKKQTSVALSTTEAEYVAAGQCCAQLLWMRQTLSDFGYNLSKVPLICDNESAICMADNPVEHSRTKHIDIRHHFLRHHQQKGDIKVFYISTENQLADIFTKLLDEKTFCRLRSELNVLDLRNLD

SEQ ID NO: 280865 - protein, 30 aa, Zea mays
  Clone ID: MRT4577_19250C.1.pep
FYVYNSFYQFLLFKHNLIYCPYITNKMMIR

SEQ ID NO: 280866 - protein, 56 aa, Zea mays
  Clone ID: MRT4577_19251C.1.pep
KGVRRVGRWAEETPEPDRRKTRRSALAKEENQEPPPLLPPSSRAAAVEEQFRGPIC

SEQ ID NO: 280867 - protein, 60 aa, Zea mays
  Clone ID: MRT4577_19252C.1.pep
CPHHGGGWPMPQPFLSIAICLLCVASHTSVRIFGSYPSLMLQCQSYLALICHTVPVGNLN

SEQ ID NO: 280868 - protein, 37 aa, Zea mays
  Clone ID: MRT4577_19253C.1.pep
PRVRSRGLGQPQTGSLLGNHLPLASIPPFKLKGAEPN

SEQ ID NO: 280869 - protein, 125 aa, Zea mays
  Clone ID: MRT4577_19254C.1.pep
PARGRKSHIRMRTELNALKPHIRMYTDLRNSSTPSGGPLDQPIRNPAVTHFGVQVPAPLCRVYLGRSSGLQINPRALASLSAPWWFLGFAILGTTYICIHTRTYMYILYVYISSTTFLRISSLIM

SEQ ID NO: 280870 - protein, 117 aa, Zea mays
  Clone ID: MRT4577_19255C.1.pep
QNFRQNSHRNNKSDQVMLLRVWIIPLVCDMEWSSGMCVLLKRHKLSVPVSYLDVVNGGSHCIYMSASLRLCNPTVLKELGTHDVVAAFSLEIVVTLARRETNHPLCRSLQDNRVFLT

SEQ ID NO: 280871 - protein, 181 aa, Zea mays
  unsure (1)..(181): unsure at all Xaa locations
  Clone ID: MRT4577_19256C.1.pep
YIDPEYYRLQELTERSDVYSFGVVLLELVTGRKAIHRTNQDGSGSPRNVVEFXVPAVEAGSVTKILDERVPPPRGHEVEAVARVAKIASECVRPRGRARPTRPPMGAGTRGAVTLCEESVVAAAGHNSSRHGGSDLSRSRSRSESDDPSPFHTRELGFGFGFGFGLGSSRPVTHGRSHSTM

SEQ ID NO: 280872 - protein, 57 aa, Zea mays
  Clone ID: MRT4577_19257C.1.pep
TFFHYLHNDMLTVDIAAPSREFDLECSNIDVNQTSRESCSWLSCVYPMLEAMTAQSI

SEQ ID NO: 280873 - protein, 68 aa, Zea mays
  unsure (1)..(68): unsure at all Xaa locations
  Clone ID: MRT4577_19258C.1.pep
MAMAGGAPPAPLPVVGHQFCAPYVVPLTVTKKALSLSDGDFAITDANGAXXLKXKGAIFSIRSRRTIL

SEQ ID NO: 280874 - protein, 53 aa, Zea mays
  Clone ID: MRT4577_19259C.1.pep
HLSMYIVCTLDLAFLPHQARNPKYVSDPIYRVFGLSNKLVHHLLTLHFFVWFV

SEQ ID NO: 280875 - protein, 784 aa, Zea mays
  unsure (1)..(784): unsure at all Xaa locations
  Clone ID: MRT4577_1925C.1.pep
MDPKGKGIVINDKEKESFVNEPKDDKPTDSGSGQRRKEGKKKKTRRIKEIVYYDSDESTSSQKDEDHNDYERRKPVNSNFSFDYSRIPQSSHSHLLSIPLGKPPHFDGEDYGFWSHKMRSHLFSLHPSIWEIVESGMHFDSSDSPMFINEQIHKNAQATTVLLASLCKNEYHKVSGLDNAKQIWDTLKISHEGNDVTLLTKMELVEGELGRFAMIRGEEPTQTYNRLKTLINKIRSYGSTRWTDHDVVRLMLRSFTVLDPHLVNNIRENPRYTKMSPEEVLGKFVSGRMMIKEARYVDDALNGPINEPQPLTLKATRSKEALPSKVAQIEAAGLNDEEMALIIKRFKTVLKGRNGQPSKTKTKGKRSCFKCGKLGHFIANCPDNESDQEKGNKREKKKQYKKAKGEAHLGKEWDSDCSSSDSDNEGLAATAFNKSALFPNERLTCLMAREKKVSTQDSTYASSSDSESSDDDIDYSCLFKGLDRSKIDKINELIDALNEKDRLLEKQEDLLYDEHDKFVEAQKSYALEVKRNEMLSYELSTCHETISTLQGVNNDLNAKLEIANKSNSCVEHVKICTRCKDFDVDACSEHLVLISKLNKEVASLNAQLKTSKNEVDKIKFARDAYTVGRHPSIKDGLGFKREAKNLTSHKAPIFVKEKGKAPMASSAKKNHAFIYSDRKFSRNAYRNYSYDSYXMTASSSSIVHDMPRKNVIHHMPRRNVVHVPRKASNEPSTIYHACNTSFAICRNDKKVIARKLGAKCKGDKTCILXPKICIRKKYNKYMKK

SEQ ID NO: 280876 - protein, 150 aa, Zea mays
  Clone ID: MRT4577_19260C.1.pep
SRFDPRLYSESLLNMKDFPHNEEFFIALRDTDLVLDVQGGSADAGAPIILYTQKHEDNDNQKWIYENKQLKNKQTGLVLTFPNLDANVTATQNHAGCSDEQTFEYYDYTISAQAQEDLVLGINGEKKELAPITLIRRDNDSDKQQWEITR

SEQ ID NO: 280877 - protein, 114 aa, Zea mays
  unsure (1)..(114): unsure at all Xaa locations
  Clone ID: MRT4577_19261C.1.pep
CKCKCSSDNMDPFVILTCRTQEQKSSVANXVRIGALVFFFSLFIRSFTRIPILCCRSAIRTGAGSEPEWNETFVFTVSDDTPQLHLKIMDSDLTNDDFVGETTVLITTDQRRLP

SEQ ID NO: 280878 - protein, 156 aa, Zea mays
  unsure (1)..(156): unsure at all Xaa locations
  Clone ID: MRT4577_19262C.1.pep
MAYCAFAPSAPPQYSELKMTLYTNKEVYRSGPDQNGVTITERSNMGTTWVFSWPVADGPTPDANIVGQLQGTSVQVAXILPLWCTXSLGLVFEDKRFNGSTLQIQGTSQINGEWSIVGGTGQLTMAMGTVKRTEVVYKDNTRISELKIHAYFAPVN

SEQ ID NO: 280879 - protein, 65 aa, Zea mays
  Clone ID: MRT4577_19263C.1.pep
NSNKKKKKKKNKKKKKKKKNLKTKKKRAGGLRFPSSRLPSAGGRLHRSCFGTPKYSPLSYILQPG

SEQ ID NO: 280880 - protein, 83 aa, Zea mays
  Clone ID: MRT4577_19264C.1.pep
SASLKPIITSMNARQGSNIPSGTLPAMWLLTSPPPSEPSSRKPSRVQSMLSMLAWPRPATRVNGQERMNSEPNKRKEKNFSLS

SEQ ID NO: 280881 - protein, 396 aa, Zea mays
  Clone ID: MRT4577_19265C.1.pep
MPLTRVAADAFGVLTIALFALFAALGLFCIFQSVYFRCRIRRGPSFLPLGYFNGPWVTRIALILITIWWGVGEIVRLSFLKKKLFSSLTWQRNICDVYILSNLGFAEPGIFFAFAFLLHGSLQKRELGTLNQRWNWKTMAYLLVFCIPVFSVQAILVFVGPKFVREENHDLGRRKIAKYFIRTYTPVGDTSVCTYPLFGTLFLGLVDAFLMSYVSYVGLRVLSLVINKSLRRRVYLLMLSVLCFLPIRVLLLGFSVLLKPGHVAFEGIIFLSFLMMLSCTTVGILLLVYYPVADSLALRDIGQRDIAEMVPYDDYYYEGTSLVANQSFREIERNSDTSTKPGSISFRTMIREDQLQQDGTDEIGFSSRSGVHIGSPSGSSPSAAVPMLPLKEIPRY

SEQ ID NO: 280882 - protein, 90 aa, Zea mays
  Clone ID: MRT4577_19266C.1.pep
LLSLCSPSLSSRARSTARKGTHGAGSPIEYAGCALQVEALGGIGHSCCVGIRLLLSLHDGYHETFHFLGNWGLIMYLVLMIGRKKLAYKA

SEQ ID NO: 280883 - protein, 64 aa, Zea mays
  unsure (1)..(64): unsure at all Xaa locations
  Clone ID: MRT4577_19267C.1.pep
AGMQCGSACCEMYRLEHRIIDDGXLPADITXVGGDDAANTVFTETGSEKHLPRAVVVDLEPTVI

SEQ ID NO: 280884 - protein, 645 aa, Zea mays
  Clone ID: MRT4577_19268C.1.pep
MGSTAGDVAAVVDEEACMYAMQLASSSILPMTLKNAIELGLLEVLQKEAGGVKAALAPEEVVTRTLGTSGAGGIGNLEAGRDLISHYQKHPTHLLIRMAAPTLTTDGPRLGQQEMKKMSPSFHPTLWGDFFLSYEAPTEAQEAEMRQRAEVLREEVRNMIKGSHDVPEIVDLIITLQRLNLDYHYEDEINEKLAVVYNSNYDGGNLDLVSRRFYLLRKCGYHVSSDVFLNFKDQYGNFIEVDTRSLLSLYNAAYLRIHGETVLDEAISFTTRCLQDRLEHLESPIAEEVSSALDTPLFRRVGTLEMKDYIPIYEKDAKQNKSILEFAKLNFNLLQLLYSSELKECTTWWKELRVESNLSFVRDRIVEVYFWMSGGCYDPQYSHSRIILTKIVAFITILDDTLDSHANSYESMQLAEAVERWDESAVSLLPEYMKDFYMYLLKTFSSFENELGPDKSYRVFYLKEAVKELVREYTKEIKWRDEDYVPKTLKEHLKVSLISIGGTLVLCSAFVGMGDVVTKKIMEWVMSDAELVKSFGIFVRLSNDIVSTKREQREKHCVSTVQCYMKQHELTMDEACEQIKELTEDSWKFMIEQGLALKEYPIIVPRTVLEFARTVDYMYKEADKYTVSHTIKDMLTSLYVKPVLM

SEQ ID NO: 280885 - protein, 83 aa, Zea mays
  Clone ID: MRT4577_19269C.1.pep
MWVCLNWYSENHCNKGNITEKRLVSKNVLSLKISLQTCVSEKICKAWYSFKVHGGDWFSLHIYHCTQALQILSDTQVFENKSS

SEQ ID NO: 280886 - protein, 1511 aa, Zea mays
  unsure (1)..(1511): unsure at all Xaa locations
  Clone ID: MRT4577_1926C.1.pep
MDPKGKGIVINDKEKESFVNEPKDDKPTDSGSGQRRKEGKKKKTRRIKEIVYYDSDESTSSQKDEDHNDYEKRKPVNSNFSFDYSRIPQSSHSHLLSIPLGKPPHFDGEDYGFWSHKMRSHLFSLHPSIWEIVENGMNFDSSDSPMFINEQIHKNAQATTVLLASLCREEYNKVSGLDNAKQIWDTLKISHEGNDITMLTKMELVEGELGRFAMIRGEEPTQTYNRLKTLINKIRSYGSTRWTDHDVVRLMLRSFTVLDPHLVNNIRENPRYTKMSPEEVLGKFVSGRMMIKEARYVDDALNGPINEPQPFALKATGNKEALPSKVAQIEAAGLNEEEMALIIKRFKTVLKGRNGQPSKTKTKGKRSCFKCGKLGHFIANCPDNDSDQEKGNKREKKKHYKKAKGEAHLGKEWDSDCSSSDSDNEGLAATAFNKSTLFPNERHTCLMAREKKVCTRNSTYASSSEDESSDEDEVDYSCLFKGLDRSKIDKINELIDALNEKNILLEKQEDLLYEEHDKFVEAQKSYALEVKRNEMLSFELSTCHETISTLKGVNNDLNAKLEVANKSNSCVEHVEICTRCKDFDINACSEHLVSISKLNDELASLNAQLKTSKNDFDKLKFARDAYTIGRHPSIKDGLGFKREAKNLTSHKASIPAKEKGKAPMATSAKRNHAFLYHDRKQTRNVYASGGSSWIIDSXMHKPYDGGEEDVHLLRQEXIPKIQSYSVXNQGKVKGLDVSVFRRSDGSLAFXCIRRQTLFSXFAKEEAGLDACLMAKTCMGWLWHRRLAHVGMKNLHKLLKGEHVIGLTNVHFEKDRPCAACQAGKQVGGAHHSKNVMTTSRPLELLHMDLFGPVAYLSIGGSKYGLVIVDDFSRFTWVFFLQDKSETQGTLKRFLRRAQNEFELKVKKIRSDNGSEFKNLQVEEFLEEEGIKHEFSAPYTPQQNGVVERKNRTLIDMARTMLGEFKTPECFWTEAVNTACHAINRVYLHRLLKKTSYELLTDEEDVPTAAIRTMAIGDVRPQEQEEQDQPSSSTMVNPPTQDDEHVHQQEACDQGGAQDDHVMEEEAQPAPPTQVRAMIQRDHPVDQILGDISKGVTTRSRLVNFCEHYSFVSSIEPFRVEEALLDPDWVLAMQEELNNFKRNEVWTLVPRPKQNVVGTKWVFRNKQDEHGVVTRNKARLVAKGYAQVAGLDFEETFAPVARLESIRILLAYAAHHSFRLFQMDVKSAFLNGPIKEEVYVEQPPGFEDERYPDHVCKLSKALYGLKQAPRAWYECLRDFLIANAFKVGKADPTLFTKTCDGDLFVCQIYVDDIIFGSTNQKSCEEFSRVMTQKFEMSMMGELNYFLGFQGSTFDLVGYSDSDYAGCKVDRKSTSGTCQFLGRSLVSWNSKKQTSVALSTAEAEYVAAGQCCAQLLWMRQTLRDFGYNLSKVPLLCDNESAIRMAENPVEHSRTKHIDIRHHFLRDHQQKGDIEVFHVSTENQLADIFTKPLDEKTFCRLRSELNVLDSRNLD

SEQ ID NO: 280887 - protein, 75 aa, Zea mays
  Clone ID: MRT4577_19270C.1.pep
KKKPPPFLGGFKKQGVFFTPLKKVINIFCRKKSTPLFKSPNKNCGVKCQITPGGGYFSLFKKIKKKPFFFLLGPP

SEQ ID NO: 280888 - protein, 64 aa, Zea mays
  Clone ID: MRT4577_19271C.1.pep
GTRGLRKELEPPIRALRARENRPPAPRYSVTAGLIGVGELLTQHTSRGGRRGRVSGGRGRGRRG

SEQ ID NO: 280889 - protein, 93 aa, Zea mays
  Clone ID: MRT4577_19272C.1.pep
LWYLRALVDAHGYRHGPGRVALRKRRGALFELVYWCARGVWRGGSRTDRGRTEGEGGLDPNVVADQGGCTIARDGAARRAGLVHSRPRDEGAR

SEQ ID NO: 280890 - protein, 59 aa, Zea mays
  Clone ID: MRT4577_19273C.1.pep
RSFRLCDRDMRVIAVTEIHCAADARHVRRSCLDADLALDCGIHQEPCTIGLYVGWFCSR

SEQ ID NO: 280891 - protein, 311 aa, Zea mays
  unsure (1)..(311): unsure at all Xaa locations
  Clone ID: MRT4577_19274C.1.pep
KARSAPRAKESETQTSFSIPVNGPDSPERAPSPVAEARAGPMAPAMSAEDAAARMQAVVRGFLARKSVRAVRQVDQEAEQVAGKMACEAEALLADPRARVAVWEALMRMLLRLDAVRGARDYRRRVTKRVVALQDAVDALVAKPAPATVEIAEEIAIAPELPDAEDEKEDEEAETHEAAAVEIAEESNTNVGVVEPEGSEILAEENEHTSPALTAVAGAASDVVDARKLMQMVATLCEQSAQQCALIEVLAERVDMLERTVRRMQDADSXRRPAKKLSTEGNXKEQQQALQRLTTKSINRDLNSYVFFHCF

SEQ ID NO: 280892 - protein, 45 aa, Zea mays
  Clone ID: MRT4577_19275C.1.pep
ILTIDYTPSLHTMEFEHLTHFGGTTSTIQPINQRSTLLILYLTNY

SEQ ID NO: 280893 - protein, 78 aa, Zea mays
  Clone ID: MRT4577_19276C.1.pep
LVEGEEEELGGFSRLFLGQFLARQDEVYEAWIKAECPLGLIRLFSIHMDWRGLIRIEGDFDLLGIESPSITLNPYGLG

SEQ ID NO: 280894 - protein, 83 aa, Zea mays
  Clone ID: MRT4577_19277C.1.pep
TSYYALSRKLVVLIQQKSKSFAQMKKKKKKKKQKKKKKKKKKKKKQNKKKRRTALKGPQMTNMQFLRISCSIKEATAHLTGRR

SEQ ID NO: 280895 - protein, 84 aa, Zea mays
  Clone ID: MRT4577_19278C.1.pep
LSVMECSESEMMMMPDGDVVYCTPHLPPRALLAASTVMSCVMWVQHFIRLSMCPAELCHHPSIIILYLYPKKYLLLHKKESVQG

SEQ ID NO: 280896 - protein, 373 aa, Zea mays
  Clone ID: MRT4577_19279C.1.pep
MVMANPDMLPPGFRFHPTDEELILHYLRNRAANAPCPVAIIADVDIYKFDPWDLPSRAAYGDKEWYFFSPRDRKYPNGIRPNRAAGSGYWKATGTDKPIHSSTTAGESVGVKKALVFYEGRPPKGTKTNWIMHEYRLAADAQAAHAYRPMKFRNASMRLDDWVLCRIYKKASCQVPAMAAVPQLSDHDQDEHCGFDDNPYAAMLLQGASYSYPAPPHAAAGAQRMPRIPSLTELFNDPSLAHFFEEGGGMQDMARLSNPQQQQQHAPLLGRAVTSQQLLLNNGHSMPGGGQAQMDPHPPAAAASTSSAAAGNNKRKRSSTTTDAGALSSSQASEAKKPNGSCFGATFQIGNGLQGPSLGHHHMPLHSNMGTMN

SEQ ID NO: 280897 - protein, 163 aa, Zea mays
  Clone ID: MRT4577_1927C.1.pep
MGVREKGRPARRARAQGARAPEEEGGGGGRTRTRTHLALFFVLRKIERDIDTARDVGIYIHYIHTHARARAHARAPPPPPRGGHLGVTVTLTPPPPPRAQTRAPPPPRARARESLSLSIYISMCGGGRARPAPPRAREREREREREREREREREREREPRAES

SEQ ID NO: 280898 - protein, 91 aa, Zea mays
  Clone ID: MRT4577_19280C.1.pep
TPAGPVRNSRVDPRVRVCRVFTLLCSPPVWAGSEDSGEQGMGPPRAAGSWPTPAVPSSTMGFEDTRQLPTPEERVSSEDFTGAPSPHLDEG

SEQ ID NO: 280899 - protein, 162 aa, Zea mays
  Clone ID: MRT4577_19281C.1.pep
KTKPGPTISWKGFITGPWGGNWKPRVHPEGGAPNQGKKGGGAKGVFKTQKPEPFWAPQTPRGPAGGVGPMEKKTLGDLEKGSKGFPKAPLLRFPRAPLGGPKGPRGPDWGPLKKPKGPGFLKTPVFFPPPGRGFWGGDKKVSFRNLSLKFPPLGFPGRSQRG

SEQ ID NO: 280900 - protein, 136 aa, Zea mays
  unsure (1)..(136): unsure at all Xaa locations
  Clone ID: MRT4577_19282C.1.pep
EGSAPGPDPVANSNLPCYIFIDTHSSAHXPRVDISLAAPSEDNMRYFNGIDLLCLLHPSYGRGGFKLDSSDHEXYPMXAPKVRLTDQTYXHRNIXDSLXRTCLVASXDPWTPALQIRAVPVRIQALLSDPDADDPI

SEQ ID NO: 280901 - protein, 67 aa, Zea mays
  unsure (1)..(67): unsure at all Xaa locations
  Clone ID: MRT4577_19283C.1.pep
FFFFFLIXSTKRSFVFFIFFLFFNILNFLNFYLFYHEINLVVPYRFMSLLSLCTRTNNLTRKGEHLI

SEQ ID NO: 280902 - protein, 462 aa, Zea mays
  unsure (1)..(462): unsure at all Xaa locations
  Clone ID: MRT4577_19284C.1.pep
MAAAAAFSSTSVVAALAASGFLGKKLVTSIXSGIRRRGXSLHGATTTIRVRAMAVNKETEQDRWRGLALDTSDDQQDITRGKGRVDPLFQAPMGDGTHVAVLSSYDYISQGLRHYSLDNMMDGYYIAPAFMDKLVVHIAKNFMPLPNIKVPLILGIWGGKGQGKSFQCELVLAKMGINPIVMSAGELESGNAGEPAKLIRQRYREAADMIKKGKMCVLFINDLDAGAGRMGGTTQYTVNNQMVNATLMNIADNPTNVQLPGMYNKEENPRVPIIVTGNDFSTLYAPLIRDGRMDKFYWAPTREDRVGVCKGIFRSDGVPDEDVVRLVDAFPGQSIDFFGALRARVYDDEVRRWVAETGVENIARRLVNSKEGPPTFEQPRMTLDKLMEYGRMLVEEQENVKRVQLADKYLSEAALGDANDDDDLYGKAAQHVRVPVPEGCTDPKAGNFDPTARSDDGSCVYN

SEQ ID NO: 280903 - protein, 139 aa, Zea mays
  Clone ID: MRT4577_19285C.1.pep
MARKHGWQLPAHTLQIVAITVFFLLLVAFYVFFAPFLGKQVLEYIAIGVYTPVALAVFILYIRCTSINPADPGIMSKFEDGLIKIPTNGSGIEGMNLPQKANNATGTNSPTSTCRSSLDGHSNQRGSSIGEAHMNLGSQ

SEQ ID NO: 280904 - protein, 119 aa, Zea mays
  unsure (1)..(119): unsure at all Xaa locations
  Clone ID: MRT4577_19286C.1.pep
SAPAQQXXTXXXXXHQDKRQXAAKARSEXQKRRXPRGXSXRRXARRRRRGAPSGRRPTAXRTAQAATRRRRSRXXTSPRPRRTRRPRTXSTSPPXTRPRSRKPRRARPPPPAPRRRRRA

SEQ ID NO: 280905 - protein, 186 aa, Zea mays
  unsure (1)..(186): unsure at all Xaa locations
  Clone ID: MRT4577_19287C.1.pep
MKDVAGVLRSTIKKWNIICPVYLNSKKPVAEGHRITTAKAWPAPPCVXMADGCSPLKIPHPCELDKGYPRGFFQVGRVRGQLKKNAGSPAXPAISTNKQLMIQVSQVVSRPRGRPKKQEPAPNSGGGSKSPQGGQKKKLSRIIVVFFIYVPSLYRKLPVKKKKFVAVVVKKQKKKKKKKKKNSRRG

SEQ ID NO: 280906 - protein, 75 aa, Zea mays
  Clone ID: MRT4577_19288C.1.pep
ELSAPKGGSTVSISTASNWLAPWCSKRPINPCMRHHLPPVTFFTTHHKLYTSEARTPSRQTPNPSPLLSGTAPRN

SEQ ID NO: 280907 - protein, 82 aa, Zea mays
  Clone ID: MRT4577_19289C.1.pep
GYFHFQVLSNTTVSCGLWCTSGLLVIVCLSLCLLRWWQTSGCMVWLCLYMRDEIVSLCRLVTAVACRCVVVCPCVPSAGRVV

SEQ ID NO: 280908 - protein, 50 aa, Zea mays
  Clone ID: MRT4577_1928C.1.pep
LSSSSTSGRPLDTPMDPVETASYCSVPQLGLTMSLLVTSVKPTCARDCRQ

SEQ ID NO: 280909 - protein, 82 aa, Zea mays
  Clone ID: MRT4577_19290C.1.pep
GPPPRAPHKCPKPPIKRGFSILSQSGSREENQLLLGVCPKTQKVFLQLFLFKKILAYGIGPPKKGLGHCLWAKPPIRLIVFN

SEQ ID NO: 280910 - protein, 172 aa, Zea mays
  unsure (1)..(172): unsure at all Xaa locations
  Clone ID: MRT4577_19291C.1.pep
PPRPSPPSRWLTTPRRRRSRPLPRHRXTRSATXPTSPRRRPSPHQPAPLLPGRRRRASRTPRPPXRSGHPLLRRHPDPRRRLRRRPRFGRRXSPTRRGAPPASXXRSRRPPRPPRNRPRRRAATAPGPARPPARARRRRGSRAASATAPAVLEVITLGKHAPSSIKCSSLYD

SEQ ID NO: 280911 - protein, 103 aa, Zea mays
  Clone ID: MRT4577_19292C.1.pep
SISRVLSPPAVVSWVRIRWCLPPLDHVHAWAWHVFHFRCSYPALSPVLSRTAAGHDLASLRACGASSQSGRPFAGPHVRVSRLSRRGLVRCLARFSPGPSPVG

SEQ ID NO: 280912 - protein, 48 aa, Zea mays
  Clone ID: MRT4577_19293C.1.pep
LFMCFASEQIFLRTSQAHWTIQVLMLLTCFLRAVRLYRSYRNTSIHCD

SEQ ID NO: 280913 - protein, 57 aa, Zea mays
  Clone ID: MRT4577_19294C.1.pep
FKCQLDTFIDMDCNQIKPELYKALSCLTTTIARENKFYLEVLPRAEFRAYVRVHATS

SEQ ID NO: 280914 - protein, 57 aa, Zea mays
  Clone ID: MRT4577_19295C.1.pep
NSKNPHICVSSWDVSYSKQQTTVNSPRQDLYNHTGQALSCGEKMSAHAQEETMHTFS

SEQ ID NO: 280915 - protein, 82 aa, Zea mays
  Clone ID: MRT4577_19296C.1.pep
MTFNRRNGRRNKHRRGHIKYIHCSNCSKCCPKDKAIKRILVRNIAEQADVRDVQEDCVHDGYVLPTLDAKGDYCVLCAIHAH

SEQ ID NO: 280916 - protein, 81 aa, Zea mays
  Clone ID: MRT4577_19297C.1.pep
MAMASRDGGGAAGRAALRVGRTREYRTGMETELLSIDAGSSGGPAVSLFVLCGDGFEAARLFRSGTLSLHMARVEGLVPMS

SEQ ID NO: 280917 - protein, 83 aa, Zea mays
  Clone ID: MRT4577_19298C.1.pep
SSSSSSSSSSSSSSSSSSSSSTCDDLLYSMASATELGWGARRVWWALFFRARKREEETVVWWRLYCLVELIKLDHYKRVVKMH

SEQ ID NO: 280918 - protein, 152 aa, Zea mays
  unsure (1)..(152): unsure at all Xaa locations
  Clone ID: MRT4577_19299C.1.pep
MEYKRSSHVEDEDEDELEEEEEEDEEEEEDEDEEARSHRYTTAAAAPLGTPQQQEVQAQALGLGSHASLMDSAAFSRPLLPPNSSLVTXATAASTRFSAFQNRSRSSIRGKRRXRERDRDAGAQQPQLRRHQEPERNNNGVLGDGCDARAPI

SEQ ID NO: 280919 - protein, 64 aa, Zea mays
  Clone ID: MRT4577_1929C.1.pep
LLSFYLRERRLITAIRCLFDKVNHFSSVSHHSDSWGAFSGIALLYLRSPKESSIGLGPVLYGAV

SEQ ID NO: 280920 - protein, 75 aa, Zea mays
  Clone ID: MRT4577_192C.1.pep
EVFLKAREALSDEDPGIEFRTVGLYFVGLLRDMEINAGKVLVIRAMCCRQVAQSCDHHQEHSRPLCTQGMGSLGL

SEQ ID NO: 280921 - protein, 252 aa, Zea mays
  Clone ID: MRT4577_19300C.1.pep
RPHRPPHVQRLPPRRGHRRRRGHGHVQRHPQGQEEDFPHRLQLPPATSALILPISYTYIAMMGSQGLTDASKIAILNANYMAKRLEKHYPVLFRGVNGTVAHEFIIDLRAFKTTAGIEPEDVAKRLMDYGFHAPTMSWPVPGTLMIEPTESESKAELDRFCDALISIREEIAEIESGKADVLNNVLKGAPHPPQLLMGDTWSKPYSREYAAFPAAWLRGAKFWPTTGRVDNVYGDRNLICTLQQATQVAEEA

SEQ ID NO: 280922 - protein, 60 aa, Zea mays
  Clone ID: MRT4577_19301C.1.pep
GAVSSRVHVHELKLLDSEHSYRHRSLISGLKREHAHFLHHNVQQDLHMTIDHLMLSDANK

SEQ ID NO: 280923 - protein, 884 aa, Zea mays
  Clone ID: MRT4577_19302C.1.pep
PTPPPAPGPPPPSATPPPPPPCPPPRAAPAPGPPESLLNYQTMVADLTGLPMSNASLLDEATAAAEAMAMCSAILRGKKRTFLIASNCHPQTIDVCRTRSDGFGIRVVVADAKDLDYGGGDVCGVLVQYPGTEGEVLDYAEFVRDAHAHGVKVVMATDLLALTALRPPGEIGADIAVGSAQRFGVPMGYGGPHAAFLATSQEYKRLMPGRIIGVSVDSTGRPALRMAMQTREQHIRRDKATSNICTAQALLANMAAMYAVYHGPAGLKAIADRVHGLAGTFAHGLKKLGTVTVQDLPFFDTVRVTCSDARAIAKEAVKNEMNLRVVDANTITVAFDETSTLEDVDKLFKVFNNGKSASFTAESIAPEVSSSIPSSLARESPYLTHPVFNMYHTEHELLRYLHKLQSKDLSLCHSMIPLGSCTMKLNATVEMIPVTFPNFANLHPFAPTDQAAGYHEMFDDLGNLLCTITGFDSFSLQPNAGAAGEYAGLMVIRAYHNSRGDHHRDVCIIPVSAHGTNPASAAMVGMKIVAVGTDAKGNINIEELRKAAEANKDNLAALMVTYPSTHGVYEEGIDEICKIIHENGGQVYMDGANMNAQVGLTSPGFIGADVCHLNLHKTFCIPHGGGGPGMGPIGVKKHLAPFLPSHPVIPTGGFPLPEKTDPLGTISAAPWGSALILPISYTYIAMMGSQGLTDASKIAILNANYMAKRLEKHYPVLFRGVNGTVAHEFIIDLRAFKTTAGIEPEDVAKRLMDYGFHAPTMSWPVPGTLMIEPTESESKAELDRFCDALISIREEIAEIESGKADVLNNVLKGAPHPPQLLMGDTWSKPYSREYAAFPAAWLRGAKFWPTTGRVDNVYGDRNLICTLQQATQVAEEAAAATATA

SEQ ID NO: 280924 - protein, 45 aa, Zea mays
  Clone ID: MRT4577_19303C.1.pep
VLVYPPPPVNGFGWLIIREPRYQPVPLEYIMEITLVFHIAPYSLL

SEQ ID NO: 280925 - protein, 35 aa, Zea mays
  unsure (1)..(35): unsure at all Xaa locations
  Clone ID: MRT4577_19304C.1.pep
MSPWQPTRXESVYMAKLAEQAERNEEMVEFMERVG

SEQ ID NO: 280926 - protein, 41 aa, Zea mays
  Clone ID: MRT4577_19305C.1.pep
SSPGPDVDSILALLRAFLTAHLLSRAAPAEFSCPGKRRHKS

SEQ ID NO: 280927 - protein, 148 aa, Zea mays
  Clone ID: MRT4577_19306C.1.pep
GKLGLKIGAFTTKGPKENLFFRWGGLVKKKPCFKGGLPRFSNKTGFTPGGPKKKITFCKKGLPFSAVGKKKRKPPGGGWGVNPRGLFGAGKFLKIGLGAPHPKERRLHPFFLGGFLKGFFLKEGGGPLFWTGGGKRGSGFSHLFSFFQ

SEQ ID NO: 280928 - protein, 131 aa, Zea mays
  Clone ID: MRT4577_19307C.1.pep
PSPPAVGVRQGFGPGLPRFPPPQGLGFVKKVLGPGPFFRPVFPGLFPQPGGFFAQVSRPPGESGPFSPKDRALGSFSPLAPYLGFFFILWFPLFWFRGPHLGGLLILIFSPPPPLVGGLWPLFLGPIFFGP

SEQ ID NO: 280929 - protein, 90 aa, Zea mays
  unsure (1)..(90): unsure at all Xaa locations
  Clone ID: MRT4577_19308C.1.pep
MQSYAMERGRLFNDDIEXMLHDADXYDEEDFDHKNKVESINSLENYAYNMRNTIKDEKIASKLAADDKKKIEDAIDAPIIWLDSNQLAEV

SEQ ID NO: 280930 - protein, 158 aa, Zea mays
  unsure (1)..(158): unsure at all Xaa locations
  Clone ID: MRT4577_19309C.1.pep
IRDRYVAAALLNAIDLQLQDNEVPLNDISTNTLQACDSDTLPFHDTGIHDHLNDRTCNNLYYSTDAQKDNAQDEYIFVTKKTPTITNTIXLGTYTDLDQXNMADHKIQNVSKSDEIVCAKXTAPGESADYIEKNMTSNSIILPYLIQSQTHVICIQTA

SEQ ID NO: 280931 - protein, 76 aa, Zea mays
  Clone ID: MRT4577_1930C.1.pep
SVCVITCRPWNLPQKAWIEQDERMTSRGTAVKPDLYNNKAFLSKVNWDRQELKPNRNCKSRFRHINSYLPCTPMQG

SEQ ID NO: 280932 - protein, 181 aa, Zea mays
  Clone ID: MRT4577_19310C.1.pep
MASAARALGALIHRASSLSSSASALRSASLVHRNGPTGGASLFQGHVARRRISTFQPLCMGRRSCKIAGRKGAQNLKKMKRNSKIGKEIVAAIKKGGPSPSSNTALAAILEKVRELDVPKEVVERNIKRASEKGQDTYTEKIYEVYGFGGVGMVVEVLTDKITRSIADITNVGKDCGAKLA

SEQ ID NO: 280933 - protein, 74 aa, Zea mays
  unsure (1)..(74): unsure at all Xaa locations
  Clone ID: MRT4577_19311C.1.pep
GILAYIPMRCLAAHPXPDPLIGADAPTIFSCXLRIPRGNKVKYELDKKTGLIKVDRVLYSSVVDPHTRTIPDAF

SEQ ID NO: 280934 - protein, 88 aa, Zea mays
  Clone ID: MRT4577_19312C.1.pep
YQYFLTTTTYISSYSIYDSLYLFSIILTYYPKSRIISHHSLYHNYFSSLPSPTIPSHLLMSLSKLYQHNNNIPYLNLHHIPLILYSSI

SEQ ID NO: 280935 - protein, 175 aa, Zea mays
  unsure (1)..(175): unsure at all Xaa locations
  Clone ID: MRT4577_19313C.1.pep
IRVLTWFIAITALVFRPCASAETMNDGWSNRVVICHAPAXGAGSDAGACGYQCAVDQPPFSTMITAASQSIFYNDKTCGSCYXMKCTGHXSCSGSPXTENITDLWPDATXQVEPVHFELSETLLGAMTIPVQADMLRKAGRLQVQYTRAXCKCNGLDIVFMVNAXVNANYLTMXI

SEQ ID NO: 280936 - protein, 247 aa, Zea mays
  unsure (1)..(247): unsure at all Xaa locations
  Clone ID: MRT4577_19314C.1.pep
TSSRTRRRRWWRCRPSWRRGAWTARRRHRGPAPSPQGPRMPWTQTHRSSRSSRGSPACXSRSLRRXPSRRRTACRARRAGRRPACLLPWRSPRGSAPLARRGRPRRPXRRFSSSKPDLAAGSXSAVAPRREGSSPSRPPPSLGATTTRPRRASGAGARRSRARASGLVRXRGPATGGRRVKRAPAKGSRRRTRASGPPPASSILQAFARWRPARGADAGGGGAGIQRAADGGPWVSRSARGRDCPGR

SEQ ID NO: 280937 - protein, 73 aa, Zea mays
  Clone ID: MRT4577_19315C.1.pep
SDSKCNSLKTVLKIFVNSLDAQPDVLLLVYFLHDAGDKPLEEQAQAQGRFRNGQPHGHIPELNAGLYPNLYPY

SEQ ID NO: 280938 - protein, 63 aa, Zea mays
  Clone ID: MRT4577_19316C.1.pep
GAHMCPSDQGNKRVKLEGEASMASAVTVFRCTTNGVGCRRSDLYLAQQEVVLVGVCELLDLSQ

SEQ ID NO: 280939 - protein, 61 aa, Zea mays
  Clone ID: MRT4577_19317C.1.pep
DYVDFARRLVGPSIDSEAANGWTCMSWTARITLGLLPPVIAPDTIATAHLKAGDMSGVFSA

SEQ ID NO: 280940 - protein, 73 aa, Zea mays
  unsure (1)..(73): unsure at all Xaa locations
  Clone ID: MRT4577_19318C.1.pep
QGAQSTPTTPTTPVTAEVDDXLRGDGNVWRRDFQPGSNLVTKGMGANLADRTQSNSPTDYEWLYSEETSSNHR

SEQ ID NO: 280941 - protein, 80 aa, Zea mays
  unsure (1)..(80): unsure at all Xaa locations
  Clone ID: MRT4577_19319C.1.pep
FXXPIPLPXXIDKRSRDVKTPRXLQXXIWLSTKXXRSKATIXLYXTLVSTNRHALSXGAQSLVLNHQXHXAAASNPRAYL

SEQ ID NO: 280942 - protein, 129 aa, Zea mays
  unsure (1)..(129): unsure at all Xaa locations
  Clone ID: MRT4577_1931C.1.pep
TIKXFQCQSLANGSXRFGLLVGAXTFRGGWGGRDTLSAVPVVFLCPTRTXTRXISGXCXGSXRTKLXWALXXGSLGDAXVLVYWSVITXXNXSTCDSXXRNNHFPLXXTARFAAQXFTRWRAFATAPFX

SEQ ID NO: 280943 - protein, 220 aa, Zea mays
  Clone ID: MRT4577_19320C.1.pep
MRPLLRNASRELVTNKVASSLRLFTRRAGTASSPCLPCQHRLSLSGGAPRWDPRLQLTINAAETWQRRALSSSTRWREEGGKPPKPSDAIAMPPPAAPAQPQAPQPQAPSQPQPPAQPRPNVSAPPPSPEDQERLQRRLNALLEDQIAIQRAAESSVAALKESPATEASKPPPPEPEPEQPKKAESPDTIARVPDEHLPSHRERQRWSLLKRFSDMDELL

SEQ ID NO: 280944 - protein, 52 aa, Zea mays
  Clone ID: MRT4577_19321C.1.pep
ESRTKELEGVSVRAPREMASLVCENSGGNLLSVKRCLALSWVRYHPVKEPLG

SEQ ID NO: 280945 - protein, 52 aa, Zea mays
  Clone ID: MRT4577_19322C.1.pep
YPHSCNIILRVDTSTARCCIYPSPLSSPTTLYNQPNICTTHVLNIIYYLLTT

SEQ ID NO: 280946 - protein, 72 aa, Zea mays
  Clone ID: MRT4577_19323C.1.pep
FFYHLYAFTLSPLPYPLILLLLIETLLLGSSFFFTYHNFIQEASHQLILSLLVFPISLILLIHYILLPLLLL

SEQ ID NO: 280947 - protein, 112 aa, Zea mays
  unsure (1)..(112): unsure at all Xaa locations
  Clone ID: MRT4577_19324C.1.pep
GRAGLKLTADASTSCSRLISSRSGCGGEGKGRCAPRRKKIQKDQGLEPSEFXDSVGQAFFELENGNQXLXSDLTDLYINGAIHMDVAESRNAAVIHVPYRLDKAFTXIHVRI

SEQ ID NO: 280948 - protein, 247 aa, Zea mays
  Clone ID: MRT4577_19325C.1.pep
MASARRCTTMATNKLIMFVVMLVVLQRVRSDDSPCDFPAIFNFGDSYSDTGAFPALFPAVQPPYGRTFFGMPAGRQSDGRLTIDFMAQSLGLRYLNAYLDSLGSNFTQGANFASAAGTIRRVNGSLWTSGYSPISLDVQIWQFQQFINRSQFVYNNIGGVYREILPKPEHLVSKALYTFDIGANDLAMGYLDNMTTEQVEAYVPDLMERLASAIQTVYDLGGRYFWVHNTGTLGWLSYALAYPPDLA

SEQ ID NO: 280949 - protein, 57 aa, Zea mays
  Clone ID: MRT4577_19326C.1.pep
VRHGVLGVYSFSVQCVFIHVTLVAMQAICTSEHARGFHPECPDQSQFHLRSNTLSLK

SEQ ID NO: 280950 - protein, 59 aa, Zea mays
  Clone ID: MRT4577_19327C.1.pep
QRSNTTRITTREEKRVTPNLQTDGHDKDSPTSTHNPHTSAGFGLGHSQGLDGAGGNGRR

SEQ ID NO: 280951 - protein, 102 aa, Zea mays
  Clone ID: MRT4577_19328C.1.pep
DSWRLYTVYTSSDPTQQKATSSYHGLSDPLFNYTCRALSTSPKRMISADLLSVQPRCDIHTSYIYHISLDYDSFLIFDSMRLWLIQRGLPLEHQDTRGVLLL

SEQ ID NO: 280952 - protein, 76 aa, Zea mays
  Clone ID: MRT4577_19329C.1.pep
ISQNSRLAPKNKFPWRKKKPAGFNLYIMKRARLAQNVGLNCFGAKNLCPFVGYRPQTKFLPFGPPPFFPFFKTNFF

SEQ ID NO: 280953 - protein, 42 aa, Zea mays
  Clone ID: MRT4577_1932C.1.pep
TYPLAMDPAFVSRSVWLLPSTRVASRVGYFMVYTPPFWLSRV

SEQ ID NO: 280954 - protein, 157 aa, Zea mays
  unsure (1)..(157): unsure at all Xaa locations
  Clone ID: MRT4577_19330C.1.pep
RLSSTSRGVFWLVWDLNEAYTTRKSIVLGCNSCLVQWNGHTLLLQTESLAQAQEAKDASQSISFLYRAIQDPSSSADALRTKQVAITNLTNYLTKENRAEELSSLLTQLRPYFAVIPKAKTAQIVRGIIDAVVKIPGTSHLQISLCSEMVXWTRAEK

SEQ ID NO: 280955 - protein, 217 aa, Zea mays
  Clone ID: MRT4577_19331C.1.pep
MASETDEKAKMESLTSAAAFVEGGIQDACNICLEACCESDPSVGILKDQPKWMDQHMSHQNPPPNPIGIQSNTVDLDAEDSVPSSFTSKRPLGHDSSKEKAKKQRSVDTSSTFSEYLRWMGEISLERLSVFKLVASIEERKLESMNKNERQKLILERKKLNLEKLRMDRQKLKEDKEEEVMILGMDLSKCNPLLRQCYEAKQQEILARVIGNSSSSK

SEQ ID NO: 280956 - protein, 72 aa, Zea mays
  Clone ID: MRT4577_19332C.1.pep
FYVLLKILKFIMLRRGGTCQKYGLHWLGGCALGRSTKGSQRKVKENIYYGCNILYWIRFFQTSRRNSRVMGV

SEQ ID NO: 280957 - protein, 156 aa, Zea mays
  Clone ID: MRT4577_19333C.1.pep
LDTDWVGWWILVTHVLIHPFWLICRRVTLTEGLKANVACILNATLHKGCSRCQTLHLSFLISFRCHCNGITAFEFPRPENQIHTAPNQLTATRTTTLKSPRTGKHGTYHTGLNHQAPPAIRSNPDPARIRCVRRGGHKTLALSLPPHSLSLSPCAQ

SEQ ID NO: 280958 - protein, 98 aa, Zea mays
  Clone ID: MRT4577_19334C.1.pep
MASETDEKAKMASLTSAAAFVEGACNICLEAFCETDSSTEASTDQPKWMEQHMSHQTPPPNPIGIQPNTVDLDAEDSVPLSFTSKRPLGHDAFLRRGR

SEQ ID NO: 280959 - protein, 143 aa, Zea mays
  Clone ID: MRT4577_19335C.1.pep
NISTNKMTTYCRRVTLTEGLKANVACILNATLHKGCSRCQTLHLSFLISFRCHCNGITAFEFPRPENQIHTAPNQLTATRTTTLKSPRTSKHGTYHTGLNHQAPPAIRSNPDPARIRCVRRGGHKTLALSLPPHSLSLSSCAL

SEQ ID NO: 280960 - protein, 138 aa, Zea mays
  Clone ID: MRT4577_19336C.1.pep
ERVITHGDGKYAPKTARGKKKKKIFGNKTHTIFVRAPPPEGGPRYPGGRNNLLGGLPHAGRTAPTTRQTPSRSAGSYWGGRHKESPNGGGSRPTNQSGPGKTKKSSPAQSNPKRLITKNKGRGAGKNPTVCKKKKHPP

SEQ ID NO: 280961 - protein, 103 aa, Zea mays
  unsure (1)..(103): unsure at all Xaa locations
  Clone ID: MRT4577_19337C.1.pep
RGHTRQIEATRNGPVQLHKGKAALDADDDYEAEPPKEKAKPTGADMAKLKDMKRQEEIEKNKLALERKKRHAEXHATKAVARAQKEAEKKLKKEEKKAQKKSG

SEQ ID NO: 280962 - protein, 72 aa, Zea mays
  Clone ID: MRT4577_19338C.1.pep
AVCRTRHLKAAFNVPCLYRPILLNGRFKLNFGCFGPWILTSSVVPHNDGDTEVHFLEHFLRAIISIDSIVLH

SEQ ID NO: 280963 - protein, 86 aa, Zea mays
  Clone ID: MRT4577_19339C.1.pep
GRLGSSRPAGLLSSLDAAASPQPQNCRRPSSRRSSSATPGSHRPATTEPSSRHHSAAAAEPFSVERIIFYVFYPYFRWPLFNCRRS

SEQ ID NO: 280964 - protein, 366 aa, Zea mays
  Clone ID: MRT4577_1933C.1.pep
PAVVRGFSHSLSSSSHEDSLPPPSSPPPPQQQPCPRRLLLLHSSATPCRGLLPPPSSCFATFSRASSPLRPRHRIRLVCAAEQPNGAASPGSGSGGDATANPTNNGLPKNRRVILLEYVKNVQPEFMELFIKRAPAQVVEAMRQTVTNMMGTLPPQFFAVTVSTVAENLAQLMYSVLMTGYMFRNAQYRLELQQSLEQIALPEPKEEKDYAPGTQKKVTGEVIRWNKATGPEKIDAVKYIELLEAEIDELSRQVARKTSQGSNELLEYLKSLEPQNLKELTSTAGEDVVFAMNAFIKRLLAVSDSEQMKTAVSETSASQLANLLFWLMIVGYSMRNIEVRLDMERVLGAPPKVAELPPPPSGGENI

SEQ ID NO: 280965 - protein, 82 aa, Zea mays
  Clone ID: MRT4577_19340C.1.pep
PKSPASGGFPWGGPPPPPLIAPRLTFRWTHSGGSSLFERQGTWPSPTSICFCNKNFLATFVSCIKLAHNKKVVHAPPSVPFV

SEQ ID NO: 280966 - protein, 82 aa, Zea mays
  Clone ID: MRT4577_19341C.1.pep
DEFKVRLDAALTKIPERSDADSAEAKEGVKATWMADGTQWPGTWFDPAENHKKGQHAGIVKVMLNHPGDEPRFGGPASAETP

SEQ ID NO: 280967 - protein, 55 aa, Zea mays
  Clone ID: MRT4577_19342C.1.pep
KSIYFRASKYLKISVSKRGHHKGNTGFRGLSSSGVRQFFLLPPLNSSLCSNTEDG

SEQ ID NO: 280968 - protein, 168 aa, Zea mays
  Clone ID: MRT4577_19343C.1.pep
MHHSPPGLPSLAVHFFLHHSHLISGVILFVLASLVVVGWVLASWEYRPRGGAAMKIQCDACEGAAATVVCCADEAALCARCDVEIHAANKLASKHQRLPLEALSAKLPRCDVCQEKAAFIFCVEDRALFCRDCDEPIHVPGTLSGNQQRYLATGIRVAFAIASGCSDA

SEQ ID NO: 280969 - protein, 51 aa, Zea mays
  Clone ID: MRT4577_19344C.1.pep
RPDNMRVQGIRESSALMMRDSSSHEYDLYDAAPDELVSSLECVCWTQRVLE

SEQ ID NO: 280970 - protein, 90 aa, Zea mays
  Clone ID: MRT4577_19345C.1.pep
NNYWGRVLTFFFFYPKRNNLTTTFEKGKSGLGGPNPKHSRAESKFPGGGFFLGPPRGLLETPTGSQKGPLISGKLWPPGPWPPLGGGAPS

SEQ ID NO: 280971 - protein, 98 aa, Zea mays
  Clone ID: MRT4577_19346C.1.pep
SIHRSPNKELTKPATGDSLPEPSTDSSPTAAEFFGNRRLDSTKIDQYTKMIQSFWRHVLNLWEALPCFHGPHACFFFSIPSIKVLGFSTTECSLNVDP

SEQ ID NO: 280972 - protein, 183 aa, Zea mays
  unsure (1)..(183): unsure at all Xaa locations
  Clone ID: MRT4577_19347C.1.pep
PRVRTSSSTTVIRGVILFDLASVSACSDGWETHEXQHHGPPKATIEPPHAAVSAAVQQVPSPPQFLPQGWAVDELLQFSDYESSDKLHKEPTLGFKELEWFADIDLFHEQAPKASRTLAEVPELFGYQAPNDAAYYRPPRAAXAAAARGFRXSKKARIEVTDDEDYLIVVDLGRRRRGLLHRS

SEQ ID NO: 280973 - protein, 258 aa, Zea mays
  Clone ID: MRT4577_19348C.1.pep
MKIQCDACEGAAATVVCCADEAALCARCDVEIHAANKLASKHQRLPLEALSAKLPRCDVCQEKAAFIFCVEDRALFCQDCDEPIHVPGTLSGNHQRYLATGIRVGLASASACSDACDAHDSDHHAPPKATIEPPHAAVSAAVQQVPSPPQFLPQGWAVDELLQFSDYESSDKLHKEPTLGFKELEWFADIDLFHEQAPKASRTLAEVPELFGYQAANDAAYYRPAKAAAGGGAGVRQSKKARIEVTDDEDYLIVPDLG

SEQ ID NO: 280974 - protein, 327 aa, Zea mays
  unsure (1)..(327): unsure at all Xaa locations
  Clone ID: MRT4577_19349C.1.pep
MKIQCDACEGAAATVVCCADEAALCARCDVEIHAANKLASKHQRLPLEALSAKLPRCDVCQXVRRHALASIXNQRMRRRHAQMRYTHDVRRKQANLASRSQEKAAFIFCVEDRALFCQDCDEPIHVPGTLSGNHQRYLATGIRVGLASASACSDACDAHDSDHHAPPKATIEPPHAAVSAAVQQVPSPPQFLPQGWAVDELLQFSDYESSDKXDDSASSGPCPRAPTGSRLTFLLCLMXLQLHKEPTLGFKELEWFADIDLFHEQAPKASRTLAEVPELFGYQAANDAAYYRPAKAAGGGGAGVRQSKKARIEVTDDEDYLIVPDLG

SEQ ID NO: 280975 - protein, 114 aa, Zea mays
  unsure (1)..(114): unsure at all Xaa locations
  Clone ID: MRT4577_1934C.1.pep
EIDELSRQVARKTSQGSNELLEYLKSLEPQNLKXYTCRLLHPYEDSRGFDETCAGGWQCEADKGKLLQELTSTAGEDVVFAMNAFIKRLLAVSDSEQMKVRVREWYAWQCFCLI

SEQ ID NO: 280976 - protein, 51 aa, Zea mays
  Clone ID: MRT4577_19350C.1.pep
HEVGKILTSCIFFLVRTHAKKKNEGQHTLTSGVFVQQGFPVKHLKLTLVGG

SEQ ID NO: 280977 - protein, 41 aa, Zea mays
  Clone ID: MRT4577_19351C.1.pep
DAWEKKKKKKLKKKKKKKKKKKKKKKKKKKKGGPFKKTKFN

SEQ ID NO: 280978 - protein, 114 aa, Zea mays
  Clone ID: MRT4577_19352C.1.pep
TCASTAELVSHKANLALYGMIHGNSKCTEHKDITATVMNYWHDDCDMAHVAYETEDTKDSCAYCAYEKKPHLYENCNNYCTRSCLLKPRRLKSMNHACMSACMRPPRRATQLTF

SEQ ID NO: 280979 - protein, 88 aa, Zea mays
  Clone ID: MRT4577_19353C.1.pep
AHLPLLCMLRATATPHHTLLICSYSLPCFTRTFTQRAPTRCENALLTPYMSTAYRLQLAFDLERPTTLQQSRCTITSLTLRSIHSIKT

SEQ ID NO: 280980 - protein, 83 aa, Zea mays
  unsure (1)..(83): unsure at all Xaa locations
  Clone ID: MRT4577_19354C.1.pep
CACSGASPAPPPGCCWCGGSCPSVAVLSVRRGVGFCLGLVSCALCLLCSAPSAPVLSAVRALSPLVVSSLIALFGFVXVLLFP

SEQ ID NO: 280981 - protein, 75 aa, Zea mays
  Clone ID: MRT4577_19355C.1.pep
TPLKIKPHIYSCNHRHPENSSLLIASEVYNKMHAESAACINIHGKSAVQNCPKQVPSREEGGRELSYAGRTRGDR

SEQ ID NO: 280982 - protein, 75 aa, Zea mays
  Clone ID: MRT4577_19356C.1.pep
PSDTKNFFFYPLPGKKQNILCMLFYLLMPAIGYSLASNWGAERGFLQGNHSVAHSGIPGVGGTGLAKPTIKVMPG

SEQ ID NO: 280983 - protein, 51 aa, Zea mays
  Clone ID: MRT4577_19357C.1.pep
FIPYSFYTSNFQFYYTFNYLQYITLFTLYTYINNLINFIIFIYTFTLPLYY

SEQ ID NO: 280984 - protein, 123 aa, Zea mays
  Clone ID: MRT4577_19358C.1.pep
SVSHLVPSLPQSSSTYGGEGLRRRLRSIAAHAPTLHCVHPHSPGSIGHRLHPHSPRLHRLHPHSLRHLVTPLHRRDVSAADPEPVTRSAATKERGWQKGKLALRATSDVLIGCTGLFICRTKD

SEQ ID NO: 280985 - protein, 167 aa, Zea mays
  unsure (1)..(167): unsure at all Xaa locations
  Clone ID: MRT4577_19359C.1.pep
MDWSAVTAEDLVDALREVDWSTPPRTVSEFFSRFTVPRSYSKWTSRLKCNLYYYRTNYFILIMFILGMGFLWKPVAILAAFMTGLSIAFLNDSFAVTFNEKVTRTVRQFSPHLAAKMRPPITVFVIFFSAVSCILWLTSCSLLTVLWALLIALXLQLCSMQASEHQI

SEQ ID NO: 280986 - protein, 96 aa, Zea mays
  Clone ID: MRT4577_1935C.1.pep
QRRVLFFFFFSFFFSFFFFFFFFFLGGNLCIFLRQYNEGVTMFEEKKKKGTYYAGGGINRGSITHYHGPKNGEGLKGQEQNWDNNRGGKKKREGVG

SEQ ID NO: 280987 - protein, 227 aa, Zea mays
  unsure (1)..(227): unsure at all Xaa locations
  Clone ID: MRT4577_19360C.1.pep
PTQPSRPDAPPTVLPPPRPRRRTLPRVPQGRGSPEMDWSAVTAEDLVDALREVDWSMPPRPVPEFFSRFTVPRSYSKWTSRLKCNLYYYRTNYFILIMFILGMGFLWKPVAIVAAFMTGLSIAFLNDSFAVTFNEKVTRTVRQFSPHLAAKLRPPITPVLRGRPSSKRSIHICGRPRWVFVLFFSAVSCILWLTSCSLLTVLWALLIALXLQLCSMQASEHQISKHV

SEQ ID NO: 280988 - protein, 123 aa, Zea mays
  Clone ID: MRT4577_19361C.1.pep
KWTGTRPGAEDLDRPEERAPGPDGLAAEDALSGNHQGHVTGMTAAAVSRECPAGRRRAWPGRGGKTEKEELLAVVLVCVCCCQWQPRRRCRSFITWVWCCASSSERWKLYFSGLIRTLQTLLS

SEQ ID NO: 280989 - protein, 215 aa, Zea mays
  unsure (1)..(215): unsure at all Xaa locations
  Clone ID: MRT4577_19362C.1.pep
MDWSAVTAEDLVDALREVDWSTPPRTVSEFFSRFTVPRSYSKWTSRLKCNLYYYRTNYFILIMFTLGMGFLWKPVAILAAFMTGLSIAFLNDSFAVTFNEKVTRTIRQFSPHLAAKMRPPITXILVSDVSXSLNFIVDXQSDANIIFIRPVLRGRPNSKRSIHICGRPRRVFVIFFSAVSCILWLTSCSLLTVLWALLIALXLQLCSMQASEHQI

SEQ ID NO: 280990 - protein, 77 aa, Zea mays
  Clone ID: MRT4577_19363C.1.pep
GSSPSDVILLSDAREQMLNALLPGPEPLFSLHPKGLLYEWSIWRGASVSLLIVIWGFTPFLFLRRTRRRVSCVFPPL

SEQ ID NO: 280991 - protein, 98 aa, Zea mays
  unsure (1)..(98): unsure at all Xaa locations
  Clone ID: MRT4577_19364C.1.pep
TTKELGTVMRSLGQNPTDAGLQDMINEVDAHCNGTIDLPEFLNLMARKMKDTDSXEELKEAFTAFDTDQNRLISAAELRHVMTNLCQKLTLEEVHEMI

SEQ ID NO: 280992 - protein, 67 aa, Zea mays
  Clone ID: MRT4577_19365C.1.pep
HDVMTALCVHTCWKFDSFIYPVCGQRKLVVSLYSLKLNLGPCGFYGQSPRNLCCATVNAPTVSKCTQ

SEQ ID NO: 280993 - protein, 45 aa, Zea mays
  Clone ID: MRT4577_19366C.1.pep
TKTVFFPLKINCLFPQKKKKKKKKKKKKKKKKKKKKKKKKKKKKK

SEQ ID NO: 280994 - protein, 73 aa, Zea mays
  Clone ID: MRT4577_19367C.1.pep
MKVRLILQQILKCNINPDILKSISEFKYFEAQHRMRSSFDPNHRWSDWQNVHISCLKCLNENIQIYCHFFLSH

SEQ ID NO: 280995 - protein, 97 aa, Zea mays
  unsure (1)..(97): unsure at all Xaa locations
  Clone ID: MRT4577_19368C.1.pep
QELVPEMGWCGGRKDMCVSSPPPRKGSKGSQQKVGPPLPRSCDQVVQVPPHVPLKGPFPKLSSGAFLRVVLEQKGEVQPLGGRMCFSPPPPPEPXXD

SEQ ID NO: 280996 - protein, 220 aa, Zea mays
  unsure (1)..(220): unsure at all Xaa locations
  Clone ID: MRT4577_19369C.1.pep
MATTTTAARNNGEGEQKRWREKGGFKTMPFILGNDICDRFATAGFGANMITYLTQQLHLPLVEASNLLTNFGGTSSLTPILGALAADSFAGRFGTIVAGSVFYQLGMLGLVVSALLPSLRPAPCPGAPASCQRASGWQLAALYLSLLCTSVGSGGLRPCVVAFGTDQFDREPXEQQVTAEAAXEVAERKRRYFNLYFFTMGXAXLLALTVXVVYIQDNVG

SEQ ID NO: 280997 - protein, 151 aa, Zea mays
  Clone ID: MRT4577_1936C.1.pep
MDCSSDESSELSETDIDDYADKSYSDLKSGKFVARLGSDRFRCPFCPGKKKQDYRYSELLQHAVGVGASNRAAKVKANHQALAKLLKEDHADAAATLPAWQAIALSNAPKPAQDQEAFVWPWTGVLANVPAGQAQEGGATLMEQLAEFKPV

SEQ ID NO: 280998 - protein, 223 aa, Zea mays
  unsure (1)..(223): unsure at all Xaa locations
  Clone ID: MRT4577_19370C.1.pep
MASAPHDDAAKGRNAAPPEKRTSATITEADIRVEFAHHDGTVARVNNGTFGCCPASVLAARARWQRLFLSQPDAFYFDSLQPGLARSRAAVASAVGAGDASEVSLVDNATTAAAIIMQHVAWSFAEGAFARGDVVLMLHYTYSSVKKSIHAYVVRAGATXVVEVPLPFPFASAXAVVAEFRAALALAQAGGRSVRLAVIDHITSMPSVLLPVKELVAICREEG

SEQ ID NO: 280999 - protein, 42 aa, Zea mays
  Clone ID: MRT4577_19371C.1.pep
SVQPLASPNKQGALWSTCGLRSSRPTVRRGTRNSILGREGRS

SEQ ID NO: 281000 - protein, 49 aa, Zea mays
  Clone ID: MRT4577_19372C.1.pep
PTMKIEPRRRRVRSCLYLLNTMKGDGRHAEVTGELSRRRDGTVVRVAAS

SEQ ID NO: 281001 - protein, 125 aa, Zea mays
  Clone ID: MRT4577_19373C.1.pep
GLNSLCLFSVIIILGLRHHIKLKLFGYSFVVHSYYLRATSSPCHERKPSSRSRSPPYTCDNLVVQMLTQKLGFRFLVNSPLLLPIKPFDPTLLLDISVFDDELENRSANRKRGDEALAEPITTMF

SEQ ID NO: 281002 - protein, 67 aa, Zea mays
  Clone ID: MRT4577_19374C.1.pep
YYHRIKLLEQQQRAHRKTYKERDSAFPSRGTETVLPVPCPPIGLPDTGSSKDARRSLRARAPPGHAS

SEQ ID NO: 281003 - protein, 91 aa, Zea mays
  Clone ID: MRT4577_19375C.1.pep
NSRMDPLVRPWRAQFVFVTRQPEPTLFLYTVLGQQTRSHSSSHGVSAAATSTTRGQCSACASIPCLCPWTINQTRNINIPGTRPKAARSST

SEQ ID NO: 281004 - protein, 88 aa, Zea mays
  Clone ID: MRT4577_19376C.1.pep
PSTPSFAIAVVALASLDAVLTRVHLVSLIVRSIDSLFVLSVNCSIRSAVVVERVKVLLEGHPGLLRHFNQFLPWGYIRAHGPVGRISV

SEQ ID NO: 281005 - protein, 216 aa, Zea mays
  unsure (1)..(216): unsure at all Xaa locations
  Clone ID: MRT4577_19377C.1.pep
MVLVSPCQATSPHAPRLPPPPRRLPTTRGGRSKARRRVTPAGAGGGGGASGWAXWALDPRARWVRDWNRAYLLACAAGLMVDPLFLYAVSLSGPLMCIFVDGWLAAAVTALRCGVDAMHVWNVATQLRTAKAPPGKRVAGDEEXAADRRRGRAQALRGRXASRRGLLLDFFVILPVMQVXXVWVAAPAMIRAGLTTPVMTXLLVSFLLEYXPQIYH

SEQ ID NO: 281006 - protein, 76 aa, Zea mays
  Clone ID: MRT4577_19378C.1.pep
NPVEKLYAYFPKLTAQMPGCSTYGMLRIESLNLTPIGINLNKVCHTVKDLHMSKALNFVDTHVLGSHSDLLLTSMA

SEQ ID NO: 281007 - protein, 181 aa, Zea mays
  Clone ID: MRT4577_19379C.1.pep
MEAYFLFHSGRAHEFAYAEQEEDIGSPSDSEPPSTSTSRESAGSSAELDDDATSSGSGSGSDRFEMSALMTQLPPFKRGLSRFFDGKSQSFASLAAVGSLEDLPKPARKRLKPSRSCGGALDAHRGRLLSPRRHYCTKPTARTRKAAARSGTLSVLAAGAPRMPPAVARAEGVAAKVLIVS

SEQ ID NO: 281008 - protein, 204 aa, Zea mays
  Clone ID: MRT4577_1937C.1.pep
PGRWASPYSRYRHAAAYLYTAAAAPRGGFQLWPPHPAQEHHHHFYAPNIIRFVDDPAAGSSRGGRGSASGAGAGTISCQDCGNQAKKDCVHMRCRTCCKSRGFDCPTHVKSTWVPAAKRRERQQQQATGAAEPSKRHRDAATGAQPSSTTATTTSSGDWSTGQQCYICRWCKVSIKSNAEIAVEVSTIPLDEVVLDTESSSDQS

SEQ ID NO: 281009 - protein, 51 aa, Zea mays
  Clone ID: MRT4577_19380C.1.pep
IYRLVESNDISVTSYDRKVNHKYYVLHIKFAIIMILKNLADRGKTGPMVLF

SEQ ID NO: 281010 - protein, 127 aa, Zea mays
  Clone ID: MRT4577_19381C.1.pep
CLCLGCRICGGRWFPPHTCSSLLGCEFLSSSEAASLVAPHSSAPSPPPSAGLPWASEQETETSNRSRSSGGGGGGGVTGSRCREEGGGSSIISTAARGEEWQRRRGEHGAVACGWSESRGPNEKRGE

SEQ ID NO: 281011 - protein, 114 aa, Zea mays
  Clone ID: MRT4577_19382C.1.pep
CFLSAFPALHPFEPFLFLLHQACSYPVYSPVLCIHQFLPRLYVEEKIHEKVVRQRYDLVHIFFIPTPHAPLIASWFMYLTAKYTTKFLPSSCDFFYLRARAPNTLLNCRNTNTR

SEQ ID NO: 281012 - protein, 184 aa, Zea mays
  unsure (1)..(184): unsure at all Xaa locations
  Clone ID: MRT4577_19383C.1.pep
FFFFFFFFFLFFFFFFFFFFFFFSYRFLWFSSFPGPGAGPGGPPGNPGRGPAGPPPLPHKGAPQSRRGGERQEGQKGPPGGXEASPPKXNPTSPPDEKKAKNGGPKGGPKTKKRPGPAGPXKSGKPGGPRPXKKAKPGGKGPPGXRGARGELLYTGGPGKTKNPLTRGPRGERTKPAPRVGPNR

SEQ ID NO: 281013 - protein, 38 aa, Zea mays
  Clone ID: MRT4577_19384C.1.pep
PRLRAWTGQSLARHAISRGIWRRPVHFTASLILPPKDP

SEQ ID NO: 281014 - protein, 373 aa, Zea mays
  Clone ID: MRT4577_19385C.1.pep
MPSSMAKSLLLPPQFVSVSPRHPHRAGFPVLKPRRASLLAATGGDVTPAPDADSGSNTNPLVDVPRALWRRTLQPLGDYGFGKRSVWEGGVGLFMVSGAALLALALAWLRGFQLRSRFRKYNTVFEFTQACGICVGTPVRIRGVTVGSVVRVDSSLRSIDATVEVGDDKIIIPRNSVVEVNQSGLLMETLIDITPKDPLPAPSVGPLDPDCTKEGLILCDKERMKGQQGVSLDALVGIFTRLGRDMEEIGVSKSYKLAEKVASIMEEAQPLLTRIEDLAEEMQPLLSEVRDSDLLKDVETIAKGLADASVDLRRLKSSMLTPENTDLIKQSIFTLIFTLKNIESISSDISGFTGDETTRQNIKLLIKSLSRLL

SEQ ID NO: 281015 - protein, 373 aa, Zea mays
  Clone ID: MRT4577_19386C.1.pep
MPSSMAKSLLLPPQFVSVSPRHPHRAGFPVLKPRRASLLAATGGDVTPAPDADNGSNTNPLVEVPRALWRRTLQPLGDYGFGKRSVWEGGVGLFMVSGAALLALALAWLRGFQLRSRFRKYNTVFEFTQACGICVGTPVRIRGVTVGSVVRVDSSLRSVDATVEVGDDKIIIPRNSVVEVNQSGLLMETLIDITPKDPLPAPSVGPLDPDCTKEGLILCDKERMKGQQGVSLDALVGIFTRLGRDMEEIGVSKSYKLAEKVASIMEEAQPLLTRIEDLAEEMQPWLSEVRDSDLLKDVETIAKGLADASVDLRRLKSSMLTPENTDLIKQSIFTLIFTLKNIESISSDISGFTGDETTRQNIKLLIKSLSRLL

SEQ ID NO: 281016 - protein, 366 aa, Zea mays
  Clone ID: MRT4577_19387C.1.pep
MPSAMAKSLLLPHPFFSVSPRPHPHPRAGFPVLKPRRAALLAATPAPDANTSSNNNPLAALWRRTLQPLGDYGFGKRSVWEGGVGLFMVSGAALLALALAWLRGFQLRSRFRKYNTVFEFTQACGICVGTPVRIRGVTVGSVVRVDSSLRSIDATVEVEDDKIIIPRNSMVEVNQSGLLMETLIDITPKDPLPAPSVGPLDPDCTKEGLILCDKERMKGQQGVSLDALVGIFTRLGRDMGEIGVSKSYKLAEKVASIMEEAQPLLTRIEALAEEMQPLLSEVNDSDLLKDVETIAKGLADASGDLRRLKSSMLTPENTDLIKQSIFTLIFTLKNIESISSDISGFTGDETTRRNIKLLIKSLSRLL

SEQ ID NO: 281017 - protein, 82 aa, Zea mays
  Clone ID: MRT4577_19388C.1.pep
AVPPPPFAALPGPRGPLFTPPFPCSPRCSGWSSWEKFTPRPLCWFELGPLFFVGSASPFFPVVGLGSSKGPVAGAGVLRWVH

SEQ ID NO: 281018 - protein, 109 aa, Zea mays
  unsure (1)..(109): unsure at all Xaa locations
  Clone ID: MRT4577_19389C.1.pep
FXFLPHIFFSSGEGLDVYFGRVINKRTSSRRTTPTLGSKKPRPQIISPSTKGYRCNKIVAHLIPRKIPRMELISGNDACTERLVHDNGEVQRFRHFHRHAGHRGAPLQG

SEQ ID NO: 281019 - protein, 106 aa, Zea mays
  unsure (1)..(106): unsure at all Xaa locations
  Clone ID: MRT4577_1938C.1.pep
ELEGSFFXAHSMCFEASALGSAGYPMADNSTFLGNDPDDDLVLMGPDGSHLKPDSTSAALGXLNEALKDXLCGIHEDFYAGAHWAYKTDPLTGLWMPGTTYGSLSG

SEQ ID NO: 281020 - protein, 54 aa, Zea mays
  Clone ID: MRT4577_19390C.1.pep
LTVRYRERQAVAGGEDPAGGRRGERVPALVLLARRLRLRAAAHGVAVLPVDHSR

SEQ ID NO: 281021 - protein, 182 aa, Zea mays
  unsure (1)..(182): unsure at all Xaa locations
  Clone ID: MRT4577_19391C.1.pep
MEYAIRKQTHPEGDEKTAGESEDEHSAGGLSPRTPHVDTGHVSEEEDEMQEVEFASPPEGNIDEYLDAYRAEDDPLRFRKVDGLLESKTPPGYATRRLLDEELHAVSADEPVSFGEAERSPSWRKAMMEEMKSIEDNQTWTLVDLPPGRKAIGLKWVYKVKRDXQGAVSKHKARLVVKGYAQ

SEQ ID NO: 281022 - protein, 125 aa, Zea mays
  unsure (1)..(125): unsure at all Xaa locations
  Clone ID: MRT4577_19392C.1.pep
MKGPGLFSDIXKKAKXYSVQDYTYDXKLTIYTDSXCGLGLTPTAVKKGRLYSLDEAXSNKTRNQXVDVKGDTESKIYTTXTGWDALPCAKLGTSVKLTDYNCGRAELDTCHENASLVTGVGTKPS

SEQ ID NO: 281023 - protein, 119 aa, Zea mays
  Clone ID: MRT4577_19393C.1.pep
ETYIQIHTGTTDLEPSSLTLDDADRRGRPRVRQTATADRSQLSTSQVSLRHALLCLGPFASTAPSRRPGSGRGPDDHRRPTRLLQSLGSGDKHTRLLSDGTFISSFSCGSETEERKRRD

SEQ ID NO: 281024 - protein, 76 aa, Zea mays
  Clone ID: MRT4577_19394C.1.pep
SLDLLPCSSPSKSFLPLSLVQPIVSKSCTLVFTWQCPSFNITCDIYNPYLTQLIWIGTRITCVELYKLFTKFLFNT

SEQ ID NO: 281025 - protein, 67 aa, Zea mays
  Clone ID: MRT4577_19395C.1.pep
RSLSARANSAASSRLKSSFSGSRLPSGTRSTTPSSVAVATPDAGGCPIRASISSSPNPAYNLTSFRF

SEQ ID NO: 281026 - protein, 66 aa, Zea mays
  Clone ID: MRT4577_19396C.1.pep
WSLSFSFGRALQASTLKACAGMVENFYKARAVFLILCTANSEATLDTYKGDAIADTDSLHVIDYKY

SEQ ID NO: 281027 - protein, 101 aa, Zea mays
  unsure (1)..(101): unsure at all Xaa locations
  Clone ID: MRT4577_19397C.1.pep
GTRXGXYKXLIXNGVQXXLRRCWXSXCSRSPXXRSLSRGRRRNRSATRASPARHPRPAXXPXLPSAXRHPXXPVXIXSVPLAPVRXRQWPCGGXLPSIPIV

SEQ ID NO: 281028 - protein, 125 aa, Zea mays
  Clone ID: MRT4577_19398C.1.pep
DQLLELREIVDVFEEILRVNQEIGVKFHGEDQNWVLNDKTVQGLAQAQTQAHYPYAETDRRDWSAPSRQLTPTYEEKSWDNIMEANEAYASRDRQHEQAYRQYQLNSHFASKAQVGPTCALIKAE

SEQ ID NO: 281029 - protein, 65 aa, Zea mays
  Clone ID: MRT4577_19399C.1.pep
ALNSDHHLYPRSFTYFNTSKRFGLNTHFRHLFGSALKQIGSEDLPDHGCGLKIAALGFRQLGQHG

SEQ ID NO: 281030 - protein, 58 aa, Zea mays
  Clone ID: MRT4577_1939C.1.pep
SYLPLPPNGPASFFLFQHTPPPPLSSASFIPPYPLCQRTGPPDIFNHHINMKPNSNAN

SEQ ID NO: 281031 - protein, 225 aa, Zea mays
  unsure (1)..(225): unsure at all Xaa locations
  Clone ID: MRT4577_193C.1.pep
SRPAGPGIDCAYISSPPTRLPPRVIAFSLLADYFRRPWLPPVGRRHRTAQRYPIHIXQASMHRPNARWELYCLDHAILADADMRADESIGECEDAVNTFFSETGAGKHVPRAALVDLEPTVIYEVRTATYRQLFHPEQLIRGKEDAANNFARGHYTIGKEIVDLXLDRIKKLDDNCTGLQGFLGFNDVGGGTGSGLDSLLLERLSVDYGKKSKLELTVYPSPQDA

SEQ ID NO: 281032 - protein, 142 aa, Zea mays
  unsure (1)..(142): unsure at all Xaa locations
  Clone ID: MRT4577_19400C.1.pep
NPNPXXXXQGGGKKHQXPPRGKTQNKXGQXRNSTQRPTDHAGRSKGQREPGTNTAQTTDTERPGKQKHRGATTNETNEEKPPGPGKTTRERTGKPGRAGPTAQDPQSPREXPKPPPRRPPPEPAPPPPEPPPPPKPGAPPTE

SEQ ID NO: 281033 - protein, 102 aa, Zea mays
  unsure (1)..(102): unsure at all Xaa locations
  Clone ID: MRT4577_19401C.1.pep
MAAGIFSILMLLALSACVANATIFPQYSQAPIAALLSSYLSSMTASVCENPVLQPYRLQQAIASSNISLSPLLXNKSPALFLVHSFGTNHLGTTNLLFWASV

SEQ ID NO: 281034 - protein, 252 aa, Zea mays
  unsure (1)..(252): unsure at all Xaa locations
  Clone ID: MRT4577_19402C.1.pep
GREQVLTLLXQDTWFVKMSKCKFSQCKISYLGHVISEEGXATDEAKVEAVLSWPIPNNAKDLRSFLGLAGYYRKFVKHFAIIARPLHNLLKKGALFVWTQDHQLAFSTLKQALISAPALALPNFAKPFCLETDACKNGVGAVLMQEGHPLAFLSKPLGTKTQGLSTYEKEYLAILMAVDQWRHYLLHAEFIIFTDQKSLIHLSDQRLNTPWQQKVFTXLLGMQYKIVYKQGSDNRVADALSRRAHDIPTVLA

SEQ ID NO: 281035 - protein, 42 aa, Zea mays
  Clone ID: MRT4577_19403C.1.pep
ADYESGRAIPNNQVLGKIERAIGLKLRGKDIGKPIEKGPRAK

SEQ ID NO: 281036 - protein, 134 aa, Zea mays
  Clone ID: MRT4577_19404C.1.pep
ATTGCDSGAAASSPKGAGSERQTRGDEERKRPRTKRGANNEASEKSKNGHTQTKTKKAKKSNAGGPAKDEEDERNPETTKNQGTRRRNQSRRGFFYTPEEEGETTLNGAAKETNKEKASRHRVRPASRESTKTA

SEQ ID NO: 281037 - protein, 92 aa, Zea mays
  unsure (1)..(92): unsure at all Xaa locations
  Clone ID: MRT4577_19405C.1.pep
TFDLSLQCTEFSPNAPPSVRFVYRMFHPIFYGDESICLYILHIQWSPIYNVXAILTSIQSLLCDPNPXNSPATSQPAIMFRENKREHIRKVR

SEQ ID NO: 281038 - protein, 133 aa, Zea mays
  unsure (1)..(133): unsure at all Xaa locations
  Clone ID: MRT4577_19406C.1.pep
RRGKSTKDQRRHARNHTHPSADEGDPHGHTGGGQATTQKTEHNKQTPTGNEPNXEANAGDXAAAAGPKDNXHARRQQRKXSKSPTTTQGQKKEXNNSKNPKEPKKETXSKGTADQDPEXGQDKQXQXEQNKND

SEQ ID NO: 281039 - protein, 62 aa, Zea mays
  Clone ID: MRT4577_19407C.1.pep
NGKKIHNMPSPTLGSPVKRRNVNFHGPPLGLANTINVRVGPRFSKINMGAPSSLEQKHLKRV

SEQ ID NO: 281040 - protein, 130 aa, Zea mays
  Clone ID: MRT4577_19408C.1.pep
MTLSLSTSFLPIPAAARTTARTLRSVVPSQGMRCSMRKKGLHPEIYEDAKVYCNGELVLVTGGTKPEYTVDVWSGNHPYYVGDTSALVVMDSQIEKFRKKWGHIKEYWPEDQWREMHPDGDPEFEPEGDN

SEQ ID NO: 281041 - protein, 69 aa, Zea mays
  Clone ID: MRT4577_19409C.1.pep
FYQGVRSLGLIRVMPFYMYFLFCFLAGILQFAIPPSACLVFRGEVAGFLADVGLLSFGVYFAFPWVLCQ

SEQ ID NO: 281042 - protein, 126 aa, Zea mays
  Clone ID: MRT4577_1940C.1.pep
VAVVPSTGSIVAHVCGSRRLRSRVLGLACGRGWATTRSVCVMAPAGLPPRCSRPLSSPFAAFCSFFWRVSPRLRPRMSRIWPLASLMSLLRAYRLVAASLPHLSALLPTDARRGSSSRRPHAGPVC

SEQ ID NO: 281043 - protein, 86 aa, Zea mays
  unsure (1)..(86): unsure at all Xaa locations
  Clone ID: MRT4577_19410C.1.pep
PQVSSAIEPXLLXARHTGSAPSPSCXSVRRNLARAGSTAXEKAAPTGSXKNRSKPLSGLXNASHSGSSPSKSRGSMPYIITTSTYC

SEQ ID NO: 281044 - protein, 426 aa, Zea mays
  unsure (1)..(426): unsure at all Xaa locations
  Clone ID: MRT4577_19411C.1.pep
MAQREKRGTRGATAQRLANRAREAEREEGSAGEETGADRSSIQFQVLADFIVDWMLGAHEEGCIIDTEAWRVFCDGSWGTFGVGAAAILISPSKIKTCYMARLEFNCINNIAEYEALLLGLRKLKAMEIRRTVLKSDSQVITGNIDKSSKARDPKLEKYLDTVRRMEASFEVQYFSKWIKAKPLVMITLAMVQKFFWQNIVCRFDVPKAITVDNGTQFDDETFKTFCDQIGTKIHFVSIRHPEYNGLVERANNFIVIGIIKSIFNLPKGKWPDELVKVVWNHNAVVSRSTRFTLFKLLFGDEAITPKEARSGSIRTLASAEDDDACKIAKYTIEGVRLQAIDRINKYQAKTVKWRXEKVRLKNIKPGHLVLRRVANPDTVGKLQLKWEGPFLIVSLSKLGSYXLKDMDGNDVLRSWNADELRQYYV

SEQ ID NO: 281045 - protein, 46 aa, Zea mays
  Clone ID: MRT4577_19412C.1.pep
FHWPFFVDKIHNSTIRRNFSARYSIFPFIMRKPRRKRGSSLELEIR

SEQ ID NO: 281046 - protein, 225 aa, Zea mays
  unsure (1)..(225): unsure at all Xaa locations
  Clone ID: MRT4577_19413C.1.pep
MSAQALNKIAPNSPSRQNPSELETSIAQALFDLESNTSDLKVALRPLQIVSAREIEVGHGKKAIVIFVPVPSLQGFHRVQQRLTRELEKKFSDRHVLILASRRILPRPKRSARSRNNQKQKRPRSRTLTAVHDAFLEDLTFPXVEIVGKRVRXKEDGSKLLKVILDEKXXGVXVDYRLDTYSEVYRRLTGRNAXFESPQSGPADLLSRCVYFRDELVVRGKNTCL

SEQ ID NO: 281047 - protein, 106 aa, Zea mays
  Clone ID: MRT4577_19414C.1.pep
RTQSQIQTPTLVREREREPRSECIYQRRPRPRLELGSSRRVSVLREVAGEALVADWGGINHCVDQNSSSVAGFRHALWVGLGALRISVSISRSDTPQLPLFGTAFG

SEQ ID NO: 281048 - protein, 143 aa, Zea mays
  unsure (1)..(143): unsure at all Xaa locations
  Clone ID: MRT4577_19415C.1.pep
PRSFXERKALIRDICCRKALDLPIEEPGRYDVDETEVYGKDHYDPEKPMYRYDYWGEPKNTEKTKLERDVERHNQQVVGDAKKWCEMSYDDYVRKKLRLEARERRRKAAEAQEGEEEYDDGMDLDLKKMTDPRAPHNRFYITK

SEQ ID NO: 281049 - protein, 661 aa, Zea mays
  Clone ID: MRT4577_19416C.1.pep
RIRHEVAASPAAAATFLHHHLPFPSRPKTLLRPRLHRLAASINPSSTDETPAADPPVIPSISIKNTEPEEVARRRSWVEHGWAPWEEIMTPEVAFARHSLNEGEEVPLQSPESLEAFRMLTPSYRKKVEAEPGYLERLFATRDTPEPLETTWAGRLPLRLVPPRDWPPPGWEVDPDELEFIREAHRAASERLDMEAAAAAGVTNVEKLEDAPQDLALERYKMFLKQYKEWVEANRDRLEQESYQFDQDYFPGRRKRGKDYSEDMRELPFYYPGQICYGQVTTVHLYQGAFVNIGCVHEGWVPIKGNDWYWIRHHIKPGMKVYVEILAKRDPYRFRFPLEMRFVYPNIDHLIFNRFDFPPIFHRKEDTNLEQLWREAGRPPIPRKKPLKDMEKEPLVSDHPFVDTLWEWHNAEQMILDYEEQNPDKFKDTTYESTVDAPSIDEEKRVEYTEGYFKETLLKKKVVNISIKELDLDAARAERQLIKRLKKEAEERGEEYKVRKLRRNKEMDEYDLMQWRRSFEEREALIRDICCRKALDLPIEEPGRYDVDETEVYGKDHYDPEKPMYRYDYWGEPKNTEKTKLERDVERHNQQVVGDAKKWCEMSYDDYVRKKLRLEAAEARERRRKAAEAQEDEQEYDDGMDLDLKKMTDPRAPHNRFYITK

SEQ ID NO: 281050 - protein, 100 aa, Zea mays
  Clone ID: MRT4577_19417C.1.pep
KPAIHHRCRTFFLQHAKAHGIITVVGLIIAIKHESTFIKEKVKREGLKLSLRKKRSLHVRGTQMGKKGEVHTRLFESLINFSWNVSLYVSTSVFDLEIGN

SEQ ID NO: 281051 - protein, 39 aa, Zea mays
  Clone ID: MRT4577_19418C.1.pep
GRGLMYFKHESPFKSGIREFIHVPMGVRGGFLCKRGFLW

SEQ ID NO: 281052 - protein, 75 aa, Zea mays
  Clone ID: MRT4577_19419C.1.pep
AQETASAGHCFFNPEEGLINTDTTLPSVKNIHSCQMHAIGTPTNIHTVDTCPKIALPWHQCTTVKPLSRKKNSQK

SEQ ID NO: 281053 - protein, 104 aa, Zea mays
  Clone ID: MRT4577_1941C.1.pep
HASVSQTIAYLLQSAEDPTTQRGARASSLALWSALTIHGGGCTTARYLPRGHCTSVTAPRAFHAVTARGHCTAARPRGYCAHHPLLLTAASYPATMPAQRSTRH

SEQ ID NO: 281054 - protein, 75 aa, Zea mays
  Clone ID: MRT4577_19420C.1.pep
VLTGLPATFVCCGSRCERDVSYRLVLPLVLSNLLGPIGCAFPSYSYSISARPPPLIYELEEKKKKNPPAGGAPYP

SEQ ID NO: 281055 - protein, 65 aa, Zea mays
  Clone ID: MRT4577_19421C.1.pep
ALPPAEFNFGTLTSLCTPTAPQLSLGFPVNSTQSGYGPFLSRRTPSFRCPESEWQMVSNKNTQRD

SEQ ID NO: 281056 - protein, 40 aa, Zea mays
  Clone ID: MRT4577_19422C.1.pep
SMASLTRMRLPSLRSSLLASSSVRRGGEVRGLSGNSRLEL

SEQ ID NO: 281057 - protein, 101 aa, Zea mays
  Clone ID: MRT4577_19423C.1.pep
QAQGPLGLGRTPVQGLQPPHVVMEGGLYSSAHRLQSLPSTLCQSHQGFSGGMPGRRIGLWAFWIGSALCGGLIYFGSRQGHLLLLEGHQGLLMGTASFVCD

SEQ ID NO: 281058 - protein, 216 aa, Zea mays
  Clone ID: MRT4577_19424C.1.pep
LGGGSPSGVLFVCTHRTLMDPVVLAAVLGRRVAAVTYSISRLSEVLSPIPTVRLTRDRDADAARMRAELARGGDVAVCPEGTTCREPFLLRFSKLFAELSDSIVPVAMNYRVGLFHPTTARGWKAMDPIFFFMNPRPVYEVTFLNQLPAESTCAAGKSPVDVANYVQRILAATLGFECTTLTRKDKYTVLAGNDGVVNAKPAWQSRVKDVLGFLLH

SEQ ID NO: 281059 - protein, 118 aa, Zea mays
  unsure (1)..(118): unsure at all Xaa locations
  Clone ID: MRT4577_19425C.1.pep
GCHGNLPLPKGIKPLNQVCQVGAPPPXRPPQTRVPGGHPRPQKQARPRXRPPRRPRPPCPPLRPRPAARPRAATTARARPRPRARPSPPXPPCPRPGCPRPPYLRSRWWGFCRRYGDA

SEQ ID NO: 281060 - protein, 41 aa, Zea mays
  Clone ID: MRT4577_19426C.1.pep
RTRGQIFGLFLPVLNESCRLLECSMRLTFKFQGLIEVEINT

SEQ ID NO: 281061 - protein, 83 aa, Zea mays
  Clone ID: MRT4577_19427C.1.pep
GGGLFFFFSPGSGPPPPCPRPGVFAPFFGPPLLTLSAHPPGLWPFGYFPPTGGLNKKKKKKKKKKKKKKKKKKKKKKKKKKKK

SEQ ID NO: 281062 - protein, 80 aa, Zea mays
  unsure (1)..(80): unsure at all Xaa locations
  Clone ID: MRT4577_19428C.1.pep
SEASEQGVVIACHSNAEFDAHMTKAQEAGKRVVIDFTAAXCSRCRAIVPTLRRXTNKFTQVDVVKVDVDEVEEFIAAYDV

SEQ ID NO: 281063 - protein, 91 aa, Zea mays
  unsure (1)..(91): unsure at all Xaa locations
  Clone ID: MRT4577_19429C.1.pep
MGGASVVMASIVAITRADPILQSMQKFILDSFAIRTDCGLRPVASSNGLLRYNTGAXLTILGGRVARLISIHEYNRRXSGRNYSARTLYSD

SEQ ID NO: 281064 - protein, 64 aa, Zea mays
  Clone ID: MRT4577_1942C.1.pep
TLKLNFPPCANYIEFLHMTQVRTCHPNFAFFPFFRFSINFLQCRELKHCDRICNTALVPGEGQY

SEQ ID NO: 281065 - protein, 119 aa, Zea mays
  unsure (1)..(119): unsure at all Xaa locations
  Clone ID: MRT4577_19430C.1.pep
PAPRVTVPNIGRRSIMGDXRLGVTDHPDTVIXASCDDLHRPSGPRDSPRXNITRRDPCGPGHGDQHXCSLGPVQWMRRTSLDINRQGTARLRRRANGRPHQGIMRTLPPCLNRLQESTL

SEQ ID NO: 281066 - protein, 84 aa, Zea mays
  Clone ID: MRT4577_19431C.1.pep
NNITFSTLTKPFYRPKSLTEKKLYFPHKFGLNQPQIKGGEGVRSPLYLLFFRGVPKFVFNRPNLFRVTEGVFVHNLPKIGGGGG

SEQ ID NO: 281067 - protein, 71 aa, Zea mays
  Clone ID: MRT4577_19432C.1.pep
CYICLHYYSIKKIQLPIIHISKSQKYLPSIKSYFTFTFLLYHNYSIISPKFNSLSLFLQPFYFKKTFLYPT

SEQ ID NO: 281068 - protein, 56 aa, Zea mays
  Clone ID: MRT4577_19433C.1.pep
PEKLWGFKQEKTLIFNFSPPPKTPKKEPFFKKWARKFGWVFISGLPGNILNWRTWY

SEQ ID NO: 281069 - protein, 60 aa, Zea mays
  Clone ID: MRT4577_19434C.1.pep
GARVRPGALLGLVNRLGPPPWRAGLFLGDPISPGPHDDGDGLLLRPRVPPSRIRPIKVFP

SEQ ID NO: 281070 - protein, 248 aa, Zea mays
  unsure (1)..(248): unsure at all Xaa locations
  Clone ID: MRT4577_19435C.1.pep
LQRLAQILADALARRLLLPCEGLAGALXSTRPTTSSAPAAXSARRSFAALSPFLHAXSFAATNRAILGAMEDEKVVRIVDLSCCSAASHPCQWLDLLHGFXPRPAXPPEVRLTVVHDDDDFVAAMRAALAKEAHRLNIPFQFNHVLVVRGGGLETMDLRGDFRDVLGVKYGEAVAVSCCLQMHRLLAVAADDDSASSSSALGQLQNMATTAAAQLKQMACSSRSPASILNYPRTPAPQCQCQDADHNA

SEQ ID NO: 281071 - protein, 84 aa, Zea mays
  Clone ID: MRT4577_19436C.1.pep
SIAAAVEDAVLVVHGAINSIAVHTVITCSYVREISPDVTDQQKQIRKWCRACLLSHSLGPLHPLPLQEADRALSESLQRAQAGG

SEQ ID NO: 281072 - protein, 931 aa, Zea mays
  Clone ID: MRT4577_19437C.1.pep
MEAEAAAAVVASSASASASAGRSRPSSSAAQVTSNSAVRAGEENAASLYVLSVIDSLKKRITADRLTYIKNRIGENKTNISSYTQRTYNLSKNRQISTSKGTDSASNLLTKRQDDALCTLHSLDIIPVDKDGGTFQDESPFSSSNVMFGGNLGPKNAIIRPIKLPEVPKLPPYTTWIFLDRNQRMTEDQSVLGRRRIYYDTSCGEALICSDSEDEAIEDEEEKKEFKHSEDHIIRMTVQECGMSDAVLQTLARHMERAADDIKARYEILHGEKTKDSCKKGTEHNVKVEDLYCDKDLDAALDSFDNLFCRRCLVFDCKLHGCSQDLVFPTEKQPAWSGVDDSVPCGIHCHKLASEPDAAAGADHMLFDVEEPTHSSDNVMNQPGSNRKKNGSSGRKTKSQQSESSSTARVISESSDSEVHPISNKSPQHSPSPSKVKIGPKGGIRKITNRRIAERILMSVKKGQREMASSDSNFVSGYLLARDMKLRSDTRNGNKELIVSSQQSSPSTRSSKKKSTPQIGNSSAFAEAHNDSTEEANNRHSATDGYDSSRKEEFVNENLCKQEVYLRSWKAIEQGLLVKGLEIFGRNSCLIARNLLGGMKTCKDVFQYMNYIENNSASGALSGVDSLVKGYIKGTELRTRSRYFRRRGKVRRLKYTWKSAGYNFKRITERKDQPCRQYNPCGCQSTCGKQCPCLSNGTCCEKYCGCPKICKNRFRGCHCAKSQCRSRQCPCFAADRECDPDVCRNCWVGCGDGTLGVPNQRGDNYECRNMKLLLKQQQRVLLGRSDVSGWGAFLKNSVSKHEYLGEYTGELISHKEADKRGKIYDRENSSFLFNLNNEYVLDAYRMGDKLKFANHAPDPNCYAKVIMVTGDHRVGIFAKERILAGEELFYDYRYEPDRAPAWARKPEASGAKDDGQPFNGRAKKLAQNNRG

SEQ ID NO: 281073 - protein, 82 aa, Zea mays
  Clone ID: MRT4577_19438C.1.pep
RDANIKVKTKTITMVMMMTMMMKKAIKIKQKISHLAALHMKSVPIVAYSYCFAQVYSMTELIRLNKKKKKLIKAKKKKKKAP

SEQ ID NO: 281074 - protein, 207 aa, Zea mays
  Clone ID: MRT4577_1943C.1.pep
MDACSLVHRHLPRPLQLPLLAPPTPSRHRPRVASALVCCCCPAAAADHHQERPWEWYDRAIQSHAGSDLARSLGLLADMQASGGRPSGSAYARLIRALSRAGRALEAEALLLEMRRLGPRPEAAHYNALLEGLLAAAHLRLADLLLLQMADDGVARNRRTYTLLLGAYARAGRLEDSWWVAREMRRWGILEPAGIACSCGCTRTMAC

SEQ ID NO: 281075 - protein, 84 aa, Zea mays
  Clone ID: MRT4577_19441C.1.pep
VPEKSFLGLGCSAALGVWPRRNPYPALSTHPSVPGHPSGSFLLVPGAAVVSAPCTGLCALWVFRRLDCLCSSCKPCGGSNDQEQ

SEQ ID NO: 281076 - protein, 958 aa, Zea mays
  unsure (1)..(958): unsure at all Xaa locations
  Clone ID: MRT4577_19442C.1.pep
MEAEAAAAVVASSASASASAGRSRPSSSAAQVTSNSAVRAGEENAASLYVLSVIDSLKKRITADRLTYIKNRIGENKTNISSYTQRTYNLSKNRQISTSKGTDSASNLLTKRQDDALCTLHSLDIIPVDKDGGTFQDESPFSSSNVMFGGNLGPKNAIIRPIKLPEVPKLPPYTTWIFLDRNQRMTEDQSVLGRRRIYYDTSCGEALICSDSEDEAIEDEEEKKEFKHSEDHIIRMTVQECGMSDAVLQTLARHMERAADDIKARYEILHGEKTKDSCKKGTEHNVKVEDLYCDKDLDAALDSFDNLFCRRCLVRLTVTFRYSFLGPVCXGHFCSLVMLIXFDCKLHGCSQDLVFPTEKQPAWSGVDDSVPCGIHCHKLASEPDAAAGADHMLFDVEEPTHSSDNVMNQPGSNRKKNGSSGRKTKSQQSESSSTARVISESSDSEVHPISNKSPQHSPSPSKVKIGPKGGIRKITNRRIAERILMSVKKGQREMASSDSNFVSGYLLARDMKLRSDTRNGNKELIVSSQQSSPSTRSSKKKSTPQIGNSSAFAEAHNDSTEEANNRHSATDGYDSSRKEEFVNENLCKQEVYLRSWKAIEQGLLVKGLEIFGRNSCLIARNLLGGMKTCKDVFQYMNYIENNSASGALSGVDSLVKGYIKGTELRTRSRYFRRRGKVRRLKYTWKSAGYNFKRITERKDQPCRQYNPCGCQSTCGKQCPCLSNGTCCEKYCGCPKICKNRFRGCHCAKSQCRSRQCPCFAADRECDPDVCRNCWVGCGDGTLGVPNQRGDNYECRNMKLLLKQQQRVLLGRSDVSGWGAFLKNSVSKHEYLGEYTGELISHKEADKRGKIYDRENSSFLFNLNNEYVLDAYRMGDKLKFANHAPDPNCYAKVIMVTGDHRVGIFAKERILAGEELFYDYRYEPDRAPAWARKPEASGAKDDGQPFNGRAKKLAQNNRG

SEQ ID NO: 281077 - protein, 89 aa, Zea mays
  Clone ID: MRT4577_19443C.1.pep
DAHKLCSYFQRFTCLGGKLPKGVLLVGPPGTGKTMLARAIAGEAGVPFFSCSGSEFEEMFGGVGARRVQDLSSAAKKRTPCVIFIDEID

SEQ ID NO: 281078 - protein, 190 aa, Zea mays
  unsure (1)..(190): unsure at all Xaa locations
  Clone ID: MRT4577_19444C.1.pep
MMLHRVHESVLYSLSTATRPTHPWHSLNIRPDAPAASTVAPPHHKGIAKQPMTLAKTTALXKVQQIXLDSSAAYPHNYGFPPRTLWEDNEPTDAICLMPETVCLXSILPASSIGLMPMIDHGEKKNKIITVCTDDPEYTNYYDISELSPHRLPDIKRXLQDYNXNXNNEAAVHAFLPATTAREXIQYSMD

SEQ ID NO: 281079 - protein, 134 aa, Zea mays
  unsure (1)..(134): unsure at all Xaa locations
  Clone ID: MRT4577_19445C.1.pep
GLPPSXCRLPLCCALPLVPPFXLCXSVGSVRAXXVVLSFSCPVVXAASPVXFFLSFRXSSLLPWLLSAPPPAVSGLSLRFLWRWLRGCLSLPLGSXSFLPGWCSSAAVWRPRXRLCPGPPPPRAGVVGQSGCRR

SEQ ID NO: 281080 - protein, 151 aa, Zea mays
  unsure (1)..(151): unsure at all Xaa locations
  Clone ID: MRT4577_19446C.1.pep
RCRGAPPGRGGCSPRRGDRCPGAPRARRAPPRVPPGRRAGRGAPPGAGRHRDGGRSPPXPPGXLRGRPTRGLREEEAGAAPPGGEEGVRGEEARRGGARCVRLPMGPDGVGNCSTPRSRWPRPSEGPRKRKGAPLPWRTQVGTGGVLGLSF

SEQ ID NO: 281081 - protein, 208 aa, Zea mays
  Clone ID: MRT4577_19447C.1.pep
MAPGVASVLVPQEPVLLKDILASPSPCGNTAVSARHLFGNGVAPPRSSDDGIKDAAADRHGDRDLSIPKIFTGDVLDLLDDAARLDLMLALTGDGGAASMAGFSARGWWVSKEDGDAVQLKVPMPGLGKEHVKMRVEKDALVIKGEAGKDLEGDDDKGPARYSYRIGLSSQAFKMDQIKADMKNGVLRVTVPKIKDEERKDVFEIKIE

SEQ ID NO: 281082 - protein, 382 aa, Zea mays
  unsure (1)..(382): unsure at all Xaa locations
  Clone ID: MRT4577_19448C.1.pep
MDTETEGKAAAVEEMREWCVALPKVELHAHLNGSVRNSTLLELAKHLGDKGVIVFEDVKDVIMKSDRSLPECFKLFDLFHILTTDHDTVTRIAKEVVEDFAAENVVYLEIRTTPKNNEAKGMTKRSYMDAVIKGLKAVEDVDVELXVLISERMKXSSKLLDGVTKKKKIYVRLLLSIDRRETTSAALDTVNLAMEMMDQGVIGIDLSGNPVVGEWETYLPALQHAKNLGIPVTIHCGEVANRKEIQAVLDFCPQRLGHVCCLNDVEWKKLKSLMIPVEICLTSNVMTGGAPSLELHHFADLYNAKHPLSLCTDDSGLFSTSLSNEYYLVATTFGLSKFELFQLAQDAVAVXFADDVVKKSLKEVFKHAEKRLLMWDELAAPS

SEQ ID NO: 281083 - protein, 158 aa, Zea mays
  Clone ID: MRT4577_19449C.1.pep
KKGLGPIKAPDVNPTLSWRSQRGRGGNGNKIWPGPLLESNKLVSQHREKTKLERLKRGGIPVKKTAPKRGYLPLASPGGPGRRVFLELFFWQTGTRGRPGPPKPTAEAGPRCGEKGPQTCGCRGEKKHPRANRGTVKKKLVRAIVFLFCRKKGRRSCP

SEQ ID NO: 281084 - protein, 66 aa, Zea mays
  Clone ID: MRT4577_1944C.1.pep
DTFFHFHFGGETPLKIRVLGFYRVVMGKTHMLFITTFLYIQLVIGRILTLPWPGAIKKKNYSWLIF

SEQ ID NO: 281085 - protein, 79 aa, Zea mays
  Clone ID: MRT4577_19450C.1.pep
KPHILVLAFSGVLVASILYHALLPFIDYRRSTLRLMLLRNPAVFFFLLLFTTWFALLKICVAQCADVPLYRHLGLLHLN

SEQ ID NO: 281086 - protein, 78 aa, Zea mays
  Clone ID: MRT4577_19451C.1.pep
RSAILTVPTPRHHIRRLGGLHPTISLPPLYHRKAALLCNNCHACPSIYGEDSDMSHMEIDATLTKLHKRPIPSHFLTH

SEQ ID NO: 281087 - protein, 75 aa, Zea mays
  Clone ID: MRT4577_19452C.1.pep
QVGQFGLSRVKQSRFTGYAEWVALGPVHMCVGSSCWNCLGRAGGPLSCRSSSMSAGGLRPSSWAVMGRSSVMAGR

SEQ ID NO: 281088 - protein, 76 aa, Zea mays
  Clone ID: MRT4577_19453C.1.pep
MEVSHRGRRPSPEPRRNPSIAGDSGIQSTNRTRCDEAFDETNAAGVTATNIAVTKGLLFPNVGHKCLMAKNGKKKK

SEQ ID NO: 281089 - protein, 83 aa, Zea mays
  Clone ID: MRT4577_19454C.1.pep
EVVDPLYPGGSFHPVGLADDTSSFAELKVKELKAGRLAMFSMGGFFVQAIVTEKGPLENLADHICDPVNNSEGAYATICVRGN

SEQ ID NO: 281090 - protein, 188 aa, Zea mays
  unsure (1)..(188): unsure at all Xaa locations
  Clone ID: MRT4577_19455C.1.pep
KAQTTTPAAKLPSTPVLAPIGRPTGPPKVAPXPKLVVPPTPTPIGLPKPSTPAPSFALAPTLTAPSPAPAPTLAPASTPRPPIPDPVTPTPVPMGPLITPTRPPTGPTNPPTPAPRLALAPTPTAPSPTPTPTLAPASTPRPPTAGPETPTPAPMGPPVTPTRAPMGPPNSPGPAPTLALAPTPAGPS

SEQ ID NO: 281091 - protein, 51 aa, Zea mays
  Clone ID: MRT4577_19456C.1.pep
TWLSPLKDLFQSIQLTDIYHMMMIICIFMVTPLLFEHVVIYCVIAKEYVNY

SEQ ID NO: 281092 - protein, 58 aa, Zea mays
  Clone ID: MRT4577_19457C.1.pep
VTSLLNYGLWHLWFHAIFKGGIVLNNYKFTVHSCFYYSVAQLKAYVHVFKNSKVNSKR

SEQ ID NO: 281093 - protein, 133 aa, Zea mays
  Clone ID: MRT4577_19458C.1.pep
MAQSSTQDQATKLDAAGRELITTYDELNPTLVDELWEEPSALEFLQYVARNRPFVVRKGAQDWTAVQKWDSHYLLNVLGNSLVNVAITPFGNAYAVLKEEDGSLSYVRPLERLEPFDMVIRYISEQELNQSGP

SEQ ID NO: 281094 - protein, 119 aa, Zea mays
  Clone ID: MRT4577_19459C.1.pep
MAASSSAAAPADTYDIPWVEKYRPSRVADVVGNADAVSRLEVIARDGNMPNLILSGPPGTGKTTSILALAHEMLGPSYREGVLELNASDDRGLDVVRNKIKMFAQKKVTLPSGRYKIVI

SEQ ID NO: 281095 - protein, 97 aa, Zea mays
  unsure (1)..(97): unsure at all Xaa locations
  Clone ID: MRT4577_1945C.1.pep
DKHNSGAPRLSVDSANSHWGGGGGVIPLHSPILPFLFHITIHFPSFYNFLTGKTLSFPILLXLXCIPLSPAGAXXNRARPVALCYGCPACCRLDPPC

SEQ ID NO: 281096 - protein, 104 aa, Zea mays
  Clone ID: MRT4577_19460C.1.pep
WKRATRLQGSPNPVTRRMLAAALADEETHAAPQLEVVATPSRHMITMPHSLQGSPNPVTRRMLTMALADEASQQPTTTVGNTMIAYDMSSSSRARKLTPKRRKS

SEQ ID NO: 281097 - protein, 56 aa, Zea mays
  unsure (1)..(56): unsure at all Xaa locations
  Clone ID: MRT4577_19461C.1.pep
HASCHAXVDSTIVYQQWQLKYFGFLCFLVFLEGLVPGPFFHHGYKLLLVSFFPRSF

SEQ ID NO: 281098 - protein, 47 aa, Zea mays
  Clone ID: MRT4577_19462C.1.pep
LVLLGYRSGGALLTCWYAGTGCSVGLCGGLGLLHLVPVSPLVTALVS

SEQ ID NO: 281099 - protein, 155 aa, Zea mays
  Clone ID: MRT4577_19463C.1.pep
SDFTGPAGVVIAQSPNHEEQTVVWYSPENYTISVDRSHSSTIVEFANYTMLGYFYPYTFANGTTESLHMDIFVDGSLVEIHVNDRFWLTTRIYPARTDSTGFGIWAEEGSTVKAKDLKVWDIDFNVFPERPENSSSKLIYDTPEETNNYVWWTGN

SEQ ID NO: 281100 - protein, 138 aa, Zea mays
  unsure (1)..(138): unsure at all Xaa locations
  Clone ID: MRT4577_19464C.1.pep
MNEMKNQSKSLFAKKKKKKKKKKKKKKKKKKKKKKKKKKKKKKKKRGGRFKGSKFTYPCMQRNSFFLGPPKLNXIGRRLKTXNWKNFWFTKFNRFEKNPLFASWGNSKKARTDRLSKQLPTLIGKWNPPCKGPLSAGG

SEQ ID NO: 281101 - protein, 200 aa, Zea mays
  Clone ID: MRT4577_19465C.1.pep
GYPPGRPGTTIWLDLLKSMMTEVEWRLSKYVPTEEEYMTNAYLTFALGPIVLPALYFVGPKIPESIVKDPEYDELFKLMSTCGRLLNDVQSFEREHKEGKLNIVSLLVLHGGSTSISDARKKLQKPIDTCRRDLLRLVLREESVVPRPCKELFWKMCKVCYFFYSRIDGFRSPVERAKEVNAVINEPLKLQENHTHMSVL

SEQ ID NO: 281102 - protein, 60 aa, Zea mays
  Clone ID: MRT4577_19466C.1.pep
KVCQTNLLKYEFVPCNHRGFQKRHISWRMFFVGLPCTLENRCFFFCKLTVLMYVCSLPGV

SEQ ID NO: 281103 - protein, 40 aa, Zea mays
  Clone ID: MRT4577_19467C.1.pep
KKKKLKKKKKKKKKKKKKKKKKKKNKNKKKKKKKKKKSLY

SEQ ID NO: 281104 - protein, 99 aa, Zea mays
  Clone ID: MRT4577_19468C.1.pep
GVAGPYEACFVIISEREEEVEVPEEKTTPPLESQVRKRQIFVAFAPRWYQKKKNKSEDAGGRGPPYRTFFLKLSGGVFASLNMCNNTTQHSFIALVCNK

SEQ ID NO: 281105 - protein, 76 aa, Zea mays
  Clone ID: MRT4577_19469C.1.pep
GVAGPYEACSVIISEREEEVEVPEEKTTPPLESQAGSRLYFNICGPETNSSINKGEEATNFCCFCSKVVSKEEKQE

SEQ ID NO: 281106 - protein, 76 aa, Zea mays
  Clone ID: MRT4577_1946C.1.pep
NPSKKTGWAPKTPNFGLNRGAWPPNRGGNKTGFTFPTKKCPRGGKVNHRGKNRGYMLGEPSQGRPLAHYGGGGNFW

SEQ ID NO: 281107 - protein, 217 aa, Zea mays
  Clone ID: MRT4577_19470C.1.pep
GKKKQKKKKKKNIIKKKKKKKKKKKTTGWCFSGAAPMGKDIGDAFGAKLPGAVLGQGYGMTEAGPVLSMCLAFAKEPLRVKSAACGTVVPNAKLKIVDPNTGRSFARNLPGEICIRGQQIMKGYLNNPEATRNRINAGGWLHTGNVGFVDNNNKILIVDRLKEIIKYKGLQVAPAELEALLITHPGIADVAVVGKQVEPKIGKIPVAFVARAKGSDD

SEQ ID NO: 281108 - protein, 72 aa, Zea mays
  Clone ID: MRT4577_19471C.1.pep
LTCERSQAPVRKRQIFVAFAPRWYQMKKNKSEDAGGRGPPYRTFCLKLSGGVFASLEMCTTQHSFIALVCNK

SEQ ID NO: 281109 - protein, 46 aa, Zea mays
  Clone ID: MRT4577_19472C.1.pep
DESVNINKFGEPISYYSFLYPPYRLCTKYVKKFTELMYRIHMLLLL

SEQ ID NO: 281110 - protein, 57 aa, Zea mays
  Clone ID: MRT4577_19473C.1.pep
LSAPFLAPHHLPISTERATAFYYSLYHNYLLPLLQPYIYLSMALSFYFFFTFYLSHF

SEQ ID NO: 281111 - protein, 131 aa, Zea mays
  Clone ID: MRT4577_19474C.1.pep
FVSFACLAHNISLTLCWTLNHQNIIEMTQGHISLSISPFLVIYANTSKSNAKHATSIEIEDQIVFDSNLAYLDHSLPPLGLFLQIKFIFLYLSQTHLFGHKERYSKSEIEQDPKTPPFFHNYKFSPQEIKF

SEQ ID NO: 281112 - protein, 479 aa, Zea mays
  unsure (1)..(479): unsure at all Xaa locations
  Clone ID: MRT4577_19475C.1.pep
MAAMMMATSESKSPARVLRRLAGAAVAAVLLRRTFSASKCKTEARMATARMKLLRNRREAQVRQMRRDIAALLRDKQEDTARIRVEHVIREQNFMAANEIIELFCELIVTRLPIIAKQKECPADLKEGICSLIFAAPRCSELPELGRIRDIFEKKYGKDFVSAAVDLRPDAAVNNLLIEKLSIKKPSGQIKLKVLKDIAKEHQIDWDTTESEQELLKPPEELIKGPSTFVEASNMPVKTILTPYTVQPXQLTSAIGVRMANMMTGAXQFKDAASAARAAAESAERAASAAKAAADFANNNNHPFDEDEDCKASTHEFTHPRKRQSMSNSSRSSMKEDANAFDEQKPHEGKTYSTRRFSGKNHVEYDKDGYPADLDSTKTRRRNCRAARKVHSEIKFDDSEGLCSESEGENDVEIQSVERPLPPKSELFSENRHSEDEEHDQDFPELPKTNLHSRVHPNMPLDYETLTARFEALKSGKLP

SEQ ID NO: 281113 - protein, 40 aa, Zea mays
  Clone ID: MRT4577_19476C.1.pep
DFESYPEFKGRMIIHNQVRDPACYDVIKIFFVTFSLSAFR

SEQ ID NO: 281114 - protein, 49 aa, Zea mays
  Clone ID: MRT4577_19477C.1.pep
EGKKGFSWENGGRSPRTFQEFAPPSYFSTRHLLSLKNSKRVKTPTWFFF

SEQ ID NO: 281115 - protein, 79 aa, Zea mays
  Clone ID: MRT4577_19478C.1.pep
VSHYSAMPDPSADGLPSSHPTDEEVMLHYLMRHAVSMCVPRPPDCRGQDLPPWSLGSRWLGIVRRPRVLILPSPAAKVP

SEQ ID NO: 281116 - protein, 64 aa, Zea mays
  Clone ID: MRT4577_19479C.1.pep
KLRTVPSDGATLGTVKLLVHPRADADCLESAADNAGAGVVYAVVDENRAGRTSMMQSDSLVWWI

SEQ ID NO: 281117 - protein, 191 aa, Zea mays
  unsure (1)..(191): unsure at all Xaa locations
  Clone ID: MRT4577_1947C.1.pep
MGELNYFLGFQVKQLKDDTFISQTKYTQDLLKRFGMKDAKPAKTPMGTDGHVDLNKRGSGIQRGXTFDLIGYSDSDYAGCKVDRKSTSGTCQFLGRSLVSWSSKKQTSVALSTAEAEYVAVGQCCAQLLWMRQTLRDFGYNLSKVPLLCDNESAIRMADNPVEHSRTKHIDIRHHFLIDHHVRKMDPGPFG

SEQ ID NO: 281118 - protein, 110 aa, Zea mays
  Clone ID: MRT4577_19481C.1.pep
ERRRAARAGPPRRAAQATQDFVFDELDDVLRYYPQGYHGVDRESQPVYIEKLGKVDPNKLMQITSVDRYIKYHVQEFERAFRERFTACTLAAKRNIDSTTTILDVQGAGF

SEQ ID NO: 281119 - protein, 480 aa, Zea mays
  unsure (1)..(480): unsure at all Xaa locations
  Clone ID: MRT4577_19482C.1.pep
AEDADALLGQGRLVARLEPHRFFISSSILDLTIVGIDYTEGDSTLQGQQPHYLKTSCKPSLDHGSPVYLLGHTXXKKELVIGEGKVVIGTDNLIKLSAEGVTWCPGSARFDAQGNLAFMICDPMKLASSPTARSSSASSSSSHSWKKDQPMQFGIPISVVCDWLYQHWQGSLDEVSKPKLPLVRLMSSRSDHSSTSFTRRHVFKPDDENDDASVCSKPKHQQVSGSTATARISHEANPIVDLRTSCEQGVTTPEIYESPRRSSCQAQKNAAAPIQLLDINFPPRVPKTIFLPLPLKQMLSDENNVETSKPKYRSKDNGFPSGLIWHRNIEAECRDPPVALQHMDCSSEGQSSSSPAEIPEYGCQDQYDSEEETMYSAETMESRNIPSPREKHVGRSQSCVTYSRWSSPRTSSMQNGTLRKQHTLIPVRKTHSQNTTLPQRSHDYLSPTVSSAMKKRNSMEQQQATKPRRSTIQSSPKWMF

SEQ ID NO: 281120 - protein, 64 aa, Zea mays
  Clone ID: MRT4577_19483C.1.pep
PLLALILAANYLNFKGLLALTCQTVVAMFKGKPPEEIRKPFNIKNDFPPEEEKEIPRENQWAFK

SEQ ID NO: 281121 - protein, 221 aa, Zea mays
  Clone ID: MRT4577_19484C.1.pep
GIEPGVLYPAVSVEQFHEPHAYKLNFLSINRFERKKNLDLAISAFALLRSAAWTIPGDALQEATLTVAGGYDKRLKENVEYLEELKRLALTEGVSGQVKFVTSCSTSERNELLSNCLCVLYTPKDEHFGIVPLEAMAAHKPVIACNSGGPVETVVNEVTGFLCDPSPAEFSKAMLKLVNDHDLAVRLGEQARDHVVQKFSTKTFGDLLNSYVLNIYHERME

SEQ ID NO: 281122 - protein, 86 aa, Zea mays
  unsure (1)..(86): unsure at all Xaa locations
  Clone ID: MRT4577_19485C.1.pep
GRRYFEVDVGXGTGWDVGVCMADAAMGPGMKQEPQSGFWTXRMCRKISYVALTSPPTSLHLHEQSLPVGIFLDYEAGVVSFYNGNT

SEQ ID NO: 281123 - protein, 74 aa, Zea mays
  Clone ID: MRT4577_19486C.1.pep
VSRGRPSGWGGFRSGKTNPGRVPSAFFFPGIKGLFSLSPMAKDFWSRGLAPRPNFLRFSFFLEVFFLRARGVLI

SEQ ID NO: 281124 - protein, 430 aa, Zea mays
  unsure (1)..(430): unsure at all Xaa locations
  Clone ID: MRT4577_19487C.1.pep
MTAAGKVAGASSGTRTKRLKIAVIHPDLGIGGAERLIVDAACQLAAHDHDVHVFTSHHDKKRCFEETLSGLFPVTVHGDFLPRHVFYRFHAVCAYLRCIFVALCVLLRWPFFDVILVDQVSVVIPLLKLMASSKIIFYCHFPDLLLAQHTSMLRGLYRKPIDMIEEITTGIXLADLILVNSKFTAATFARTFSGLHARGIEPGVLYPAVSVEQFHEPHAYKXFMLAYLLTFRLNFLSINRFERKKNLDLAISAFALLRSAAWTIPGDALQEATLTVAGGYDKRLKENVEYLEELKRLALTEGVSGQVKFVTSCSTSERNELLSNCLCVLYTPKDEHFGIVPLEAMAAHKPVIACNSGGPVETVVNEVTGFLCDPSPAEFSKAMLKLVNDHDLAVRLGEQARDHVVQKFSTKTFGDLLNSYVLNIYHERME

SEQ ID NO: 281125 - protein, 81 aa, Zea mays
  Clone ID: MRT4577_19488C.1.pep
APLLSTPMISGRERMDHSARSSTLTRLAASSTCTIFSIKDALHLKDPEHPHHVMSINKSLSCAGADMLHIGLKDHYDKNKD

SEQ ID NO: 281126 - protein, 113 aa, Zea mays
  unsure (1)..(113): unsure at all Xaa locations
  Clone ID: MRT4577_19489C.1.pep
MAAAGEVAGASSGTRTKRLKIAVIHPDLGIGGAERLIVDAACQLAAHDHDVHVFTSHHDKKRCFEETLSGLFPVTVHXDFLPXHVFYRFHAVCAYLRCXFGALCVLLRWPFFD

SEQ ID NO: 281127 - protein, 45 aa, Zea mays
  Clone ID: MRT4577_1948C.1.pep
SAPNYCGEFDNAGAMMSVDETLMCSFQILKPAERKQIYGAKQNVR

SEQ ID NO: 281128 - protein, 251 aa, Zea mays
  unsure (1)..(251): unsure at all Xaa locations
  Clone ID: MRT4577_19490C.1.pep
PQAAGWIIEDIFYCHFPDLLLAQHTTMLRRLYRKPIDMIEESTTGXILSTCYFFFPFLCLAMCLGIQQHYNCSGYLLRISGMADLILVNSKFTAATFARTFSGLHARGIEPGVLYPAVSVEQFHEPHAYKXSCLHISLHLGLTYSVYRLNRSFYHYHIKAXKVDNNLLYRLNFLSINRFERKKNLDLAISAFALLRSAAWTLPGDALQEATLTVAGGYDKRLKENVGYLEELKRLALTEGVSGQVNFVTSC

SEQ ID NO: 281129 - protein, 125 aa, Zea mays
  Clone ID: MRT4577_19491C.1.pep
RAYGYRWKTYVKTYKCSTAYPYCCQKKATKHTRSDSLSPTEPKFMKASTKGYVPKKANTTDNMGHAKKLLENKKDEMTIHGHHLKFKRRLFTMMDNVRTAYDSVTDVANKQANAPNGRCKSSKSN

SEQ ID NO: 281130 - protein, 103 aa, Zea mays
  Clone ID: MRT4577_19492C.1.pep
CNSHLPLSSAVRERAIRVRLGHGHLLSRLPGHLCGCGQDDKMSRCLFAPCAVSSTRKLVRRVTVDSVLAFQPESLVLLQPVIKAGGRLRTHAHDAPPRQPLIQ

SEQ ID NO: 281131 - protein, 388 aa, Zea mays
  Clone ID: MRT4577_19493C.1.pep
SGGTGFRKFSTTEAADAAISAASVAPGLGISLKSRPLNVMKAMDKESAHKKALEKAKTEVEDRRNLYLAKEGEILAGIPAAEGVSDADMNKRNWLARRKAEMLQSPKFHVSRTRLIIYNLPKTMTINDVKKLCREAVISRATKQNPVIRKVNILKNEKKGIQKHSRGVAFVDFQEHEHALVALRVLNNNPETFGSERRPIVEFALEDVEKVRLQKIRMERHRKSAAETAEVQQTPSGDQPASEGRNADNSRTFRKGNKRKSHSLPSKPSDSVEGLAKDPLVPGVRNAKAAKRARKSNVGTILPDRGLTAATPNTAQNQVASSELDQAAAPKKRKNRKDGQAEQKRGKVTKRTRKEPSGEGGVDKSLVEQYRFKFLQHGVSKTKTKTKG

SEQ ID NO: 281132 - protein, 62 aa, Zea mays
  Clone ID: MRT4577_19494C.1.pep
HSTVIHCSIIQCESHAKFQAISHLLLAHLLRILMRMHQFCLCSHYDREKQCFTTKAIRSADY

SEQ ID NO: 281133 - protein, 79 aa, Zea mays
  unsure (1)..(79): unsure at all Xaa locations
  Clone ID: MRT4577_19495C.1.pep
PPPPPRGAVRGDXRSRGPPAVCSKSRGAFRVRVANQKKKKKKRCRTSSSGVGLLSLAYCFPPLRLLYSPSHSFAFPAVL

SEQ ID NO: 281134 - protein, 48 aa, Zea mays
  Clone ID: MRT4577_19496C.1.pep
KNSRFVINLDPKFGFSLIEMYYAICSYILSTNNVVLHDVFWFELLNIS

SEQ ID NO: 281135 - protein, 149 aa, Zea mays
  Clone ID: MRT4577_19497C.1.pep
MAIGGSEAGGGGAGSMRSVLVTGGAGFIGTHTVLRLLEQGYIVTVVDNFHNSVPEALDRVRLIAGPALSTRLDFIRGDLRNTDDLEKVFAARRYDAVIHFAGLKAVGESVAHPEMYYENNLIGTINLYKSMKEHGCKKLVFSSSATVYG

SEQ ID NO: 281136 - protein, 405 aa, Zea mays
  unsure (1)..(405): unsure at all Xaa locations
  Clone ID: MRT4577_19498C.1.pep
MAIGGSEAGGGGAGSMRSVLVTGGAGFIGTHTVLRLLEQGYIVTVVDNFHNSVPEALDRVRLIAGPALSTRLDFIRVXPKPRCGSVRMSLCLPLPRATLIELVSRSRCAACPSRGVFQGDLRNTDDLEKVFAARRYDAVIHFAGLKAVGESVAHPEMYYENNLIGTINLYKSMKEHGCKKLVFSSSATVYGWPEVIPCVEDSKLQAANPYGRTKLILEDMARDYHRADTEWSIVLLRYFNPIGAHSSGEIGEDPKGIPNNLLPYIQQVAVGRAPXLNVYGHDYPTRDGTAIRDYIHVVDLADGHIAALKKLFDSPDIGCVAYNLGTGRGTSVLEMVAAFKKASGKEIPTKLCPRRPGDATEVYASTEKAERELAWRAQYGIEEMCRDQWNWAKKNPYGYCGGAKK

SEQ ID NO: 281137 - protein, 98 aa, Zea mays
  unsure (1)..(98): unsure at all Xaa locations
  Clone ID: MRT4577_19499C.1.pep
MEHVISMEEILGPFWELLPAPAPEPEPEQPPVTGIVVGSVIDVAAAGHGDGEGGGDMMDQQHATEWTFERLLEXEALTTSTPXPVVVVPNSCCSARLN

SEQ ID NO: 281138 - protein, 662 aa, Zea mays
  Clone ID: MRT4577_1949C.1.pep
MDPKGKGIVINDKEKESFVNEPRDDKSNNSGSGHKRRDGKKKKTRRIKEIVYYDSDESSSSQKDDDHDKQRKPVNSNFSFDYSRIPHSSNSHLLSIPLGKPPHFDGEDYGFWSHKMRSHLFSLHPSIWEIVENGMNFDSSDSPMFINEQIHKNAQATTVLLASLCREEYNKVSGLDNAKQIWDTLKISHEGNDITMLTKMELVEGELGRFAMIRGEEPTQTYNRLKTLINKIRSYGSTRWTDHDVVRLMLRSFTVLDPHLVNNIRENPRYTKMSPEEVLGKFVSGRMMIKEARYVDDALNGPINEPQPFALKATGNKEALLSKVAQIEAAGLNEEEMALIIKRFKTVLKGRNGQPSKTKTKGKRSCFKCGKLGHFIANCPDNESDQEKGNKREKKKQYKKAKGEAHLGKEWDSDCSSSDSDNEGLAATAFNKSALFPNERLTCLMAREKKVSTQDSTYASSSDSESSDDDIDYSCLFKGLDRSKIDKINELIDALNEKDRLLEKQEDLLYDEHDKFVEAQKSYALEVKRNEMLSYELSTCHETISTLQGVNNDLNAKLEVANKSNSCVEHVKICTRCKDFDVDACSEHLVLISKLNKEVASLNAQLKTSKNEVDKIKFARDAYTVGRHPSIKDGLGFKREAKNLTSHKAPIFVKEKGKAPMA

SEQ ID NO: 281139 - protein, 97 aa, Zea mays
  unsure (1)..(97): unsure at all Xaa locations
  Clone ID: MRT4577_194C.1.pep
PAFLAXEAIIKQIPRPLAPGLNMAGKFPTLETHHESLDSNVNETXATRKPQLEKVLCMGAAVANCGMDDKQIFQNVQMKDNXLETLLKKNRQNVRCL

SEQ ID NO: 281140 - protein, 55 aa, Zea mays
  Clone ID: MRT4577_19500C.1.pep
LEEFGTRQTPKSSQRTTPLAHRSSRTISENLTREFRPDHHGGAVGTEAHVSGLSP

SEQ ID NO: 281141 - protein, 137 aa, Zea mays
  unsure (1)..(137): unsure at all Xaa locations
  Clone ID: MRT4577_19501C.1.pep
RISWLRXGDSNXQQFHMHARYINKKNFVADLASVHNVYTDHADGAMLVYNFNSSLXGPRLDRSVTINHQXLGLPSHHLEDLDSPISEKVAFEAIIELPSDKASGHDGFTGRFVIACWPIVKVNVMQVLAAIWDSKKK

SEQ ID NO: 281142 - protein, 55 aa, Zea mays
  unsure (1)..(55): unsure at all Xaa locations
  Clone ID: MRT4577_19503C.1.pep
XKGWPPQLXNSRMXTARDSFLYTHAPSELAGAVLYRWRLDAASGACCGSGDFQIP

SEQ ID NO: 281143 - protein, 74 aa, Zea mays
  Clone ID: MRT4577_19504C.1.pep
KAGTPACAGLLLHGQSIFEDNGMTRVQIRGSSTYPICTQRYRALGRHCTTAFMNHNEVRDTSIIYEAQHTNLYF

SEQ ID NO: 281144 - protein, 39 aa, Zea mays
  unsure (1)..(39): unsure at all Xaa locations
  Clone ID: MRT4577_19505C.1.pep
INQKCHVKKKDXXKFXXXXXXXPKKVIEDEQSGPISCFA

SEQ ID NO: 281145 - protein, 133 aa, Zea mays
  Clone ID: MRT4577_19506C.1.pep
NPQATQRRNKKRRRDKKGAAVGAGPARSRAVSFFRSALRSNPSHFPAAPRRTADPLGLRRCCSAAAAGVGARARATRDLSRHYWIFLPLIANILFWPGKHLARARHGGRTQGISRGSCGCQGHGTCVQPDGRP

SEQ ID NO: 281146 - protein, 150 aa, Zea mays
  Clone ID: MRT4577_19507C.1.pep
MNPQPLRLGALLAALVLAAGGGWWGRAEASIHTYGRESFREVGNAFLLSGGSEGIVADGADLAAPDSSFIKFVNVTFWRNAESAESHAKMAHSTGLVQAILFEAADRDNIGGSAYGGQRSICCTPDLAKLEGCKQGEVIRRPSSDDPDWP

SEQ ID NO: 281147 - protein, 33 aa, Zea mays
  Clone ID: MRT4577_19508C.1.pep
AFLLLPVRSPMIGILPMCPHIFGRTTNSLQCPC

SEQ ID NO: 281148 - protein, 166 aa, Zea mays
  Clone ID: MRT4577_19509C.1.pep
SWPGGTTFPQVARPGTPVSRALVAAGFALNHRQTLRRPFPPPPGAPPVPLLPSRPPFSTSFTPGSRVSARNPLMSRNLERNGRITCMTPPRDWLRTDLSAIGFGLIAWLGPPSVPPPQRTNLTPLFFPSTAQPLPHFPTPPPAHPPPPAAANRRRPPRPPPRAPPP

SEQ ID NO: 281149 - protein, 77 aa, Zea mays
  unsure (1)..(77): unsure at all Xaa locations
  Clone ID: MRT4577_1950C.1.pep
AYLWMXXRKRVLLKLQGGRAITANTGRERAKPTSGVFSAPDVARGRGRTNRTHASPAKLCCQHRCPFTRPGLTGIAG

SEQ ID NO: 281150 - protein, 87 aa, Zea mays
  Clone ID: MRT4577_19510C.1.pep
EGKPNQINSPIFFFKKWGQGGGKKKTNQPPRKGEGFIQALTLKKGICKPILKFFDPKKMGGWENPKNIDGENLRVTILFGQNGFWKI

SEQ ID NO: 281151 - protein, 33 aa, Zea mays
  Clone ID: MRT4577_19511C.1.pep
SITLKSSSYGGYLTILNPVFEDLLYLVIKKTLT

SEQ ID NO: 281152 - protein, 75 aa, Zea mays
  Clone ID: MRT4577_19512C.1.pep
MFRDRHYLCVPLWPMVRVCTGIDRSPSAPHGLGPAANVLIGGSADNWPRPEGSNNPSHVNLLCVLRRALQKSTMP

SEQ ID NO: 281153 - protein, 158 aa, Zea mays
  unsure (1)..(158): unsure at all Xaa locations
  Clone ID: MRT4577_19513C.1.pep
MSPAGQSKAVTMSAKVRYRAVKRPTSRTARGSHLEVNPPGALKGLXAENLSTLMFXMXGQGSGMGFMKMTGGCPTTPADLMRSAVGQPLALSVESTVGTNISGXHGNPAETFCDLEGGKITLTRGIPHWWGHLMGSTAVSFMLRFSTEGKATEPFGII

SEQ ID NO: 281154 - protein, 46 aa, Zea mays
  Clone ID: MRT4577_19514C.1.pep
RTSKKNEEEKRRVLDKRTPAQAAFEKMQEKRQMERILKTASKTHKQ

SEQ ID NO: 281155 - protein, 63 aa, Zea mays
  Clone ID: MRT4577_19515C.1.pep
WVWGGGFYFFFFFFFFFFFFFFFFFFFFFFFLRKKQGNSYLKGNFRGFKTFGGREGPGKKNTL

SEQ ID NO: 281156 - protein, 237 aa, Zea mays
  Clone ID: MRT4577_19516C.1.pep
LLCNFQPWAATNGVELPEQQAQPVQNVEEHHADEQNEDDDIDDLFDDDDEIVPELISGDHGDFTKAYNRQRKLNDANIPDDHKPKTNPQKPSANTNASIDDQVASLAKHASKIRLTGRMTGASGGNARDKDKADRATTEQVLDRRTQMILLQLINRGVISELHGVISTGKEANVYHAMSEPSEDGAPPVHRAVKVYKTSILVFKDRAKYVEGEFRFRQGYNKSNNRAMVRMWADKER

SEQ ID NO: 281157 - protein, 84 aa, Zea mays
  Clone ID: MRT4577_19517C.1.pep
LLIDLLPIIFSSTFSCPGTSSSLTTNSTMSGPWFSISVTSPKGTSNSASFRTICAPSTPTLHDAPSFSSTRSPHLERSSASAFA

SEQ ID NO: 281158 - protein, 206 aa, Zea mays
  Clone ID: MRT4577_19518C.1.pep
ETTENAEGEGKTHYSEINQEVEKVETRAEECEGGAGPVIQRRKKSGELPDCLMLMMYEPKLSMEVSKETWVCSTDFVHWKSYQGKNNYNHRQQKAFATGTVETVKKENAEGSTVVKDVQESKDPSTVNSAVPMPCPVVQKTLALKPATTEQKPKLELPPVTNAAAYAPFVLKRCKSEPMRSSARLAPDACFWKDRHLPLNATGVGF

SEQ ID NO: 281159 - protein, 424 aa, Zea mays
  unsure (1)..(424): unsure at all Xaa locations
  Clone ID: MRT4577_19519C.1.pep
MRRKKHLDRGGGGGGGGTELFICFTSRSSAASAISVAGGSAHSSLRPSSSSKLLSPGRGSASASGAEAVPAPPLHPSLSRRLRNSGSLKGGQSPMFPSGSTGGGRRGRGGFEPAEPSSPKVTCIGQVRVKGGKRKPKHASAAALRSRSRRGGGGSAEASFRRAGDDREGPQGKNQGWVHQIPVNICEALKTFGSCGGRSLCSSSRPGEXASGVRCPPTHTVVRSGGXAPAGGSWLCGAAVARCLLAIQEEEDDDEVGKGAAVVPAEEMRASDGWDVEEEKTVMVGEVEVEKKDEILVVGKEEEGRVSVCIPPRNALLLMRCRSDPVRMAALATRFWGSPAAATVEQVDNEVAGCLNDNEEEEEKEEEAEAEPLECKDGARCSAVSVKDLKCEECGSDENDGAEAGEINQEKAEAEESSKCGDLV

SEQ ID NO: 281160 - protein, 670 aa, Zea mays
  Clone ID: MRT4577_1951C.1.pep
MDPKGKGIVINDKEKESFVNEPRDDKSNDSGSGHKRKDGKKKKTRRIKEIVYYDSDESSSSQKDDDHDYKKTIWDTLKISHEGNDITMLTKMELVEGELGRFAMIRGEEPTQTYNRLKTLINKIRSYGSTRWTDHDVVRLMLRSFTVLDPHLVNNIRENPRYTMMTPEEVLGKFVSGRMMIKEARYVDDALNGPLHEPQPIALKATRSKESLPSKVAQIEAAGLNEEEMALIIKRFKTVLKGRNGQPSKTKTKGKRSCFKCGKLGHFIANCPDNDSDQEKGNKREKKKHYKKAKGEAHLGKEWDSDCSSSDSDNEGLAATAFNKSALFPNEHHTCLMAREKKVYASGGSSWIIDNGCTNHMTGEKKMFTSYVKNKDSQDSIIFGDGNQGKEKSETQGTLKRFLRRAQNEFELKVKKIRSDNGSEFKNLQVEEFLEEEGIKHEFSAPYTPQQNGVVERKNRTLIDMARTMLGEFKTPECFWTEAVNTACHAINRVYLHRLLKKTSYELLTGNKPNMKKMFRRPLYEPWRLVMCDHRNKKSKINLLPQLWCIPQPKMTNRLFQMDVKSAFLNGPIKEEVYVEQPPGFEDERYPDHSCEEFSRVMTQKFEMSMMGELNYFLGFQVKQLKDGTFISQTKYTQDLLKQFGMKDAKPAKTPMGTDGHTDLNKGDFL

SEQ ID NO: 281161 - protein, 113 aa, Zea mays
  Clone ID: MRT4577_19520C.1.pep
MASRKGKKTSSEPESEKDCDVVAPNSVEEGQESCDDGKEEETTENAEEEGKTHYAEINQEVEKVETRAEECESGAGPVIQRRKKSGEIPDCLMLMMYEPKLSWEVSGDMGLQY

SEQ ID NO: 281162 - protein, 74 aa, Zea mays
  Clone ID: MRT4577_19521C.1.pep
MESSRMFQPAIILLLLLIVTTDVAQAARECEKDSERFLGACMASDNCANVCRGEGFSGGRCSTFRRRCICTKPC

SEQ ID NO: 281163 - protein, 84 aa, Zea mays
  Clone ID: MRT4577_19522C.1.pep
DTRPLVKNVLCESLVSHPYLVNKWPRYELVAYSRDTTLVMQLRCQVLAIKYKPLCAVPALARSLPPSHHLRPACTGPLVLMRPS

SEQ ID NO: 281164 - protein, 103 aa, Zea mays
  unsure (1)..(103): unsure at all Xaa locations
  Clone ID: MRT4577_19523C.1.pep
QQQHPPNRQQPAADPQQQQPNNQRAAKNSPAKXQQQQQQPNSQQAGGSPATIKTQPQRXPFHQHGAPNAGTPKQXHQPQPTNQRARTNPAGLNQQPTRGGVLK

SEQ ID NO: 281165 - protein, 109 aa, Zea mays
  Clone ID: MRT4577_19524C.1.pep
LRKREKKKKKFSQKKKKKKPKKKKKKKKKKKNPQMKKKKKQQNNQHRPPRGGPPQLIPLITSLMTPARWPFFNNVIAEKTLGAPYLLLWQNIPLSPGGIIKRTPTDNPS

SEQ ID NO: 281166 - protein, 50 aa, Zea mays
  Clone ID: MRT4577_19525C.1.pep
PDMGVLFWTWGFTSTNSLHKLETTHATHKYRGRKIYYIDLHTPSRYQSGS

SEQ ID NO: 281167 - protein, 46 aa, Zea mays
  Clone ID: MRT4577_19526C.1.pep
SVPKQANGGDVAAAELDDVWEDVLWFPRHAVTLDRECIHRQCQFHK

SEQ ID NO: 281168 - protein, 74 aa, Zea mays
  Clone ID: MRT4577_19527C.1.pep
KNFYSGGQSFKESHKPKLPFWRGGPLKSCALWPKKIAQGSLPPNFGFLEGGPSLKMVGPGPTKFPKVFFFGAPP

SEQ ID NO: 281169 - protein, 65 aa, Zea mays
  Clone ID: MRT4577_19528C.1.pep
NRPWCRNLTIWCLLQLMLMYSNMGPALMCPTSTIIMFLAIACRSRSTQLSCPPREHVGFAFSPPS

SEQ ID NO: 281170 - protein, 50 aa, Zea mays
  Clone ID: MRT4577_19529C.1.pep
CFQTSQRWPFSLCSVFYPCKSLFITWLQSVPYFLVGGLKRFRNYIPPSTP

SEQ ID NO: 281171 - protein, 1294 aa, Zea mays
  Clone ID: MRT4577_1952C.1.pep
MDPKGKGMVINNKEKKREKKKAYKKAKGEAHLGKEWDSDCSSSDSDNEGLAASAFNKSSLFPNEHHTCLMAKEKKVNTRKSTYASSDDESSDDEIDYASLFKGLDRTKIDKINELIDALNDKNRLLEKQEDLLYEEHDKFVSAQNSLALEVKRNEMLSCELSTCHESISSLKSINDDLNAKLEIASKSTSCVEHVMICNRCKDFNIDACSEHLVCISKLNDEVASPNAQLKTSKNEFDKLKFARDAYTIGRHPSIKDGLGFKREAKNLTSHKAPISAKEKGKAPMANSAQKNHAFIYHDRRYSRNVHYDRSYNDVVSHAMIASSSSIMHDRSLARKNVIHHVPRKTSNEPSTIYHACNASFAICRKDKKVVARKLGAKCKGDKTCIWVPKAIVTNLVGPNKSWVYASGGSSWIIDNGCTNHMTGEKKMFTSYVKNKDSQDSIIFGDGNQGKVKGLGKIAISSEHSISNVFLVESLGYNLLSVSQLCNMGYNCLFTNVDVSVFSRSDGSLAFKGVLDGKLYLVDFAKEEAGLDACLIAKTSMGWLWHRRLAHVGMKNLHKLLKGEHVLGLTNVTFEKDRPCAACQVGKQVGSSHHIKNVMTTSRPLELLHMDLFGPVAYLSIGGSKYGLVKVDDFSRFTWVFFLQDKSETQGTLERFLKRAQNEFELKVKKIRSDNGSEFKNLQVEEYLEEEGIKHEFSAPYTPQQNGVVERKNRTLIDMARTMLGEFKTPEWFWSEAVNTACHAINRVYLHRLLKKTSYEFLTGNKPNVSYFRVFGSKCYILVKKGRNSKFAPKAVEGFLLGYDSNTKAYRVFNKSLGLVEVSSDIVFDETNGSPREQVVDLDDVDEEDVPTAAIRTMAIGDVRPQEHQEQDQPSSSTMVQPPTQSDEQVHQEEACDQGRAQDDHVMEEEAPQAPPTQVRATIQRNHPVDQILGDIRKGVTTRSRLVNFWEHYSFVSSIEPFRVEEALLDPDWVLAMQEELNNFKRNEVWTLVPRPKQNVVGTKWVFRNKQDEHGVVFQMDVKSAFLNGPIKEEVYVEQPPGFEDERYPDHVCKLSKALYGLKQAPRAWYECLRDFLIANSFKVGKADPTLFTKTCDGDLFVCQIYVDDIIFGSTNQKSCEEFSRVMTQKFEMMGELNYFLGFQVKQLKVGTFISQMKYTQDLLKRFGMKDAKPAKTPMVTDGHVDLNKGGKSVDQKAYQSMIGSLLYLCASRPDIMLSVCMCARFQSDPRECHLVAVKRILRYLVATPCFGIWYPKGSTFDLIGYSDSDYAGCKVDRKSTSGTCQFLGRSLVS

SEQ ID NO: 281172 - protein, 61 aa, Zea mays
  Clone ID: MRT4577_19530C.1.pep
ASPLHFVCAHHLSSGFGLRACWSLFHPFLSPTATVKEIPPACGIEPCIKKKQQSEIHHEPN

SEQ ID NO: 281173 - protein, 52 aa, Zea mays
  Clone ID: MRT4577_19531C.1.pep
RLDALICRWPLFFFFLRTTTAMRLGSYLRHLDAINGICGTGSLPRVLGHPKY

SEQ ID NO: 281174 - protein, 751 aa, Zea mays
  unsure (1)..(751): unsure at all Xaa locations
  Clone ID: MRT4577_19532C.1.pep
MAAGEEQEEFFDSREVLSPASVSSSPSSSGRHDDGGWLFAQQLLEVWVRDPGSVHERRQRFVKSLGLMDPSPHGARPGEETCSRPEAREEILPASPSTELFSAVPTFASMGGEPTASGGDGAGTEEEPECVFKNLDDGTVFVVDEMGKDGSFRSLRERLSNRTVTAAEFEQAFGSSPFIRELMRRVDDSDEPSTPEKTVLRRRRRRRIGWLRRLGIGVCVVDADAEEEDDEVNSTSSTSSRGCSRKVDWVKVRPYKKRSKELSAVYKGQVIKAHEGAIVTMKFSSDGQLLATGGEDGVVRVWRVVEGKRPDDRHFVDDDPSCVFFTVNENSELAPIXIPAKGVRASTITAQRXTDPACVVIPHQTFALSEDPVHEFRGHHDAILDLSWSKNRELLSASKDKTVRLWKVGCDSCLKVFSHNNYVTCVQFKPTNDNYFISGCIDGMVRIWDVPRCLVVDWADSKEIITAVCYRPDGKGAVVGTITGNCHCYEASENHLALESQVPLYGRKKSPLKRIVGFQYCPSDPKKLMVTSGDSQVRILDGAHVVSSYKGLRSPSQVPAAFTPDGDHIIAASDDSSIYMWNYANQLAPVTSRVKTVWSYEHFFCNDVSVAIPWNALPARSSISLACNIPLSRQEVSEELHNSQESVSCCSAEGSPKADSSCRLPSGNFTLSNAFSAELAPRGKATWPEEQLPSSDSVTPSSSSALRKSQYKFLKTSCQSAATHAWGQVIVTAGWDGNIRSFQNYGLPMQV

SEQ ID NO: 281175 - protein, 39 aa, Zea mays
  Clone ID: MRT4577_19533C.1.pep
RILIRSGSDQSLTARYNVTQTIQKNISTQYCLGKNPINK

SEQ ID NO: 281176 - protein, 116 aa, Zea mays
  unsure (1)..(116): unsure at all Xaa locations
  Clone ID: MRT4577_19534C.1.pep
FLGFGASVGRNSLAPSPPPVRGARFRSPRPRGDPFEGRRGRXAAASSRFPPPPPAGGGFDLKRISLEWVIDISTSWFQLQQQILMGTWLAKRLEGIPWSKERVDFLFILFWPSSTN

SEQ ID NO: 281177 - protein, 23 aa, Zea mays
  Clone ID: MRT4577_19535C.1.pep
MEVFYYLVFGALPPIVATRSLPA

SEQ ID NO: 281178 - protein, 93 aa, Zea mays
  unsure (1)..(93): unsure at all Xaa locations
  Clone ID: MRT4577_19536C.1.pep
GDFPYIRVCRGRPLSAQTHQGIIEAALKGANDIHMDPGPVIYXSANDLIRRMLNPIPLYRLTQHQELCHPWIEDHADAPNPPANPSVPVHIKH

SEQ ID NO: 281179 - protein, 135 aa, Zea mays
  Clone ID: MRT4577_19537C.1.pep
VRPRVRVPQIFLFFFQGSGGPLFFFFPCPWYPPNFLPPKLFPDFFPWGESIGPWGVTPKNYGFFLSLFFLGLPFRQSSVLGFKMFGFLSLVFKKFFFFLAPFPPPFVPFLVLYTPMSGPLFPPFLPPSPGSCCFP

SEQ ID NO: 281180 - protein, 176 aa, Zea mays
  unsure (1)..(176): unsure at all Xaa locations
  Clone ID: MRT4577_19538C.1.pep
MKKKTSNVIKNLATLNFKNSEDTCYHEDSEMVPSPGRASPVVASVQSHKNFVDHADLEIVPSHENSVDLHSVYMAHVLERSRQSIVVDILDYNIPESTFADCLLPTGHMHTDVFYLQCQLLSKDWKDKVILSWKATQELIHQDIGVKELDKELTAEVMNKXDLVCALFYIQESFFR

SEQ ID NO: 281181 - protein, 52 aa, Zea mays
  Clone ID: MRT4577_19539C.1.pep
IARGALQKESETFHEQELEKEEEEEDENAKNKHTRFERRLRRYLNPKAYDTS

SEQ ID NO: 281182 - protein, 1217 aa, Zea mays
  unsure (1)..(1217): unsure at all Xaa locations
  Clone ID: MRT4577_1953C.1.pep
MDTKGKGMVINDKEKESFINEPKDDKPTDSGSSQKKKDGKKKRRIKKIVYYYSDESSSSQKDDEYEEKKKTVNSNFSFNYSCIPHNSNAHLLSIPLGKPPHFDGEDYGFWSHKMRSHLFSLHPSIWEIVENGMQFDSLDNSMFINEQIHKNAQATTVLLASLCREEYNKVSGLDNAKKIWDTLKISHEGNDATMLTKMELVEGELGRFAMIRGEELTQTYNRLKTLVNKIRSYGSTRWTDHDVVRLMLRSFTVLDPRLVNSIRENXVHQDDARGNTRKVRXGRMMIKEARYVDDALNGPMPIYEPQTVALKATSSREALPSKVAQVEVAGLNEDEMALIIKRFKTVLKGRKEHPNKSKTKGKRSCFKCGKIGHFIANCPNNDSDQEQGKSGKWEKKKTYKKAKGEAHLGKEWDSDCSSSDSDNEGLTASSFNKSALFPNEHHTCLMAKEKKVHTRSTVTYASSSDDESSDDEVDYTSLFKGLDRTKIDKINELYDALNEKNRLLEKQEDLLYEEHDKFVSAQNSLALEVKRNEMLSCELSTCHESISSLKSINVDLNTKLEIANKSSSCVEHVVICNRCKDFNVDACSEHLISISKLNGEVASLNAQLKTSKNDFDKLKFARDAYTIGRHPSIKDGLGFKREAKNLTSQRAPISNKEKGKAPMANSSQKNHAFIYDRKISRNVHHYRSCNAYDSNAMFASSSSFVHGRDMPRINVVHVYASGGSSWIMDSGCTNHMTGEKKMFTSYVKNKDSQDSIIFGDGNQGKVKGLGKIAISFEHSISNVFLVDSLGKNVMTTSRPLELXCIWTSSDPSPTSASXGSKYGLVIVDDFSRFTWVFFLQDKSETQGTLKRFLRRAQNEFELKVKKIRSDNGSEFKNLQVEEYLEEEGIKHEFSAPYTPQQNGVVERKNKTLLDMARTMLGEFKTPERFWSEAVNTACHAINRVYLHRLLKKTSYELLTGNKPNVSYFCVFGSKCYILVKKGRNSKFAPKAVEGFLLGYDSNTKAYRVFNKSSGLVEVSSDVVFDETNGSPREQVDLNDVDEDDVPTVAIRNMAIVDVRPQEQTEQDQPSSSTMVHPPTQSDEQQNVVGTKWVFCNKQDEHGVVTRNKARLVAKGYAQVAGLDFEETFAPVARLESIHILLAYAAHHSFRLFQMDVKSAFLNDPIKKEVYVEQPHGFEDERYPDHVCKLSKALYGLKQAPRAWYECLRDFLIANAFK

SEQ ID NO: 281183 - protein, 77 aa, Zea mays
  Clone ID: MRT4577_19540C.1.pep
TRGLGSQRSLQSLVVSNRNDQGYCLKDGLIYKGRQLVVGQNSALQNKIIAALHSSVVGVIQAFMPYQRINNSFVGMV

SEQ ID NO: 281184 - protein, 197 aa, Zea mays
  Clone ID: MRT4577_19541C.1.pep
IICNMQVYYRFNNISLLREPLMLITGFFLLFVACIVYMRTDMSISKSSPSYLAKLQWDEVQATVQKIQGIFEQCLAVHDKLEASLRDLSRTGDIQSCKAARKAADTQFKELSKDLKPLLATLQSSPQSYQILPKVEDLIVKEREMQEKLMTRHSTVVDSFEKKLRGQDVENRIALQQQKIAALRQEVESLLEYISEI

SEQ ID NO: 281185 - protein, 65 aa, Zea mays
  unsure (1)..(65): unsure at all Xaa locations
  Clone ID: MRT4577_19542C.1.pep
HSPIHCGLDACERLDQAAXXLXLXXMPXSXNXVRVATVXNEKGXXFXXVPVDXTTGXXKQPDFXA

SEQ ID NO: 281186 - protein, 454 aa, Zea mays
  Clone ID: MRT4577_19543C.1.pep
LGTSRPAGAQTLAIRLPGGRVESYTRHPNAKLVDSELKYGPFHDLPPFSYLPVIVHFENNNPFAVAKEVIREIEISHWGNVQITEHYNIAHGGARLKGEFSRIDYQSRPYVRGVSSFRHLIAKLPPRAHSIYYRDEIGNISTSHLWSDSMKTQLEIEPRFPLFGGWQTTFTVGYGLPLEDFVFYSDGKRFLNITFGSPLEEILIEKLIVKVVLPEGSKDIEVSAPFPTQQQQEVKYSHLDIVGRPVVVLEKPDVIPEHNLYFQVYYRFNNISLLREPLMLITGFFLLFVACIVYMRTDMSISKSSPSYLAKLQWDEVQATVQKIQGIFEQCLAVHDKLEASLRDLSRTGDIQSCKAARKAADTQFKELSKDLKPLLATLQSSPQSYQILPKVEDLIVKEREMQEKLMTRHSTVVDSFEKKLRGQDVENRIALQQQKIAALRQEVESLLEYISEI

SEQ ID NO: 281187 - protein, 154 aa, Zea mays
  Clone ID: MRT4577_19544C.1.pep
MAIAAVPASLPFVLLPPRLFRGRAVRWPRPIRASASSNASDVAGGERKFGALVSRVGDLRALVASVPPAVASMQKNIGPNFVAGFCVSMAFVAAAARQISLRSREHVSKGSVADLVRRGQLKSGQRGMYVTISFKLHFVFSLMHCWVYGCLIIV

SEQ ID NO: 281188 - protein, 48 aa, Zea mays
  Clone ID: MRT4577_19545C.1.pep
AGATHTSASPPGLFRLGARNQQHRRCLPYFFYNARRIQTHRLWWPQVP

SEQ ID NO: 281189 - protein, 105 aa, Zea mays
  Clone ID: MRT4577_19546C.1.pep
KILGGTQQKLKKWGNFSPNPLKIKKLGKKKCFKIFFLKSVCFFQKIFRKIVDRKIFFGKGLNFPELSSLPRVWGGLKGFCPFEKKKKNPSLLGGKGNCKGKGRAN

SEQ ID NO: 281190 - protein, 227 aa, Zea mays
  Clone ID: MRT4577_19547C.1.pep
PFRPFCLGDGDSCIASPPIRAAAATAAVPASPASSSGCLAASPALGKKQAASGSLPAPMVDISECSPVPESVPAHPDPASVSPDAWRRFETAALAVVNKIQPTAASEHLRAAVVDYVQRLFWFQARYQVFPFGSVPLKTYLPDGDIDLTLFGPAISDENLANEVCTILKSEERRKDSEFEVKDVQYVPAEVKLVKCLVQNIVVDISVNQIGGLCTLCFLERVITLWK

SEQ ID NO: 281191 - protein, 110 aa, Zea mays
  unsure (1)..(110): unsure at all Xaa locations
  Clone ID: MRT4577_19548C.1.pep
HTSTLSLPTITERDVLRPVPVVFMSVVSCRLPGSTHPGLVCQSNQDSFYLDPEGRFYIVADGKGGHAGGEQASRIAVERVRDYLHTYWQSEITXKQLLRDALMDANGGIR

SEQ ID NO: 281192 - protein, 193 aa, Zea mays
  Clone ID: MRT4577_19549C.1.pep
MSSSLSLRRLCFVLPMDADEAVPPASHPEGPARRSPARVASLDLETAGSYARTTAVRLLSCLRRWRPRPCCRGDGRCHDDSPEKAAAFEDIAGVVDDVAGRKQLAGGGPRIFSYSELYIGTRGFSDAEVLGSGGFGRVYRAVLPSDGTTVAVKCVAASSAGARSDKSFLAELAAVARLRHRNLVRLRGWCVRA

SEQ ID NO: 281193 - protein, 111 aa, Zea mays
  Clone ID: MRT4577_1954C.1.pep
PRPAVPRTPSSCPWLPGPGRARSCCQPSNSWFEVEAPAKDWELFAISTHVQNSVAAGAQAQAARTRNGLPPTSSTSTYVTSAYTSVWSLRAPLSVEGVVVVDAVGEPEICR

SEQ ID NO: 281194 - protein, 229 aa, Zea mays
  unsure (1)..(229): unsure at all Xaa locations
  Clone ID: MRT4577_19550C.1.pep
MGAAPSTPRLGAAGAAPSPSAAEQMFTALVGEKAYPISSEFWKQLLELPLTLQWPRDRVLQACHAFAENNYQTKHLAKILIHLVWCLQECTSTTSVSSVVYRRAINAAYISSIFLKFIIENAKTDSWQELCLVIDRSEKGLENFPAENTVEYFLIRGVLEYIGSVGVSPESCYLHHELLNLMLVLMSTQLCSGPSPEPXDVHPFIDAAMLXDSSVVASVVQKLLLNFVT

SEQ ID NO: 281195 - protein, 99 aa, Zea mays
  Clone ID: MRT4577_19551C.1.pep
RHFTSSASFYPAYSARHHTHTFMEEEQEDLRHGSPDNVRAVIRANKKSYRLVQIIASSEDVYNILRSKYLSPNGMQDSSLKGRNGTGFLYGARVGIGAK

SEQ ID NO: 281196 - protein, 724 aa, Zea mays
  Clone ID: MRT4577_19552C.1.pep
MGAAPSTPTLDVAPLTPRLGAAGAPPSPSAAEQMFAALVGEKAYPISSEFWNQLLELPLTLQWPRDRVLQACHAFAENNYKTKHLAKILIHLVCCLQECTSTTSVSSVVYQRAINAAYISSIFLKFIIENAKTDSWQELCLDIDRSEKGLEKIPAENTVEYFLMRGVLDYIGSVDVSPELCYLHHELLNLMLVLMSTQLCSGPSPEPKDVHPFIDAAMLQDSSVVASVVQKLLLNFVTRPKLPLNASHPVFSDDARPGVLQRVGSAAANVVLLPYYTFNYLVSSTPEGATSQLADNSLLVLLIMIHYRKCFSTNESIPTNNVYTMDSNTNDKDAPVFHDNPYCKALNSAKDIQYDRADVEGNAQNGPVVRLSFALLFDALGRFLNDEIPVLLLYSLVHGNCDFQEYVLVRTDLDTLLMPILETLYNASRKTSNQIYMLLIILLILSQDSTFNASVHKLVLPGVPWYHERLMHQTSMGSLMVVILIQTIKYNLSKLRDVYLHTNCLAILANMAPHVHRLSAYASQRLVSLFDMLSRKYAKLAELKNDKSLKVISDQMEADNIADDMSTELHIYTDFLRIVLEIINAILTYALPRNPEVVYAVLHRQEVFEPFKNHPRFNELLENIYTVLDFFNSRMDMQQLDGEWSVDKVLEVINKTCRSWRGEGMKMFTQLRFTYEQESHPEEFFIPYAWRLVLSRGFSFNPSAINLFPVEIHLEDAPAGEQKV

SEQ ID NO: 281197 - protein, 124 aa, Zea mays
  unsure (1)..(124): unsure at all Xaa locations
  Clone ID: MRT4577_19553C.1.pep
PKVEFMQPLSGPPGVVPLRAVFEDPPKFSLVLELSTGGGLLHXFPRGGKFSDQGAPLLIKVFMAGPKYSPQMGVVPRAVYPENFLLPQAGKVKLPFWAPRPGSLMVFVFPPPRITPFRFEAPAE

SEQ ID NO: 281198 - protein, 152 aa, Zea mays
  Clone ID: MRT4577_19554C.1.pep
SIELFKHNMKIEYRKIIIIIWLHGISIQTYRGYRQVKKLDIILRNRLQMRQFLSHLCKILLRLEIKLQLPRPQAITQFPPRCLVVLIMSPRSSATQSFFHVLCKICSCSCSSLINFSSSTAVAAADTIAVAVIDAHYIAQEIPADCAMRMPR

SEQ ID NO: 281199 - protein, 50 aa, Zea mays
  Clone ID: MRT4577_19555C.1.pep
MGSAGGGESELESPLLGASSTVGGGHGETAVSGQLESILGDASVPWGTRM

SEQ ID NO: 281200 - protein, 133 aa, Zea mays
  unsure (1)..(133): unsure at all Xaa locations
  Clone ID: MRT4577_19556C.1.pep
PGVSQLAMVDPAAYLQQQQVVFFSPXLAMVNGPTYLQQQLLQQIVPALTQLAVGNPVAFLQQVVSFNQLVVLNFGGGLQQGQPFLYPLAGGNPLVVAFLQQQQLFPYNQFFFMNPAFLWEQPLVGGAFFLISY

SEQ ID NO: 281201 - protein, 162 aa, Zea mays
  Clone ID: MRT4577_19557C.1.pep
METNIHSGDPMKKEIHLVHRQAKSLITESQIMTLQTQYVYKDSQSLSASGDSISLLRMLHELDGLRKEHLNFRSLFQFEKNPTIKLVEQIRTMQMNLMPINMQDDKLRAHVAKAKTRAQAAVAQATGHPAGAQLAASQPGAAPATVGSEQQPQTHMHVSREP

SEQ ID NO: 281202 - protein, 73 aa, Zea mays
  Clone ID: MRT4577_19558C.1.pep
PVRLTVYETKSCLPETRLGTKGRCWFRNSCRVTSELTTLEQALIAGWNELSRQRAKGMSPWDRGESLVGGWEF

SEQ ID NO: 281203 - protein, 94 aa, Zea mays
  Clone ID: MRT4577_19559C.1.pep
RTRATMRLRMSVSNYRANFTSSTQDTMTLDRGLASVEAYHGAPSTGKVAILTSLIWTGVSPRLLDGLCTHDSSKAGQAISSCLPRTFTRTIGLN

SEQ ID NO: 281204 - protein, 1432 aa, Zea mays
  unsure (1)..(1432): unsure at all Xaa locations
  Clone ID: MRT4577_1955C.1.pep
MDPKGKGMVVNDKEKETIFNEPRDDKATNSGSSQKKKEGKKKRRIKKIVYYDDSDESSSSQKDNDDNDHEKKKTVNSIFSFDYSRTHLLSIPLGKPPHFDGEDYGFWSHKMRSHLFSLHPSIWEIVESGMQFDSTDSPIFINEQIHKNAQATTVLLASLCRDEYHKLVEGELGRFAMIRGEEPTQTYNRLKTLVNKIRSYGSTRWTDHDVVRLMLRSFTVLDPHLVNNIRENPMYTKMTPEEILGKFVSGRMMIKEARYVDDALNGPIHEPQTVALKATRSKEVLPSKVAQVEAAGLNEEEMALIIKCFKTTLRGRKEHPNKNKTKGKRSCFKCGKIGHFIANCPDNDSDQEQEKKRENKKAYKKAKRETHLGKEWDSDCSSSDSDNEGLAASAFNKSSLFPNEHHTCLMAKEKKVNTRKTTYASSSDDESSDDEIDYASLFKGLERTKIDKINELIDALNDKNRLLEKQEDLLYEEHDKFVEAQKSLVLEVKRNEMLSCELSTCHETISSLKSVNDDLNAKLEVANRSNSCVDHVVICNRCKDFNVDACSEHLVSIAKLNDEVASLNAQLKTSKNEFDKLKFARDAYTIGRHPSIKDGLGFKREAKNLTSHKAPISAKEKGKAPMTNSSQNNHAFIYAIADYRKIVINHVPRRNVLVPMNTPRXPSTIYTSRCNASFAFAXKDKKVYAFGGSSWIIDSGCTNHMTGEKKMFTSYVKNKDFQDSIVFGDGNQGKVKGLGKIAISSEHSIPNVFLVESLGYNLLSVSQLCNMGYNCLFTNVDVSVFRRSDGSLAFKGVLDGKLYLVDFAKEEGGLDACLIAKTSMGWLWHRCLAHVGMKNLHKRLKGEHVIGLTNDKSETQGTLKRFLRRAQNEFELKVKKIRSDNRSEFKNLQVEEYLEEEGIKHEFSALYTPQQNGVVERKNRTLIDMARTMLGEFKTPERFWSEAVNTACHAINRVYLHRLLKKTSYELLTGNKPNVSYFRVFGSKCYILVKKGRNSKFAPKAVEGFLLGYDSNXKAYRVFNKSSDEEDVPTAAIRTMAIGDVRPQEQKDQDQPSSSTMVHPPTQDDEXRLFQMDVKSAFLNGPIKEELYVEQPPGFEDERYPDHVCKLSKALYGLKQAPRAWYECHRDFLIANAFKVGKADPTLFTKTCDGDLFVCQIYVDDIIFGSTNQKSCEEFSRVMTQKFEMLMMGELNYFLGFQVKQLKDGTFISQTKYTQDLLKRFGMKDAKPAKTPMGTDGHVDLNKGGKSIDQKAYRSMIGSLLYLCASRPDIMLSVCMCARFQSDPRECHLVAVKRILRYLVATPCFGIWYPKGSTFDLIGYSDSDYAGCKVDRKSTSGTCQFLGRSLVSWSSKKQTSVVLSTAEVEYVAAGQCCAQLLWMRQTLRDFGYNLSKVPLLCDNESAICMADNLVEHSRTKHIDIRHHFLRDH

SEQ ID NO: 281205 - protein, 168 aa, Zea mays
  Clone ID: MRT4577_19560C.1.pep
GVNKDNVGKFISGYLAQGIPQKDPLKGLAQKGGGQPGKFSPKRGPKTRPHFKGGPCGKPGGKPSLGAFFPKGGGDYVSCPPFRGPNARPTPTQGLFLGRPPLGNRNAPRWGKGGPPELLQNPAFLTLLGAGAKKTPIPRPFFPPPRKTSQPPPGSKTCFSKPPPISVF

SEQ ID NO: 281206 - protein, 60 aa, Zea mays
  Clone ID: MRT4577_19561C.1.pep
TKKRQMCGEVFFFFFFFFFFFFFFFFFYKSINVLRVHLYFNKKHWSKLYFGDRVVVLNDN

SEQ ID NO: 281207 - protein, 40 aa, Zea mays
  Clone ID: MRT4577_19562C.1.pep
AGTAAVATSLSFPTASQALCLGLPYSTIGVQVHSIHTHST

SEQ ID NO: 281208 - protein, 172 aa, Zea mays
  Clone ID: MRT4577_19563C.1.pep
GFSRCSPPKLMENNRNLRDFFSQAGSSSSARIPHGREAPEEDLGVFYQTQLSRPPSISAPATRLHIEDLDLNSLGNDFPNFSSYQEVLQSDGATPYLGLPPSGRGIRTGRTPCQFPRSSAGAMRSRGGSQVFRGRGGSRGCRGGRGRATVTRGGRSGINPTTDHALCSRSGT

SEQ ID NO: 281209 - protein, 70 aa, Zea mays
  unsure (1)..(70): unsure at all Xaa locations
  Clone ID: MRT4577_19564C.1.pep
AFTHNPAHCIFAPLTFQPNSMTNYFNQPLLXYYVKLLSLLVHHNLNTNLFHYLLNPPHVPYFWVNNSTPF

SEQ ID NO: 281210 - protein, 97 aa, Zea mays
  Clone ID: MRT4577_19565C.1.pep
RSLLPPSAASTPNLLPQGSGPLLCARCSVPTALCPLLCARCYVSPTRARCSVRCHRLALRCHHHTICRCSVRRAAVPSRLLLIYCCVRDSAAAHLRS

SEQ ID NO: 281211 - protein, 73 aa, Zea mays
  Clone ID: MRT4577_19566C.1.pep
KKGNGIEFRCTKKKVIIWNEGVVKLGSYKWVAFFFFFWFLFSFFFFFFFFFLIFFFFSQESEDEWVDPGIPRR

SEQ ID NO: 281212 - protein, 130 aa, Zea mays
  Clone ID: MRT4577_19567C.1.pep
GLAHTVVFPPPSCNRRELRGRFTPLPWDSHQRLRLGANRPLASFAESWGRFPKANAKDLSSGPREFITGVAPDRGAAPRRGSPCTATLVVEEPVTEDPGEQQIEVAEQELIEGEEQVVQEEPQSEEFDLI

SEQ ID NO: 281213 - protein, 59 aa, Zea mays
  Clone ID: MRT4577_19568C.1.pep
GGLLQSCKGYRPSRLKTPKRYPRTLKRLLDRSSMSPMHTWIIRATLRLRLPELTLALRY

SEQ ID NO: 281214 - protein, 132 aa, Zea mays
  unsure (1)..(132): unsure at all Xaa locations
  Clone ID: MRT4577_19569C.1.pep
DLRQSAASSTRPKGLEIHRLPSYAYSYRNVMPALCDKYHAIAXDCLRLGLSDKPXHTMDXDYTLDEYTSYLDXLANAGAPDKLSIVVQRYXPSDAVKSANEHQDRLNHRGLMNPPITDQHVNLSSTLSYFSN

SEQ ID NO: 281215 - protein, 891 aa, Zea mays
  unsure (1)..(891): unsure at all Xaa locations
  Clone ID: MRT4577_1956C.1.pep
VYASGGSSWIIDSGCTNHMTGEKRMFSSYVKNKDPQDSIIFGDGNQGKVKGLGKIAISNEHSISNVFLVKSLGYNLLSVSQLCNMEYNCLFTNVDVSVFRRSDGSLAFKGVLDGKLYLVDFAKEEAGLDACLIAKTSMGWLWHCRLAHVGMRNLHKLLKGEHMIGLTNVTFEKXTLCSLSSRETSGXSHHAKNVMTTSRPLELLHMDLFGPVAYLSIGGRTLKRFLRRAQNEFELKVKKIRSDNGSEFKNLQVEEYLEEEGIKHEFSAPYTPQQNGVVERKNRTLIDMARTMLGEFKTLERFWSEAVNTACHTINRVYLHRPSRILLFGSKCYILVKKGRNSKFAPKAVEGFLLGYDSNTKAYRVFNKSSGLVEVSSDVVFDETNGSPREQVVDLDDVDEEDVPTAAIRTMAIGDVRPMEQKEQDQPSSSTMVHPPTQEDEQVHKEEACDQGGAQDDHWVFRNKQDEHGVVTRNKARLVAKGYAQVAGLDFEETFAPMARLESIRILLAYATHHSFRLFQMDVKSAFLNGPIKEEVYVEQPPGFEDERYPDHVGKADPTLFTKTCDGDLFVCQIYVNDIIFGSTNQKSCEEFSRVMTQKFEMSMMGELSYFLGFQVRQLKDGTFISQTKYTQDLIKRFGMKDAKPAKTPMGTDGHTDLNKGGKSVDQKSYRSMIGSLLYLCASRPDIMLSVCMCARFQSDTRECHLVAVKRILRYLVATPCFGIWYPKGSTFDLIGYSDFDYAGCKVDRKSTSGTCQFLGRSLVSRSSKKQTFVALSTAETEYVAAGQCCAQLLWMRQTLRDFGYNLSKVPLLCDNESAIRIVENPVEHSRTKHIDIRHHFLRDHQQKGDIEVFHVSSENQLADIFTKPLDEQTFCKLRSELNVLDSRNLD

SEQ ID NO: 281216 - protein, 194 aa, Zea mays
  Clone ID: MRT4577_19570C.1.pep
MALQISKKRKFVADGVFLAELNEMLTRELGEDGFAGVEIRVTPMRTEIIIRATRTQNVLGEKGRRIRELTSVVQKRFNFPDGGVELYAEKVLNRGLCAVAQAESLRYKLLGGLAVRRACYGVLRFVMESGAKGCEVIVSGKLRAQRAKSMKFKDGYMISSGHPVNQYIDGAVRHVLLRQGVLGIKVKIMLDWDP

SEQ ID NO: 281217 - protein, 218 aa, Zea mays
  unsure (1)..(218): unsure at all Xaa locations
  Clone ID: MRT4577_19571C.1.pep
MSARLQECDEQRGKRMPKRGRERLYLVFDDWCHGYSIRMVNLLQHTAGSGHPAPXAFFRAFLPHNGAXVSYFTSAFGSKILAVFSRDPEADSESYFPMLDVRSRCVTFAPGQGCPIPPIYYLPVGNELFSLSFCSFEMLCSEELSPRLQDQSCGMGWSWKQLSEXPFYVDNVTSYSLHPQERTFLFSTKTGATEATYTFDTEKRSWKLLGYWKLPFAG

SEQ ID NO: 281218 - protein, 79 aa, Zea mays
  Clone ID: MRT4577_19572C.1.pep
LRPRLGGCAFLGLGGGPSWGGPPPWFCPRVGFFGVFDPAGFVPLPFRAPRVIRSFHNKTGLSFLNKKQNKKKKKKKKKK

SEQ ID NO: 281219 - protein, 57 aa, Zea mays
  Clone ID: MRT4577_19573C.1.pep
KGYGCCLLEFGMPYHVSIQVTPLDMTSWGLGRLKCYLMDIVTESQGSKWCKGLDDTR

SEQ ID NO: 281220 - protein, 78 aa, Zea mays
  Clone ID: MRT4577_19574C.1.pep
HFRGWRGGAGSHVGSEENKLESLFGRSKLYKSSANISNSASPFIKSSGSGMSLLYFKLFRLLALYFLDFVIFFILFFK

SEQ ID NO: 281221 - protein, 34 aa, Zea mays
  Clone ID: MRT4577_19575C.1.pep
QHDPRLLYPLQLMVRVESLLGDGQRFRCSRRSRR

SEQ ID NO: 281222 - protein, 139 aa, Zea mays
  Clone ID: MRT4577_19576C.1.pep
MTFKRRNGGRNKHGRGHVKYIRCSNCAKCCPKDKAIKRFLVRNIVEQAAVRDVQEACVHDGYVLPKLYAKVHHCVSCAIHAHIVRVRSRENRRNREPPQRFRRRDDGPRPGQGGPPRAGGPGGAPAGAGAVPGAPAPRV

SEQ ID NO: 281223 - protein, 90 aa, Zea mays
  unsure (1)..(90): unsure at all Xaa locations
  Clone ID: MRT4577_19577C.1.pep
MARERREIKRIESAASLQVPFSTRRRFFFTYAAELSLLCNTSFTLIGLSYTGXLSYSARSIMYNITLKPDLHSKNPPMDKHPSLDLNLDH

SEQ ID NO: 281224 - protein, 97 aa, Zea mays
  Clone ID: MRT4577_19578C.1.pep
GRPSCLPYIGNVLVCVKKKETKFFSLLSLYACWASVFVIMYVRVSTCILVDPIPSSVTIFFLVPDDILLSLYIKKKKKKKQKKKKKKKQKKKKKTRG

SEQ ID NO: 281225 - protein, 147 aa, Zea mays
  unsure (1)..(147): unsure at all Xaa locations
  Clone ID: MRT4577_19579C.1.pep
MEYXCRKIRPLXRGRRREATKXXFFLLFYFLLFYWFYFFFFFFFFFLVFPFKGGIPTNRPGRPAKPGTTPRGGEPREKPRPAKKGEPFPSPNHITGQKNGKHKNGGPKRGSQRKKKGGGPPNPIPPEKLARPPPPRKPKNKPRGPVQ

SEQ ID NO: 281226 - protein, 611 aa, Zea mays
  Clone ID: MRT4577_1957C.1.pep
MDPKGKGMVVDNNEKESIFNEPKNDKSTDLGSSHKRKDGKKKKKTRRIKEIVYYDSDESSSSQKDDDNDYRKTVNSNFSFDYSRIPHSSNSHLLSIPLGKPPHFDGEDYGFWSHKMRRHLFSLHPSIWEIVENGMKFDSSDSPMFINEQIHKNAQATTVLLASLCRDEYNKVSGLDNAKQIWDTLKISHEGNDVTLLTKTELVEAELGRFAMIRGEEPTQTYNRLKTLINKIRSYGSTRWTDHDVVRLMLRSFTILDPHLVNNIRENPRYTKMSPEEVLGKFVSGRMMIKEARYVDDALNGPINEPQPLALKATRSKEALPSKVAQIEAAGLNDEEMALIIKRFKTSLKGRKGQSSKTKAKGKRSCFKCGKLGHFIANCPDNDSDQDEGNKREKKKHYKKAKGEAHIGKEWDSDCSSSDSDHEGLAATAFNKSSLFPNERHTCLMAREKKVSTRDSTYASSSDNESSDDDDIDYSCLFKGLDRSKIDKINELIDALNEKDKLLEKQEDLLYEEHDKFVEAQRSHALEVKRNEMLSCELSSCHETISKLRSINDDMNAKLEIANKSNSCVEHVMSCTRCKDFDIDACSEHLVSISKLKDELASLNAQLKTSK

SEQ ID NO: 281227 - protein, 74 aa, Zea mays
  Clone ID: MRT4577_19580C.1.pep
KKKKKKQKFILTKKKKKKKKGSNQKGVGATHHTSSYIQHITTQFTSFLNKINFPYFSIDHTHKPLNIPILINFL

SEQ ID NO: 281228 - protein, 610 aa, Zea mays
  Clone ID: MRT4577_19581C.1.pep
MPQIAYDILHVNHSKKEHIISLYGIDTTKRPSDLHVLLDGRARELATGRLVALKKVRFDSVEPESVRFMAREILILRRLRGHPNVVGLEGIITSRSSPSIYLVFEYLEHDLAGLSSSPDITFTEPQIKCYMRQLLEGLAHCHARGVMHRDIKCANLLVNNSGELKVADFGLANLFAPAPAAPLTSRVVTLWYRPPELLLGATAYEPSVDLWSAGCVFAEMHARRPVLQGRTEVEQIHRIFKLCGSPPEDFWRRLGLSHGAVFRPQQPYPSRLRDTFAASMPDHTFRLLATLLSLDPAGRGTAAAALDAEYFTTAPYACEPESLPKYAPNKEMDAKLREESRRRSNLPSQGGEADKGLSRGHKSMRLQDTNQSHVHAEESLPVVAENGVTMAGNDGDSRLFVDLEPVPAISKRHGGSVGGDHAAPCARARTMSTSFKEPPCVAEHLPLSGPVQLAASTGFSWAKKPRPDATTAAVTVTMRSGSMGPGTNRNNNSGGGDGARTTSGSGATATATAAAAPYEAEKQEVIKQWAQVADAFSASEAYNSRLRQTLDAKQLKTGMMHKGKVNRVDFSGPLLSQPRRIDELLHIHEQQIRQAGRRPWFMKGTEEEEH

SEQ ID NO: 281229 - protein, 54 aa, Zea mays
  unsure (1)..(54): unsure at all Xaa locations
  Clone ID: MRT4577_19582C.1.pep
EDRMRGSNDQVEAVIHFDDHVEDLQLWDHQIXGVXQSLYHILCTMSSKAICIPV

SEQ ID NO: 281230 - protein, 91 aa, Zea mays
  unsure (1)..(91): unsure at all Xaa locations
  Clone ID: MRT4577_19583C.1.pep
FLRVYNRSSWSVKAVRASFAIGXLEERKMRXAYHLTEGLLLXGISVEGTSXTGKXFSRGNVITHLQAGGEESCALGKSQMVYFNPMHPPLT

SEQ ID NO: 281231 - protein, 454 aa, Zea mays
  Clone ID: MRT4577_19584C.1.pep
MDIATAKFFARLSVVVHKALLQAAAAEATPSLQAEPQVAAAAASNDPYVQPCRAVQVRQRPPRRARGGLLTNTNRPADARCVRVRVREMGTEILAGRTRIDQRPHGTGTDALMEGNRPPAGCCLLSDSTRSAHIQLFYVFSGLLYYVIKIEKVSIRKRSLPLGILKKNEEMLILMSMITILQHDVLYAVNKVSKKLQSPTMCIDSALDLIKGMTEYFETYRIEGFSNSLNIAKAIAKDLAVDASFPVKRHIVRKKQFDESNSQEEILEAERAFKVKYFLVLVDMAITSLKTRFEELLIFKGVFRFLLSSSTLKSLNDSELQECCIKFADTFSHDGSSDVEVLDLISELKILKFTLPDRTLCAMEIFEHIRDVGCYPNACIAYRILFTVPVTVASAERSFSKLKLLKNYLRSTMSQERLNGLATLCIEKKLLDDINIDSILDVFISKNVRRNFIR

SEQ ID NO: 281232 - protein, 607 aa, Zea mays
  unsure (1)..(607): unsure at all Xaa locations
  Clone ID: MRT4577_19585C.1.pep
MGRDAENTSPPVSSSELEQEDDDDCYLSDQGDDALEESVLHVLEDEHLEDCHWSASCVITKESLLAAQREDLRKVMELLGLREHHARTLLIHYRWDVERIFELLDQKDRDSLFSEAGIPLQYTNNAGPTSSAEVTCNVCYDDVPPSCALEMDCGHSYCNDCWTEYFIVKINEGQSRRVRCMAPKCNAICDEAIIRKLVIARHPDIAERFERFLLESYIEDNDTVKWCPSTPHCGNAIRVKGDIYCEVECTCGCQFCFNCSLRAHSPCSCMMWELWIKKCRDESETVNWITVNTKPCPKCHKPVEKNGGCNLVACICGQAFCWLCGGATGRDHTWSTISGHSCGRFTDDQTKKTEQARRDLYRYMHYHNRYKAHTDSLKQEAKLKNEIQGKISISENKESKIKDYSWVINGLNRLFRSRRVLSYSYPFAFYMFGDEIFKDEMTPEERELKQNLFEDQQQQLEFNVERLSGFLEKDFQLFTDDEVMDTMKHVINLPNVVDRLCKQMYQCIENDLLYPLRTPHNIAPYKSKGIDRASELNISWDPGEQSSQSTKHSQDEHRNKQASNILGKRTHELHGSSSSNKRERVDVNGGGXALFDLNVPAEVVDKI

SEQ ID NO: 281233 - protein, 97 aa, Zea mays
  Clone ID: MRT4577_19586C.1.pep
YSSCFLVHSTGRLQAAVNNKDHELATSLHIQLSLHKEHTTSTDHHNIHQQSATSNQQLSSLCNAHKTVSIQLRSLNVQLTTINNTQRSLTIQQLTTA

SEQ ID NO: 281234 - protein, 52 aa, Zea mays
  Clone ID: MRT4577_19587C.1.pep
LKVLGPWMIAVGTSADKVKCRTIAMQKQVVKVNTGLKLAFKSFFDGPYLANA

SEQ ID NO: 281235 - protein, 211 aa, Zea mays
  unsure (1)..(211): unsure at all Xaa locations
  Clone ID: MRT4577_19588C.1.pep
RFSCSQFSSLLSHKHSISTLPPQEPLETASGLKMENGSVDITGRTDLVSSVIELSLGVSHPGYPCYYSVWGDETQLTHGTFENVANNIIPLLTGTVDASSVSMLTVKTNGCVLGRYAVPFTFGDSSGYNVQGSVELVDISPTXSLVTSFFGNNHLGYNAAPLTIPDNFDDWVARMLYVRQTDFDCQFSSPACDGAPNEHSWFLYKRLNFFF

SEQ ID NO: 281236 - protein, 36 aa, Zea mays
  Clone ID: MRT4577_19589C.1.pep
LALALTLLLINNQLIARALRGGLVITEHYQESGLKS

SEQ ID NO: 281237 - protein, 213 aa, Zea mays
  Clone ID: MRT4577_1958C.1.pep
MDPKGKGMVINDKEKESFVNEPKDDKPTDSGSGHKRKDGKKKKTRRIKEIVYYDDSDESSSSQKDNDDYDRRKTATRSKEALPSKVAQIEAAGLNDEEMALIIKRFKTALKDRKGQPSKTKTKGKRSCFKCGKLGHFIANCPDNDSDQEQGNKREKKKNYKKAKGEAHLGKEWDSDCSSSDSDNEGLAATAFNKSALFPNERHTCLMAREKKV

SEQ ID NO: 281238 - protein, 44 aa, Zea mays
  Clone ID: MRT4577_19590C.1.pep
LLLGPVSCFLSWDWSSGSSTLHAEGVVLVGRDQSLVAQCVRLFA

SEQ ID NO: 281239 - protein, 58 aa, Zea mays
  Clone ID: MRT4577_19591C.1.pep
PHVRPRDLTLLCSIKRDSSTGAYYLDPCLITIELGYDSYFLYIYDSYLIHQASTALQY

SEQ ID NO: 281240 - protein, 132 aa, Zea mays
  Clone ID: MRT4577_19592C.1.pep
TRGGTALAQAKTGAPSRGRIGSILPHPAISRRNTLGGCGSGIPASPQMAASPMGIPMRRPRTGTIHPGRSAASSGAPAVALSQRKSTGGGAATHGTRTCFSTSRPSWCSMLQHLSHVMAAASATAADDRLTR

SEQ ID NO: 281241 - protein, 61 aa, Zea mays
  Clone ID: MRT4577_19593C.1.pep
FTITAAPFLRNLGSFSSSLRDRRADLGREHSNLCSRCERCVRRELGHRHQTSPPGRPLRRR

SEQ ID NO: 281242 - protein, 77 aa, Zea mays
  unsure (1)..(77): unsure at all Xaa locations
  Clone ID: MRT4577_19594C.1.pep
RTETAASHVVIRCXFVLSADGATGDHSVRNDSSTYGEVLQCNIILDRETQRSRGSSLYTFSTEEAMPSAMKGMNVRE

SEQ ID NO: 281243 - protein, 431 aa, Zea mays
  Clone ID: MRT4577_19595C.1.pep
MAGSSSYSVLPDQTMDNDDAQIGVAKTQGKYWGIFICWLLGNGCLFGFNGMLTIEDYYVYLFPKYHPTRIITLTYQPFVLATTAIFTYHEAKVNTRVRNLAGYTLFFLSSFGVIILDVLSSGSGGIAPFVGICTIAAAFGIADGHVQGGMTGDLSLMCPEFVQSFFGGVAASGAITAALRFFTKAVFENSRDGLRKGAMLFSSISCFFELLCVLLYALVFPKLPIVKFYRSKAASEGSQTVTADLAAGGIKSLPNPLAEEDGVVERLNNKQLLHQNMDYALDMFLVYVLTLSIFPGFLAEDTGSHSLGSWYVLVLIASFNVSDLIGRYLPLVEQMKLTSRTGLLIAAISRFLLVPAFYFTAKYGDQGWMIMLTSLLGLSNGHLTVSVLTEAPKGYKGPEQNALGNLLVLFLLAGIFVGAVSDWLWLIGKGW

SEQ ID NO: 281244 - protein, 218 aa, Zea mays
  unsure (1)..(218): unsure at all Xaa locations
  Clone ID: MRT4577_19596C.1.pep
WRALFKTTDELLRRSCGYTSSGNPERKATILGAAXNQDSRSPSLMKFNPLVASLSLYDIVGNHGAEADVDHMHICLPAWRRRSVWDNRIEKEMEVSDGDIITDGEANNHKMTRDNRFNIDVGIDNGVCDAIXELAXNDLDNMITDXVHSADANVTKGFKKIGTYDEKNMFGETTHDAADAMTLYAXGKATEPGTEVNDPGDKGHGPSTMPAVNTQVTP

SEQ ID NO: 281245 - protein, 220 aa, Zea mays
  Clone ID: MRT4577_19597C.1.pep
MAVEKSSSGTSTPSTTSTMDRFQKIVLSWDYLRLIAESKGGKQAKVLQHVKNTYVSVAEYLGVFEPLLFEEVKAQIIQGRSNDEEESGMDWRRGAVGSCTESEGFHKLSVAVEDNFQDNVSENDLLLISKEKFEEGSTPNAYAFALVEQRGGGIHISLRTFVAGEIQNLNVAKPVKSTRLQHFASIIASQNSLLWILKVCSLSTIMAEFTAMHSVASLPF

SEQ ID NO: 281246 - protein, 42 aa, Zea mays
  Clone ID: MRT4577_19598C.1.pep
AIVVAVVPRTADSGGGLAGHLVLCSVSLLYAKYLSPIYAVVS

SEQ ID NO: 281247 - protein, 89 aa, Zea mays
  Clone ID: MRT4577_19599C.1.pep
LLFVLYWLACRMGQAARALSAAGTQIGRRQNKIRGWILDDTNTIARSIYGVTIYVRTYRYICESCLYCRVPFLMKRKKTSDVNYSENVC

SEQ ID NO: 281248 - protein, 1216 aa, Zea mays
  unsure (1)..(1216): unsure at all Xaa locations
  Clone ID: MRT4577_1959C.1.pep
MDPKGKGMVVNDKEKESFVNDPKDDKPTDSGSGHKRKDGRKKKTRRIKEIVYYDSDESSSSQKDDDNDYEKKKTVNSKFSFDYSHIPQSSNAHLLSIPLGKPPHFDGEDYRFWSHKMRSHLFSLHPSIWEIVENGMHFDSTDSPMFINEQIHKNAQATTVLLASLCRDEYHKVSGLDNAKQIWDTLKISHEGNDVTMLTKMELVEGELGRFAMIRGEEPTQTYNRLKTLVNKIRSYGSTRWTDHDVVRLMLRSFTVLDPHLVNNICENPRYTKMTPKEILGKFISGRMMIKEARYVDDALNGPIQEPQTIALKATRSKEALPSKTALRGRKEHPNKTKTKGKRSCFKCGKIGHFIANCPDNDSDQEQGNKREKKKAYKKAKGEGHLGKEWDSDCSSSDSDNEGLTATAFNKSALFPNEHHTCLMAREKKVSTHNTSTYASSSDEESSDDEIDYSCLFKGLDRTKVDKINELIDALNDKNRLLEKQEDLLYEEHDKFVEAQKSLALEIKRNEMLSCELSTCHDSISSLKSINDDLSAKLEIANKSTSCVEHVVVCNRCKDFNVDACSEHLVSISKLNDEVASLNAQLKTSKSEFDKLKFARDAYTIGRHPSVKDGLGFKREVKNLTSHKASISAKEKGKAPMASSAQKNHAFMYHDKKHSRNIYRSYDAFDSHAMIASSSSIMHDRNLARKNVVHHMPRRNIVHRKVMNEPSTIYYACNASFAICRKDKKVYASGGSSWIIDSGCTNHMTGEKKMFSSYVKNKDPQGSIIFGDGNQGKVKGLGKIVISSEHSISNVFLVESLGYTLLSVSQLCNMGYNYLFTNVDVSVFRRSDGSLAFKGVLDGKLYLVDFAKEEAGLDACLIAKTSMGWLWHRRLAHVGMKNLHKLLKGEHVIGLTNLTFEKDRPCAACQAGKQXKLSSCQKCDDNIKTPGXLHMDLFGPVTYLSIGGRTLKCFLRRAQNEFELKVKKIRSDNGSEFKNLQVEEYLEEEGIKHEFSAPYTPQQNGVVERKNMTLLDMARTMLGEFKTPERFWTEAVSTACHAINRVYLHRLLKKTSYELLTGNKPNVSYFRVFGSKCYILVKKGRNSKFAPKAVEGFLLGYDSNTKAYRVFNKSSGLVEVSSNVVFDETNGSPREQVVDLDDVDEEDVPTAAIRTMAIGEVRPQEQGERDQSSSSTMVQPPTQDDEQVVPNGCEERFPQRANQGGGVRGATPWLRG

SEQ ID NO: 281249 - protein, 196 aa, Zea mays
  unsure (1)..(196): unsure at all Xaa locations
  Clone ID: MRT4577_195C.1.pep
AGRKAHYPVTSSKLQLALIASLQGVWRWLLGPASRGSFAAASCLAVRRGQRGVPPPRAEAPFGPAPGKKRADGRPPPPPEKGPKPPFPGGAPEKGTPPPPDPPGPPPPPPXPPPPRAGPPPGPPLGPPPRPPRPPQRPPAPPPXPPTPPPPPXPPPPPPAPPPPPPPSPPLPLPPPPXPPRPSPPRPPPPPPAPPP

SEQ ID NO: 281250 - protein, 143 aa, Zea mays
  Clone ID: MRT4577_19601C.1.pep
MAKLLMLTKSDYFANKHMKMLSPSPLSGMHDSLKALEEKKHQKYCVAGRQNQGCKFVQNDETRPGSNTVHSTEPLLDGGDEGCGDYLGHPRGDKRDPLEAFHYGNLWWRLRLERSCKESQPAWQASSRTWEAPHATTGRENLV

SEQ ID NO: 281251 - protein, 62 aa, Zea mays
  Clone ID: MRT4577_19602C.1.pep
DTWGNKLYVLLRSSLRCSVNCVRHETLDDFAVLAIIDAQFSDHQLFPYSAQLAGLVCQIQCW

SEQ ID NO: 281252 - protein, 105 aa, Zea mays
  Clone ID: MRT4577_19603C.1.pep
MVAPVVIASAGLGMLAGVAMANRSLGDGLPAAYRCDARPRCATCGGSGRVECLCNRWSDGDSGCRTCAGSGRMPCRSCGGSGTGRPLPARLTVQHQKPPPPAGYN

SEQ ID NO: 281253 - protein, 53 aa, Zea mays
  Clone ID: MRT4577_19604C.1.pep
DLTRSPHEEHSDQENCEVDKQLLGRPLHLQKVWLRTSGGLLSAHQGYWLVFTS

SEQ ID NO: 281254 - protein, 52 aa, Zea mays
  unsure (1)..(52): unsure at all Xaa locations
  Clone ID: MRT4577_19605C.1.pep
FTCYLSSLPYNSFPFPLILAYLLSTTWSFITHVNRHTTYXNAHIVPTSKPES

SEQ ID NO: 281255 - protein, 244 aa, Zea mays
  Clone ID: MRT4577_19606C.1.pep
VGVVCSFIGTRDLIQEHIAFRVWPLAGKWEMPKETIKESDEGGLVRLKYTFKYGDKFVEPDDDWLKNIETLSDELLGAYSKAENTALSAAFGCRKKKRLNRVFDAVGFVYPDYHYPILGRKRKNTSLATEATTSATSEPAPQRKKMKVLTHRARFIEPATVPEFIDEVSLASEATEPAPVPKIEEKSEAPSAEKAEKPRIEGQKILEILSPSANVETRKIQKGPLVSREKIKKKCSALVPLLAG

SEQ ID NO: 281256 - protein, 164 aa, Zea mays
  Clone ID: MRT4577_19607C.1.pep
MADEEHAQTSRKRVADKQINKDNPELDDDSPEQEGGTFKKASEEVMATRKIVKVRRQQPSSAPSSNPFSAIKFTTSDSSVQASIPVSKPPPSDVTTSNVRSSTEKADEVSNGSGKDDVKTADSNEVAEIQKDESGLNESNAENSQMRQWKHTLHLLKMIRRQAA

SEQ ID NO: 281257 - protein, 53 aa, Zea mays
  Clone ID: MRT4577_19608C.1.pep
RSRCIIWRSIARCMSITVKCRNLARYQWTRTVIDCTSSIILAFPDRAKCRSIT

SEQ ID NO: 281258 - protein, 75 aa, Zea mays
  Clone ID: MRT4577_19609C.1.pep
RELVPEKTFQGAPKRKKSPHDLATCFLLLSHPIRRDLLRTLTDLICACGTGYVMFQNLVGRVGGFLHEGSLFGFF

SEQ ID NO: 281259 - protein, 73 aa, Zea mays
  unsure (1)..(73): unsure at all Xaa locations
  Clone ID: MRT4577_1960C.1.pep
DGKTAPSLPCLCVHYILTMGMDLVXQSRDTSLVMLLXVCWFLFEXFTTNLMPVIHQIYQNIPQAGNTMLSFEM

SEQ ID NO: 281260 - protein, 180 aa, Zea mays
  unsure (1)..(180): unsure at all Xaa locations
  Clone ID: MRT4577_19610C.1.pep
MGDYTIQISTKLIDQLARDDEKVKRKARKPKPKKKPXSSHMKSPWNSRENQRRQALLLLXWPLQPPPMFLPVTPAPPPPPATMPEVEAIRSVLKESEALLKKLENQETGARQELSKRAKELHDKEFKLPYQKPMPCTQERAGCLECYKTNTKDPLKCAEAVKRFEACALMAIKSTAAKAD

SEQ ID NO: 281261 - protein, 99 aa, Zea mays
  Clone ID: MRT4577_19612C.1.pep
GDCRTCGKIFWTSRNRANWIRSVVGWRGVKVPAPRNECECNLRALCHSSDLGGQRRRVLRHVGSAPAGVKGLPAAKSRIECGLGRASTNGPQEPIQGDD

SEQ ID NO: 281262 - protein, 72 aa, Zea mays
  Clone ID: MRT4577_19613C.1.pep
VVINRARSRETTTCAQPELGISPQARQGTPAHRWPSHRLEGTFLHVRLLVHEPANTTIVKRYDTDDGPYSWK

SEQ ID NO: 281263 - protein, 399 aa, Zea mays
  Clone ID: MRT4577_19614C.1.pep
MAAATTRGRADGDAGAGAVVDPEAVANDVHASINNITARRNLGYLSCGTGNPIDDCWRCDSDWHNNRKRLADCGTAGVGKPEWLSDGKVYVVTDPSDDDPVNPREGTLRHAVIQEEPLWIIFKRDMVITLREELIMNSFKTIDGRGANVHIANGACITIQYITNVIIHGLHIHDCRPTGNAMVRSSPSHYGWRTMADGDGVSIFGSSHVWVDHCSLSNCADGLIDAIMGSTAITLSNNYFTHHNEVMLLGHSDSYVKDKAMQVTIAFNHFGEGLIQRMPRCRHGYFHVVNNDYTHWEMYAIGGSAEPTINSQGNRYLAPTNPFAKEVTKRVETAQTVWKSWNWRSEGDLLLNGAYFTPSGAGASASYSRASSLGAKSSSMVGTITSDAGALSCRKGAAC

SEQ ID NO: 281264 - protein, 82 aa, Zea mays
  Clone ID: MRT4577_19615C.1.pep
GNDITTGGDPPLLEFRGVEKKTGFFWFGGPHQKKTWGGFGQTPPYIYWGRPNIVTKGSWGLFLLHKKKSPIFFFFKGGSLGP

SEQ ID NO: 281265 - protein, 186 aa, Zea mays
  unsure (1)..(186): unsure at all Xaa locations
  Clone ID: MRT4577_19616C.1.pep
MQVMLLGHSDSYVKDKAMQVTIAFNHFGEGLIQRMPRCRHGYFHVVNNDYTHWEMYAIGGSAEPTINSQGNRYLAPTNPFAKEVXTVDIVVARHDASANQRRPGHFYNRTELQVTKRVETAQTVWKSWNWRSEGDLLLNGAYFTPXGPGASASYSRASSLGAKSSSMVGTITSDAGALSCRKGAAC

SEQ ID NO: 281266 - protein, 164 aa, Zea mays
  Clone ID: MRT4577_19617C.1.pep
MAAAGSSAARARRAGLAAAAAAALLVLVVVAVSAALPGGRVRVLDGLRQRSTSVVAGGARRWLRDSSLPAATTRGRADGDAGAGAVEDPEAVANDVHASINNMTVRRNLGYLSCGTGNPIDDCWRCDSDWHNNRKRLADCGIGFGRNVIGGRDGWIYVCTDPCD

SEQ ID NO: 281267 - protein, 26 aa, Zea mays
  Clone ID: MRT4577_19618C.1.pep
TCPVMRVTIYRVHPHMLILNRWHPLN

SEQ ID NO: 281268 - protein, 108 aa, Zea mays
  Clone ID: MRT4577_19619C.1.pep
AGARCEMTTPKHVRWLCARTRWHRTMHHPRSTIDLNPLALYTSTCDYYRDGFHHDRVRTSSRRGMPWSCPLRSADATRRSMMATTEWVATTSPCISTETNTGAGTPTT

SEQ ID NO: 281269 - protein, 57 aa, Zea mays
  Clone ID: MRT4577_1961C.1.pep
HQHGVLQGHGQYPRTSQLYGDHAHLLGSRIDYIASGVSHDKYHAQPPPISVWKHDRA

SEQ ID NO: 281270 - protein, 52 aa, Zea mays
  Clone ID: MRT4577_19620C.1.pep
YFPNHCRFLRRFLEYECAPHFLLVAHPTIPVCIQIRSILSAVLASVSSSIVF

SEQ ID NO: 281271 - protein, 53 aa, Zea mays
  Clone ID: MRT4577_19621C.1.pep
QRSAFAAQLRVSRFGGLGCGRRPRDGVGGSGGVLPWRLYKIRTSLGVSSGRND

SEQ ID NO: 281272 - protein, 168 aa, Zea mays
  unsure (1)..(168): unsure at all Xaa locations
  Clone ID: MRT4577_19622C.1.pep
RQATAKRENHHTQGGQRGNQSGAKNREEXRDEHGSDATGRHAGDTDXQXERANDNHNEASGGRRDPRADRTDREPGTTDPQRAGPNGQNNRPDNNFFFSPPPPNNWAKGHYTEGAENKNNNHEDDRKEAENRDRHQGTQASHPKGGGTGPGTGTPHNPKNKEENPDRT

SEQ ID NO: 281273 - protein, 85 aa, Zea mays
  Clone ID: MRT4577_19623C.1.pep
PTVAQGLARHSPLGTQQLCCGQAPPAMMPPQSGFAFQRQLGPGMTPEGAHMPKYYVAAVQHGQQGPRPCITRGAGDQCQQPVPPF

SEQ ID NO: 281274 - protein, 36 aa, Zea mays
  Clone ID: MRT4577_19624C.1.pep
LQQFDLKNTGVTYFNRFAIHSINYSWRIRKQDCTDR

SEQ ID NO: 281275 - protein, 50 aa, Zea mays
  Clone ID: MRT4577_19625C.1.pep
NGFILKYWNKAFIFYLTFQPNPSLLALLMVISFPIPPWDHLFQFSIGPTH

SEQ ID NO: 281276 - protein, 56 aa, Zea mays
  Clone ID: MRT4577_19626C.1.pep
QLFIKRLNDLRRVVNLLPYRILQWRMCNALHRILHCPRGSLLLGMDSCLILPTSHL

SEQ ID NO: 281277 - protein, 196 aa, Zea mays
  Clone ID: MRT4577_19627C.1.pep
LFDFMPTRGGYFVGNVSPARMDFRWFALGNCVAILASLATPDQAAAIMDLIEERWEDLVGEMPVKICYPAIEGHEWQIVTGCDPKNTRWSYHNGGSWPVLLWLLTAACIKTGRLKIARRAIDLAEARLARDGWPEYYDGKLGRYIGKQARKLQTWSIAGYLVAKMMVEDPSHLGMISLEEEKPTKPVLRRSASWTG

SEQ ID NO: 281278 - protein, 136 aa, Zea mays
  Clone ID: MRT4577_19628C.1.pep
VLLLGLPLEHFRHGFCKIEAIHLSGRFRVFIRTDANTIYARYSALQIHFKNKFGKEQDYNSVQDALQKCVSLYKEPHTRRLVKNAAKQDYMICLTSLIDMVQSLFPIPHIPGLQELLCEAEQILGELEEESTRKKQ

SEQ ID NO: 281279 - protein, 103 aa, Zea mays
  Clone ID: MRT4577_19629C.1.pep
EVITRSATRLGLGQCQWLPAVPDTYSDDPSTAWPDRRLGASPCSFFCYRSGPSRPWAGKLLRRRCALPALGSLQVLRCRVASVRIRIRTYPGLRRCRPHRQNP

SEQ ID NO: 281280 - protein, 96 aa, Zea mays
  unsure (1)..(96): unsure at all Xaa locations
  Clone ID: MRT4577_1962C.1.pep
EFRVQDEPPYDIQSFVSYIQADILNLTAVWHPHKADDLXSRLVRXSQFLLTQLNDLHFFAAELMNDDAPAVFAYYTDAATMPTFLYFSHXLNEIMC

SEQ ID NO: 281281 - protein, 38 aa, Zea mays
  Clone ID: MRT4577_19630C.1.pep
KKINQKWRFAHERYMDFLSFQSSPNWRGICYLLFRKWP

SEQ ID NO: 281282 - protein, 61 aa, Zea mays
  Clone ID: MRT4577_19631C.1.pep
GLTVFVLASASQPRDTRGAHGGDRQCSSRRSMEESVPMSVISSISNFRTLSTSSVVDTELV

SEQ ID NO: 281283 - protein, 49 aa, Zea mays
  Clone ID: MRT4577_19632C.1.pep
SGSFDAGRPHFSMSGHLMSKIGGNQQNVILPVPIYFARDENHIRLQPSP

SEQ ID NO: 281284 - protein, 74 aa, Zea mays
  Clone ID: MRT4577_19633C.1.pep
AEADATEPGRGVAPEAVEAGRGGGELGCHVWRLRRRRRTSHLCAAVPSSSSTEWCGTGGMGNPPDLERPHMAPT

SEQ ID NO: 281285 - protein, 45 aa, Zea mays
  Clone ID: MRT4577_19634C.1.pep
ALGAFFFFFFLFFFFFVELTITTIKMKLQSIREDKSRYQRRKVIS

SEQ ID NO: 281286 - protein, 85 aa, Zea mays
  unsure (1)..(85): unsure at all Xaa locations
  Clone ID: MRT4577_19635C.1.pep
LIPVLRGGYFTFQQVXEYFECPFSFSEGIIGXTFFVIIGFQGLLGINGPTFLKMCFNRQIIFRFSYKQYFGFKXAPXIWHFVEGV

SEQ ID NO: 281287 - protein, 78 aa, Zea mays
  Clone ID: MRT4577_19636C.1.pep
PTRSCEGAIGPLFWFGALGEKSFIIPRLRRKLKCRVSLSPKGPIVLRNLEGQGGPRHVPGHGFWPYLSTSLIGPHHLF

SEQ ID NO: 281288 - protein, 106 aa, Zea mays
  Clone ID: MRT4577_19637C.1.pep
AVSGQGTRVQGFVLLPPFFVSLGHIQKVQGPIFFLGAQFSEMSPPEIINQFAQVLFFNSGVGPFLQIFPGVGHGWSFKNPPVGPFALKSAEEALGGMLGWFPKNFE

SEQ ID NO: 281289 - protein, 404 aa, Zea mays
  Clone ID: MRT4577_19638C.1.pep
MEWASAAYTAAALVCAAAASVVALAHIYRHLLHYAEPIYQRFIVRIIFMVPVYAVMSFLSLILPNNAIYFNSIREIYDAWVIYNFLSLCLAWVGGPGAVVVSLSGRTLKPSWILMTCCYPAIPLDGRFIRRCKQGCLQFVILKPILVVITFILYAKGKYKDGNFSVNQSYLYITIIYTISYSMALYALALFYAACRDLLRPYNPVPKFIMIKSVVFLTYWQGVLVFLAAKSRFIKNADKAADLQNFVLCVEMLIAAVGHLFAFPYKEYTGPNARPSRGFRESLLHALKFNDFYHDTVHQFAPTYNEYVLYNHNEGDSAQTKYPSGSTATSGQGVELAGITVAASNSPVTSSVSSNQADQEETMTTPIKDKVDPPGGLYDLTELLDIDLSSYPAKLPAATDVRKQ

SEQ ID NO: 281290 - protein, 76 aa, Zea mays
  Clone ID: MRT4577_19639C.1.pep
SKPPPLPLLIAAARTIVVIRCAAPVSTSGDIQWHELPQEQLEPQWHLPLRQDRITDEGEQALAVLRGGRGGRGVVP

SEQ ID NO: 281291 - protein, 207 aa, Zea mays
  unsure (1)..(207): unsure at all Xaa locations
  Clone ID: MRT4577_1963C.1.pep
AGRCRKKKKKKKKNFPKKKKKKKKKKKKKKKKKKIPFPPLTTREENKGGSFGKLQGVPKPPPAKRGVARAQPLKGARVXKSGAGKKKTQKISPFGKFSPPQNLEKGRGPKYPKNPPSGKNKVXRTQFSRTPPPPNLAWKKLKKTTPWVFLVAPRGTKKKSRVGAKKRFAFQEKRANPLIGLVGKKRVFGKLTPNNMAFGXAQKIGLL

SEQ ID NO: 281292 - protein, 39 aa, Zea mays
  Clone ID: MRT4577_19640C.1.pep
LPASTHGTSPARLYLISHPVGRCLLASYCTSFTVKRLTS

SEQ ID NO: 281293 - protein, 101 aa, Zea mays
  Clone ID: MRT4577_19641C.1.pep
PRFKKMGGPAGFWCEIPGGKHPPIAKGGVFFKTGPKFRALGGELFFGGGPFCKLGVEPIFPPFFGFFQKGPLKFGPFGPKIFFKGPFIANLVFFGGFLVFC

SEQ ID NO: 281294 - protein, 82 aa, Zea mays
  Clone ID: MRT4577_19642C.1.pep
MFWLKKGPPWGFPPFLLKVPFFFGPACWSAFFFLIGPGWFFFSQLIWPGFLKKKKKKKKKKKKKKKKKKKKKKRKKKKKKAA

SEQ ID NO: 281295 - protein, 68 aa, Zea mays
  Clone ID: MRT4577_19643C.1.pep
QSREKKKKLKKKKKKKKKKKKKKKKKKREKKKKKKKKKKKKKKKKKKKKKKGGAVFKKIKFYLRLLGS

SEQ ID NO: 281296 - protein, 125 aa, Zea mays
  Clone ID: MRT4577_19644C.1.pep
LIGPAIATGNTVIIKTVEHTPLSGLYASKLIGEDGFPPGVINVISGFGRTAGAAICSHMDIDKVAFTGSTLVGRMILHAGGQSNLKKVTLELGGKSPNIVFDDADIDNAILWSNFGIFFNHGQCC

SEQ ID NO: 281297 - protein, 351 aa, Zea mays
  Clone ID: MRT4577_19645C.1.pep
VLSGLPRNLLCDGANGIGGVKLEQIKVELSGIDISVRNSGKEGEGILNHMCGADFVQKERVTPHGFNPEDVGVRCASLDGDADRLVYFRLSSASDNRVDLVDGDKILSLFALFIREQLDIVNNNGGQANKSLSARLGIVQTAYANGASTLFLKSLGLEVVFTPTGVKYLHKRALEYDIGIYFEANGHGTVVFSEDFISQLESLSNELSSQADIGSAQYHAVMRLLAASQLINQAVGDALSGLLLVEAILQFKGWSFQDWCGLYSDLPSRQLKVKVKDRSVIVTTDAETKVSQPSSLQELIDKETANYTHGRCFVRPSGTEDVVRVYAEASTQVEADGLAKSVAHHVERLLG

SEQ ID NO: 281298 - protein, 159 aa, Zea mays
  Clone ID: MRT4577_19646C.1.pep
EISIVRALMMSEMESAYLERDQMQSTSLRDEFLQHFLREEPVVGIEYEAQLQKTLLPHISSAEVAKFAENFSTASSCVIKIVEPRAHASLEDLKAVVLKVNSMEEDKSIFPWDEEQTPEEIVAQAPEPGTIIAKVEHPGIGATEMILSNGMRICCKYTD

SEQ ID NO: 281299 - protein, 191 aa, Zea mays
  Clone ID: MRT4577_19647C.1.pep
MMATSASGVSLLLLLAHPAPPPHPANGASSLWRGGGAALAPHPARFAAKRRTLRLVNVSVSCSAEALRSDGAGAEPAVPRSVPVRVAYELQQAGHRYLDVRTEGEFSAGHPEGAVNIPYMNKTGSGMTKNAHFLEQVSRAFGKDDEIIVGCQSGKRSLMAATELCSAGFTAVTDIAGGFSTWRENELPTVQ

SEQ ID NO: 281300 - protein, 214 aa, Zea mays
  unsure (1)..(214): unsure at all Xaa locations
  Clone ID: MRT4577_19648C.1.pep
MMATSASGVSLLLLLAHPAPPPHPANGASSLWRGGGAALAPHPARFAAKRRTLRLVNVSVSCSAEALRSDGAGAEPAVPRSVPVRVAYELQQAGHRYLDVRTEGEFSAGHPEGAVNIPYMXKPAQVKKKKKKKRCFICSILFXLRRLGSXPRAGMTKNAHFLEQVSRAFGKDDEIIVGCQSGKRSLMAATELCSAGFTAVTDIAGGFSTWRENE

SEQ ID NO: 281301 - protein, 69 aa, Zea mays
  Clone ID: MRT4577_19649C.1.pep
QAQVQNPSVDRRLRPRSAPYTLLHRPQYYYREGIMFAGGVSSSSLCSSDVKNISQYPRVIAQELMIEPS

SEQ ID NO: 281302 - protein, 79 aa, Zea mays
  Clone ID: MRT4577_1964C.1.pep
SWRSSSPTFLPTKSSYSRSRSLSRRKRMMLEFLNILIWRRSFQEVITLTEEILVSAKHTESAHNVACLSPTSFSSCSAV

SEQ ID NO: 281303 - protein, 111 aa, Zea mays
  unsure (1)..(111): unsure at all Xaa locations
  Clone ID: MRT4577_19650C.1.pep
VPRVRLLVRSEHEGRGLFQKLMDGISYCHDRGVYHRDLKPENVLVDRKGTIKISELGLRALPKHLGSDGLLLTTCGRPNYIAPEVLXYRGYDRCLSDLWSWGVILYVMLVG

SEQ ID NO: 281304 - protein, 169 aa, Zea mays
  Clone ID: MRT4577_19651C.1.pep
MMATSASGVSLLLLLAHPAPPPHPANGASSLWRGGGAALAPHPARFAAKRRTLRLVNVSVSCSAEALRSDGAGAEPAVPRSVPVRVAYELQQAGHRYLDVRTEGEFSAGHPEGAVNIPYMNKTGSGMTKNAHFLEQVSRAFGKDDEIIVGCQSGKRSLMAATELCSAVS

SEQ ID NO: 281305 - protein, 85 aa, Zea mays
  Clone ID: MRT4577_19652C.1.pep
LLKPSTMIPLYKRERDKRITCLDKRQPHVNASCHASTILASVDQHVTSLESRVNLGSGKKTNTHALIHQSLCYGLGLCYHLGIGK

SEQ ID NO: 281306 - protein, 366 aa, Zea mays
  unsure (1)..(366): unsure at all Xaa locations
  Clone ID: MRT4577_19653C.1.pep
MGAVKHTLKMLSWLLLFAQLAAATTSKCTNATNGTETDSLGAMKLKLIAIASILTAGAAGVLVPVLGRSMAALHPDGDIFFAVKAFAAGVILATGMVHILPAAFDGLTSPCLYKXQWWEXFPFAGLIAMSAAMATMVIDSLAAGYYRRSHFKKARPIDILEIHEQPGDEERSGHAQHVHVHTHATHGHSHGEVDVISSPEEASIADTIRHRVVSQVLELGILVHSVIIGVSLGASVRSSTIRPLVGALSFHQFFEGIGLGGCIVQANFKLRATVMMAIFFSLTAPIGIALGIGISSSYNGHSITAFIVEGVFNSASAVILIYMSLVDLLATDFNKPKLQTNTKLQLMTYLALFLGAGMMSMLAIWA

SEQ ID NO: 281307 - protein, 60 aa, Zea mays
  Clone ID: MRT4577_19654C.1.pep
SLHKHKIIIPDRTSLILSCHLIPTHISSLPAYIARIVSIYKHPLLPLSSIPSSSYLSLSL

SEQ ID NO: 281308 - protein, 112 aa, Zea mays
  unsure (1)..(112): unsure at all Xaa locations
  Clone ID: MRT4577_19655C.1.pep
SAGEERLVYHDHVSGGWLLACXFPYKELENGGVREGQSEGSSLGTGEGEIGATSAADDGEDHXVDDRCGKGEDSVDTLRRREEALLDKKSLVLYVIIYIENINECDGDGEKE

SEQ ID NO: 281309 - protein, 39 aa, Zea mays
  Clone ID: MRT4577_19656C.1.pep
VEILLMKLQGAQKSKICSPYMEKGVTYGKCAHKGTDAWT

SEQ ID NO: 281310 - protein, 85 aa, Zea mays
  unsure (1)..(85): unsure at all Xaa locations
  Clone ID: MRT4577_19657C.1.pep
KEHGAPKNXTPPPGGFGNFPPGPKGVSTLNVSASPIPLGGANPIIGKTVVVSPAPQXLXKGGPELTKSPGNPGGPVSFGILGPPG

SEQ ID NO: 281311 - protein, 113 aa, Zea mays
  Clone ID: MRT4577_19658C.1.pep
LVSVLNGKRDHLVSETKAYCSPIATPCHQVGLGKLVSLVCPMLFVLIDRCLAFPLTVVCVVSILGHAFSCVSDLQVCVCRGVRVVFWCCSVCCCNTMKCISCFCQNVRSCRFA

SEQ ID NO: 281312 - protein, 179 aa, Zea mays
  Clone ID: MRT4577_19659C.1.pep
SQGMYVLLSCTAYYYYYTSAVWLAGCVIESGGTGVERADAAAAAEAEAGEVRVEVTGGIDMDPAKLCCLLQEATKKKRVRIAEEASVPSPGRQTTLSGQGQAEAAGGWRRDGAGTFPTTVPIPSAPPAPAPEEEAEAWSETTAPSERCRYRWAAPGSTVGVWAASDITGTLAMLYHHHL

SEQ ID NO: 281313 - protein, 226 aa, Zea mays
  unsure (1)..(226): unsure at all Xaa locations
  Clone ID: MRT4577_1965C.1.pep
MGRPPCCDRAGVNKGPWTPEEDIVLVSYVQEHGPGNWRAVPVSTGLMRCSKSCRLRWTNYLRPGIRRGNFTPHEEGIIVHLQALLGNRWAAIASYLPQRTDNDIKNYWNTHLKKKLXGSSKPSAPSSRHLPPPNPPPAMPIAVXDMTRSSKDSHACLADSTPAADEVVTQLIAQQFAATDGDTSSSSSYSYASSTDNISKLLNGFMKSAFAGAGRRYRHHQDFLGH

SEQ ID NO: 281314 - protein, 77 aa, Zea mays
  unsure (1)..(77): unsure at all Xaa locations
  Clone ID: MRT4577_19660C.1.pep
TNKTISKGNKGCKKKTAPPLSNKDRYDINAPSVFILRYIRKTLVSSSQGSCIASVGLNHTIFXVGYLIFRXDEDQAY

SEQ ID NO: 281315 - protein, 135 aa, Zea mays
  Clone ID: MRT4577_19661C.1.pep
ARAKSFPPKVFWSPPPLRLFPPQKKVPPPPPFFFKPKGGWTVFSPAKDQNLKSGVATPFPFWLGAPNKYFSPFLGTHRASTFFMFFPGGPFYRFFPHQKQFRRFLNFFPLGVLKKRKKKKKKNPKKQKNKIKTTK

SEQ ID NO: 281316 - protein, 384 aa, Zea mays
  Clone ID: MRT4577_19662C.1.pep
MDAKELISQSDLQSFYQQQQQQHRAFGGHHSPSSLAGMHSVIRPMPNMNMSPTAILNSISGGSLAGMQFQMDPPPPLLHNINATGAVTPAPAEPLKRKRGRPRKYGPDGTMRQQQQQQQAASSQQQQQQLVATQPRICSLSSGPDMLGSSGMEDPAHWEPRGRPPGTGKKHQPSTSQGPGNAFAGSAGTSFTPHIITASPSEDVAAKIVAFASQSSKAVCVLSAMGSVSRAVLRHPADGSPMARVHASPQPYKNPAVYEGFYEILSLTGSYNLAHGGGLSVTLCSPERNVIGGVLGGPLVAAGTVQVVLGSFHQGGSRSKSKKAGKQQQAAAFSPDSLTGGQEASPSSGHNQNLTPPPSVTGGWPTSGIFDTRSSSIDINSSRG

SEQ ID NO: 281317 - protein, 341 aa, Zea mays
  unsure (1)..(341): unsure at all Xaa locations
  Clone ID: MRT4577_19663C.1.pep
ARRRSLTLSAGAPSPVCSSKWTRRRHHCCTPPPWVPRLLPPPPVPSXNPTEPVKRKRGRPRKYGPDGTMKQQQLVAAQPRIGPSGPSMISSAGIEDSSQKKPRGRPPGTAKKHQPSPSQGNAFAGSAGTSFTPHIITASPSEDVAAKIVAFATQSSRAVCVLSAMGSVSRAVLRHPADGSPMARVHASPQPYNNNPAIYEGFYEIMSLTGSYNLAEGSQQEQCQGQGQPSGGLSVTLCSPERNVIGGVLGGPLVAAGTVQVVLGSFHQGGSRSKSKKGGKQQQAPAPAAFSSDSLTGGQEASPSSGHNQNLTPPPPPPSVTGGWPTSGMFDTSIDINSSRG

SEQ ID NO: 281318 - protein, 113 aa, Zea mays
  Clone ID: MRT4577_19664C.1.pep
RRRKWYRDAELVEVDENGVVPEITTKSQDDAASIKSTASADPQGSVRKRRWFSNSKDLSRNAPPSPSNASTFSFSNQDVDNASEDKPSASSTARTSRPVSLHRSRTSDHGVKP

SEQ ID NO: 281319 - protein, 155 aa, Zea mays
  Clone ID: MRT4577_19665C.1.pep
CARRELICDQQGLNACLLPLQHWLASEDERRLGCSTVAALYSLLGGPRCSLLGGRRPVLGGLLLGSPTLYSEDAWWMAETGLALGGGGCLQPSTVDEQFGTWELGGSLALAARVRNWETRESEREIDRYSETLSVRSPGPLGLLSVGLAAMRPCC

SEQ ID NO: 281320 - protein, 54 aa, Zea mays
  unsure (1)..(54): unsure at all Xaa locations
  Clone ID: MRT4577_19666C.1.pep
XGRVYIGKHNFKKVLTVELYIHKSLLTKRSVFFCMHTVLERPQYRVNMYKKKVL

SEQ ID NO: 281321 - protein, 87 aa, Zea mays
  Clone ID: MRT4577_19667C.1.pep
MLAVGFTVHSFTHTSSCAGPMGAVRSRSRLPLPSRGLLMLLDTGVEAVHLADAETPNEETADPAAETEVFASKEPGSDEADTDSKEV

SEQ ID NO: 281322 - protein, 38 aa, Zea mays
  Clone ID: MRT4577_19668C.1.pep
RKKQEMRSVMVENKAPPRRSLRYAMKVGEGQLFVWYAW

SEQ ID NO: 281323 - protein, 60 aa, Zea mays
  Clone ID: MRT4577_19669C.1.pep
EFPPPRTTGFPLLGPFGLNPERAGLSLGLGKVRFNPGINQPPFFCNKNHLISLLNKGNFG

SEQ ID NO: 281324 - protein, 227 aa, Zea mays
  unsure (1)..(227): unsure at all Xaa locations
  Clone ID: MRT4577_1966C.1.pep
MASNGNGTARVVVPEIKFTKLFINGEFVDAASGKTFETRDPRTGDVLAHVAEADQADVDLAVKSARDAFDHGKWPRMSGYERGRVMSKLADLVEQHTEELAALDGADAGKLLLLGKMIDIPAATQMLRYYAGAADKIHGDVLRVSGKYQGYTLKEPIGVVGVIIPWNFPTMMFFLKVSPALAAGCSVVVKPAEQTPLSALYYAHLAKLXAAFPEGGINVVPGLVSPS

SEQ ID NO: 281325 - protein, 349 aa, Zea mays
  Clone ID: MRT4577_19670C.1.pep
MPCLESMSGGPFPSLSRLELDTLPSLGEVWLVAETTILPSGEGAGHNVHDTGTPGSGRQVRVGGRLSYLFIQDCPRLRLRPHMPSSLESLHLSESSEQLLQLPADQCLGSSSSYSNFSHLKKLGLWGMTGLGSGRRWELLQHMTALESLEINSSLVLRELPEGLRSLTCLQSLIVFACSDLLVLPEWIGELASLQQLCIWSCDVLSSLPQSLGQLTSLQMLSIDACYELHRLPERIGELCSLRKLRIRDCRMLACLPQMSGLTSLQELLISDCPGLTSLPQGMMSGLVSLEKLIVSDCPGIKFLPQDIKGLTTLMELRIRRCPDLERRCETGKGEDWHLISHIPNLRIW

SEQ ID NO: 281326 - protein, 134 aa, Zea mays
  Clone ID: MRT4577_19671C.1.pep
TFSSLLVIHKPNASEIYLLWFCGITKDHGGCSTRDYTTVSSQKHCQDSTFLKALSRFNLFKPIKLVGHNNERFELQNAIFFNIRVSLGLHFTREKMNYFSLKTKNQLRKWGFQNSAQQQTRKKSLFSSKRPRGR

SEQ ID NO: 281327 - protein, 121 aa, Zea mays
  unsure (1)..(121): unsure at all Xaa locations
  Clone ID: MRT4577_19672C.1.pep
MVKFLKPGKAVILLQGRFXRPYGHCLVAGLAKYPKKVIRKDSAKKTAKKSRVKCFIKLVNFTHLMPTRYTLDVDFKDVATGGPDALSTHDKKVAACKTAKARLEERFKTGKNRWFFTKLRF

SEQ ID NO: 281328 - protein, 81 aa, Zea mays
  Clone ID: MRT4577_19673C.1.pep
DPPYGHCLVAGLAKYPKKVVRRDSAKKTAKKSRVKCLIKLVNFTHLMPTRYTLDVFLAESRGSQVYCSCVLRMFGLGVLLN

SEQ ID NO: 281329 - protein, 137 aa, Zea mays
  Clone ID: MRT4577_19674C.1.pep
MVKFLKPGKAVILLQGRFAGRKAVIVRVFEEGTRDRPYGHCLVAGLAKYPKKVIRKDSAKKTAKKSRVKCFLKLVNFTHIMPTRYTLDVDFKDVASGGPDALATRDKKVASCKAAKARLEERFKTGKNRWFFTKLRF

SEQ ID NO: 281330 - protein, 137 aa, Zea mays
  Clone ID: MRT4577_19675C.1.pep
MVKFLKPGKAVILLQGRFAGRKAVIVRVFEEGTRDRPYGHCLVAGLAKYPKKVVRRDSAKKTAKKSRVKCFIKLVNFTHLMPTRYTLDVDFKDVATGGPDALSTRDKKVAACKAAKARLEERFKTGKNRWFFTKLRF

SEQ ID NO: 281331 - protein, 115 aa, Zea mays
  Clone ID: MRT4577_19676C.1.pep
PRVRLRLKDEKLEAFRWRAVSMDVEAARLRSRIHELEGRLARHEKHSAALEALLQDRESENRALEEQLETLQAQALGVEICTPARGSGQDDGLDDQCIACSPVDAVQRTMSSGSS

SEQ ID NO: 281332 - protein, 137 aa, Zea mays; identical to SEQ ID NO: 281330
  Clone ID: MRT4577_19677C.1.pep

SEQ ID NO: 281333 - protein, 58 aa, Zea mays
  unsure (1)..(58): unsure at all Xaa locations
  Clone ID: MRT4577_19678C.1.pep
AIIMXGWGRRKLRACEHEENCRVAPMQKSRSIGRKIFWSPLVVYWWYWIPPFIVPGSE

SEQ ID NO: 281334 - protein, 246 aa, Zea mays
  Clone ID: MRT4577_19679C.1.pep
MLGWNLDWPTGSFSVRQRKATVVLMLGLGPLTTSLTSDPELLHPAPPEARARQHRPILDPTAETHPPGNPSAAILYNLLSSPCSDLTHLPNPTLPAAAAAAQQRQQHPKMVKFLKPGKAVILLQGRFAGRKAVIVRVFEEGTRDRPYGHCLVAGLAKYPKKVIRKDSAKKTAKKSRVKCFIKLVNFTHLMPTRYTLDVDFKDVATGGPDALSTHDKKVAACKTAKARLEERFKTGKNRWFFTKLRF

SEQ ID NO: 281335 - protein, 570 aa, Zea mays
  Clone ID: MRT4577_1967C.1.pep
MEIETGRGSGPRSIGYNSRTPRSPEESETSRVRGRGHKTEVPKRSICASPRPSRNHLIQKQTSMASNGCNGNGNGKAAPAGVVVPEIKFTKLFINGEFVDAASGKTFDTRDPRTGDVLAHVAEADKADVDLAVKSARDAFEHGKWPRMSGYERGRIMSKLADLVEQHTEELAALDGADAGKLLLLGKIIDIPAATQMLRYYAGAADKIHGDVLRVSGRYQGYTLKEPIGVVGVIIPWNFPTMMFFLKVSPALAAGCTVVVKPAEQTPLSALYYAHLAKMAGVPDGVINVVPGFGPTAGAALASHMDVDSVAFTGSTEVGRLIMESAARSNLKTVSLELGGKSPLIIFDDADVDMAVNLSRLAVFFNKGEVCVAGSRVYVQEGIYDEFVKKAVEAARSWKVGDPFDVTSNMGPQVDKDQFERVLKYIEHGKSEGATLLTGGKPAADKGYYIEPTIFVDVTEDMKIAQEEIFGPVMSLMKFKTVDEVIEKANCTRYGLAAGIVTKSLDVANRVSRSVRAGTVWVNCYFAFDPDAPFGGYKMSGFGRDQGLAAMDKYLQVKSVITALPDSPWY

SEQ ID NO: 281336 - protein, 167 aa, Zea mays
  unsure (1)..(167): unsure at all Xaa locations
  Clone ID: MRT4577_19680C.1.pep
RGHFRGFGAFKGFLPQFCPPGKTQFSGGKPRFTGIGGTNPGANRNPPGXGGXXGERGKRAQKGKTPPTGFGLFLGRGGNKGAPGEKGFRRGKGFFWVNFFFWAPPLFSSFWRFIFFCGFFFFCISPPFNLFDPGKPIFGEKGESDKKPRPFFNIPPFYPPPPLGGAP

SEQ ID NO: 281337 - protein, 80 aa, Zea mays
  Clone ID: MRT4577_19681C.1.pep
GFDFPRGITPPPLFVRGRAQLWGGKNPPPPPPLRGWGFPKKKKKKKKKKKKKKKKKKKKKKKKKKKKKKKKKKKKKPKNK

SEQ ID NO: 281338 - protein, 75 aa, Zea mays
  Clone ID: MRT4577_19682C.1.pep
TTHRLTTIQPTSLGHTNFHLITESSSHQYNIAILMNHTFSSKIVYSCPISIITLTLYTANILFYDHHTNLIHLIP

SEQ ID NO: 281339 - protein, 50 aa, Zea mays
  unsure (1)..(50): unsure at all Xaa locations
  Clone ID: MRT4577_19683C.1.pep
EATKAIKPILGEYYQFEPXTPIAKAMWREARECIYVEPENGRGILWYNKF

SEQ ID NO: 281340 - protein, 103 aa, Zea mays
  unsure (1)..(103): unsure at all Xaa locations
  Clone ID: MRT4577_19684C.1.pep
MVTKTLSIGAPIAVPMNGTNAGSIPQXSLGPSLIIAQVLPTGTVMGFQQRDRHDFWPQQATAAQRLQQPIGQMQQQFVAHLTIQTIGTLQSQQFLPTLWHLVM

SEQ ID NO: 281341 - protein, 62 aa, Zea mays
  Clone ID: MRT4577_19685C.1.pep
LDLFYRASPSIVSPTGHTYNGTRQTGLNYNETSKHLKEQGYLFPLGHLTSWSSWGRCPECAK

SEQ ID NO: 281342 - protein, 130 aa, Zea mays
  unsure (1)..(130): unsure at all Xaa locations
  Clone ID: MRT4577_19686C.1.pep
AHLAAGDVYDWXRRCCXRSRXTFAYRGTWGXGSSGVVTSVPANVEHVLKANFDNYPKGPYYRERFAELLGGGIFNADGDSWRAQRKAASAEMHSARFVQFSAGTVERLVRRELLPLLESLSGREGPKSAA

SEQ ID NO: 281343 - protein, 46 aa, Zea mays
  Clone ID: MRT4577_19687C.1.pep
YSTFWTSNHILFVLLSGWNITFQISVIICNLSKQESINKLDKSKGA

SEQ ID NO: 281344 - protein, 73 aa, Zea mays
  Clone ID: MRT4577_19688C.1.pep
TAPCLHPWVIIAQVRKFFALRAYRQGIILQVIQELCFLCFQAGIWQDYTASQSPEPILLTPICFDKQWNHKSS

SEQ ID NO: 281345 - protein, 64 aa, Zea mays
  Clone ID: MRT4577_19689C.1.pep
STPRRHTHILSIHTHIAGVGNDARIPHTILSQKQEQLMLPRGTRKAPTYMTSGTGTPRSPCGTR

SEQ ID NO: 281346 - protein, 55 aa, Zea mays
  Clone ID: MRT4577_1968C.1.pep
LVRLQAFPVWFLDPDSMVRSLVVRNIIYSADLFRCGPILPLRSLPMVHSRFLLEC

SEQ ID NO: 281347 - protein, 73 aa, Zea mays
  Clone ID: MRT4577_19690C.1.pep
LTVPSLLTPTTVTQVAFLGVLGASPLLLEDQHLPLSPGKVKCSPRPPPPVGTFIQTYLLGMKGQKPINKNMFP

SEQ ID NO: 281348 - protein, 50 aa, Zea mays
  Clone ID: MRT4577_19691C.1.pep
RVSKKKCNVARLSSRIDPEWMIIWLGLYKISFIYISSSQDVCNLSPKVCS

SEQ ID NO: 281349 - protein, 106 aa, Zea mays
  Clone ID: MRT4577_19692C.1.pep
PPFSFFPLFFSFFFFFFFFFFFFFFFFFFCPHESRSPGYAEESHQTKQVSHSYHYITVLVNEKTLKGGGGGGQSIIRRYSLLSRISVEQKEKHIPFFLFPINSSCF

SEQ ID NO: 281350 - protein, 281 aa, Zea mays
  Clone ID: MRT4577_19693C.1.pep
VMGERGCLVSPQQCEDKFNDLNKRYKRLTDILGRGTTCRVVANPELLDGMANLSDKMKDAARKILSSKHLFYEEMCSYHNNNWFSLPEDPALQRSLQLALKCKDEHDARKRASGDADEDDQSADTDYEEENDDEHPITHANKGTLLTRKRLRYMPADMEDVGFGNSSSSHDCSWRSDPHSIAVDINKASPDGTNLASVQKDLATQSAEIEKQRMEIEVEALELAKQRLKWEAFSKKKDRELEKMRLENEQMKIENKRLELEVRYKELELEHKPQGHGSHAT

SEQ ID NO: 281351 - protein, 37 aa, Zea mays
  Clone ID: MRT4577_19694C.1.pep
KKWGLGFMMYRCKNNVWLVLLMWMLCLSRKPYVIPRE

SEQ ID NO: 281352 - protein, 361 aa, Zea mays
  Clone ID: MRT4577_19695C.1.pep
MALVTSGSGADQVIAEVAMNGGADPSATTVRATVVQASTIFHDTPATLDKAERLIAEAAGYGSQLVVFPEAFIGGYPRGSTFGFGISISIINPKDKGKEAFRRYHASAIDVPGPEVTRLAAMATKYKVFLVMGVIEREGYTLYCSVLFFDPLGRYLGKHRKLMPTALERIIWGFGDGSTIPVYDTPLGKIGALICWENKMPLLRTALYGKGIEIYCAPTADSRPVWQASMTHIALEGGCFVLSANQFCRRKDYPPPPEYEFAGLGEEPSADTVVCPGGSVIISPSGEVLAGPNYEGEALITADLDLGEIVRAKFDFDVVGHYSRPEVLRLVVNDQPQLPVSFTSAAERTPAAKSDIDTKSY

SEQ ID NO: 281353 - protein, 80 aa, Zea mays
  unsure (1)..(80): unsure at all Xaa locations
  Clone ID: MRT4577_19696C.1.pep
LDGGPPPADPPPCWTGAPPACIAPXIKSPPPTGGPPXTPPPPGNGAPKLNPNPPRGPPPFFGAPANFGPPPPGIKPKTFP

SEQ ID NO: 281354 - protein, 84 aa, Zea mays
  Clone ID: MRT4577_19697C.1.pep
NPKGGFFFNLRVKPRGGPYSLWKGGGPPKFPPFFKRGPPPGNLRGPRGLGPPFNYLQPIPAGGAPFRDIRTRAPGGEWVDPTPP

SEQ ID NO: 281355 - protein, 153 aa, Zea mays
  unsure (1)..(153): unsure at all Xaa locations
  Clone ID: MRT4577_19698C.1.pep
KQPPPHFKPPGLIKNLPEGVCSRLNQKKTPDQKFDPRPLGNRPGPPKGKAQGXFLPLKAGGXFKSPRPWGGKKNGTPPFSPREGEPIGGGQPRGPPWPPXNSPGAPARRDLQRRNPKGEPVGLKRGPRFFGPXPSPGRGPPPPPVPNFAPPPP

SEQ ID NO: 281356 - protein, 63 aa, Zea mays
  Clone ID: MRT4577_19699C.1.pep
VRNRLLTECRAGASPAWRRWRAASRRGLQTLIVILLVHLVMDDDSSYHTAGRVAYWCVQCTSR

SEQ ID NO: 281357 - protein, 49 aa, Zea mays
  Clone ID: MRT4577_1969C.1.pep
PSPMQYYRSSIILQHLSKKISKIDEATSGSSRWMLPGGSAREGKSGRCI

SEQ ID NO: 281358 - protein, 54 aa, Zea mays
  unsure (1)..(54): unsure at all Xaa locations
  Clone ID: MRT4577_196C.1.pep
NVTSYINNPLSFDDTLIEFCKNXXDNPEEGIACMSXXVLTAAVRPPEPPFTAFQ

SEQ ID NO: 281359 - protein, 123 aa, Zea mays
  Clone ID: MRT4577_19700C.1.pep
GHHHPPPPGHHQPQRSGPKEAHRTDRESDTGNRGASDPEHGGAHADEVNGRQPHEGKRMVAHAGQTVGKSQGATVRVGQEAAGDSAKDAQGAKAQLKEEGQRSLKGSSQWSHNCSANSGDSDS

SEQ ID NO: 281360 - protein, 77 aa, Zea mays
  unsure (1)..(77): unsure at all Xaa locations
  Clone ID: MRT4577_19701C.1.pep
KAKTLPXRTRAXNQLVLFGLFKQTPVGNVKTDCPGIFFQKDRAKLDAWKAVXANSRIXAMNYFLPKVKQLQEEASPF

SEQ ID NO: 281361 - protein, 74 aa, Zea mays
  Clone ID: MRT4577_19702C.1.pep
PPLFFSSKLFQTKIKKNYSFFTPLLNFSPPFFFFLKKLFFISFLIKTHNYTFHIFHINKNLLASTKNKISPSFF

SEQ ID NO: 281362 - protein, 76 aa, Zea mays
  Clone ID: MRT4577_19703C.1.pep
PGAIFNRGGGFFWVPPTTGGPRGGVRPVGVEGSVPGRPWLAYNSKRGFIRVEGNPPFVQFINARRRVNSFSPGLSL

SEQ ID NO: 281363 - protein, 70 aa, Zea mays
  unsure (1)..(70): unsure at all Xaa locations
  Clone ID: MRT4577_19704C.1.pep
KNFLKSLFFNRQKTITVGSCLPQTYFPKPPGKNPKQLKLKIKDIPMVSFXKQIARTTDRSGQGDDSDSLL

SEQ ID NO: 281364 - protein, 75 aa, Zea mays
  unsure (1)..(75): unsure at all Xaa locations
  Clone ID: MRT4577_19705C.1.pep
KHTAPSLLSIPNPGPNTNGSQFFICTVXTPWLNGKHVVFGQVVQGMHVVQAIKKVGTPTGSTSKVVKVSDCGQLS

SEQ ID NO: 281365 - protein, 100 aa, Zea mays
  Clone ID: MRT4577_19706C.1.pep
GAGGVGAFFFFFFGINACVISWDSGLEACQAVRGGGQASRGVRQKASGGTCVEKLDGWRDFAIRARYGILVRFSSMREPRYALARVVSFFFFFFFFVFFF

SEQ ID NO: 281366 - protein, 183 aa, Zea mays
  unsure (1)..(183): unsure at all Xaa locations
  Clone ID: MRT4577_19707C.1.pep
RTPTRPPTRAHAYCVTCILRWASYKENPLCPQCKHPFEFLSVHRSLDGXVNPCSSEMVGGWLKIFRSPSIRIGNRRWGDNGYIRGGRKEARPVNTDVAAGPSRTPKKKEKAASSSASVSVSGSGSGSGSVSKDVAGRRAKRAQKREAADKAAAEKHLKHLQRLGLRKSPEPVVPEEVGPQVNE

SEQ ID NO: 281367 - protein, 258 aa, Zea mays
  unsure (1)..(258): unsure at all Xaa locations
  Clone ID: MRT4577_19708C.1.pep
PAGTHHFFLRTRSFVREGAPSCPHIRSSLPDTDRPLVRSPPSPIPTAMAAAAAAASSSSSSEXFRSPPAPASPXEVAVGAVATGSGDRVAADCGVCAICLDRIALQETALVKGCDHAYCVXTCILRWASYKENPLCPQCKHPFEFLSVHRSLDGXVTPCSSEWVXRVAEXSAWFEPLIVEAHEEALEEEEFLHQQYQYDDDEDDLDEESYYMNRSPSIRIGNRXRWGDNGYIRGGRKEARPGIXDVAAGPSRTPKKKR

SEQ ID NO: 281368 - protein, 131 aa, Zea mays
  Clone ID: MRT4577_19709C.1.pep
PAGSRVAYSRPAASPLAEQLSSAEAETSRNCRSGAARRRARSQKANKWSSTASSGRSDFRCVQVSRKQAPATSLCYFAMAFRRSMTVFSPCKLKSPSPLATMSENICRCSDALGSTLVSSSLSPTSNTKII

SEQ ID NO: 281369 - protein, 58 aa, Zea mays
  Clone ID: MRT4577_1970C.1.pep
TISGAYIIHSEGTKLILSDLNTKTMSLTLQNHTLYNLTPIPTNHIPSHILHHIFTNNR

SEQ ID NO: 281370 - protein, 219 aa, Zea mays
  unsure (1)..(219): unsure at all Xaa locations
  Clone ID: MRT4577_19710C.1.pep
TLFFLRTRSFVREGAPSCPHIRSPPSPAPTDPSSARLPPRSPPPWPPPPPRPPLPPPRFRSPPAPASPSARXGGRGGYKQRRPGGGGLRGVRHLPRQDSAPGXPSSRVATTPTGAPSCPHIRSPPSPAPTDPSSARLPPRSPPPWPPPPPRPPLPPPRFRSPPAPASPSARWRWARWLQAAARVAAERGVRHLPRDSAPGDLVKGDTLLLYFDYKENPL

SEQ ID NO: 281371 - protein, 106 aa, Zea mays
  Clone ID: MRT4577_19711C.1.pep
LGGGGRGGGDRVRRQLQSVGRLAAYLGGGFLLLSATSSVAVRALRAISDANQGAALLELPGKWLRLKKRCQFSLSMIDGCWGVGKETIGNLLMNSLPCVIIIAVSL

SEQ ID NO: 281372 - protein, 131 aa, Zea mays
  Clone ID: MRT4577_19713C.1.pep
MELGGGGRGGGDRVRRQLQSVGRLAAYLGGGFLLLSATSSVAVRALRAISDANQRKFAKPCGACEGKGSYSRRLCRGSATIEWSPMHDLVFVNRGLCPTCDGTPVQRCLNWMRCQFSLSMDVGCWESLVRK

SEQ ID NO: 281373 - protein, 58 aa, Zea mays
  Clone ID: MRT4577_19714C.1.pep
STRSNIPSAILLPHTFCIETNSLIWVHIEIPLTHSINIINDQINLLILHRAYHLSRII

SEQ ID NO: 281374 - protein, 213 aa, Zea mays
  unsure (1)..(213): unsure at all Xaa locations
  Clone ID: MRT4577_19715C.1.pep
MAVHDEPLHILFFPFLASGHLIPIADMAALFAGRGVRCTILTTPVNAAIIRSAVKRANDAFAGTGCPAIDIAVVPFPDVGLPPGVENGTALSSQDDRDKFFHAATLLREPFDRFLADHRTDAVVSDSFFHWSVDAAAERGVPRIAFLGSSMFARSCSDSMLRHNPLENAPDDPDAFVALPGLPHRIELRRSQMMDPAKKPWQWQFLQXVNAAD

SEQ ID NO: 281375 - protein, 87 aa, Zea mays
  unsure (1)..(87): unsure at all Xaa locations
  Clone ID: MRT4577_19716C.1.pep
IDRSYGHTMHLYPRTRTARLGGFNDSGIXRVRSNICERHDLCEQHHMSLXSSERALATXYNMRHTSLRCGKVVGLPMPQALQRPLER

SEQ ID NO: 281376 - protein, 97 aa, Zea mays
  unsure (1)..(97): unsure at all Xaa locations
  Clone ID: MRT4577_19717C.1.pep
HTLLTLLRRTSRPTSAADDDDYDHIGCLRGVNDVARHNNALLGAAVVGLRARHPRATIVFADFYTPIRRILENPNQGGGXSDVLKACCGTGGAYNWN

SEQ ID NO: 281377 - protein, 86 aa, Zea mays
  unsure (1)..(86): unsure at all Xaa locations
  Clone ID: MRT4577_19718C.1.pep
FRRXRSSPCXFLLPGSRCLFGALLLPVNRASVFFFFFLXXXXXFCLGGRXXXXXXRFFFAGGLLCSVFAXRSVFCSGRAWAALAFL

SEQ ID NO: 281378 - protein, 62 aa, Zea mays
  Clone ID: MRT4577_19719C.1.pep
KLLQPPPIFMKFSKIPPKGVPPQGNRGFFFLQNLNFPPFQRFFSTIDPGFLLKILKNFYHFS

SEQ ID NO: 281379 - protein, 49 aa, Zea mays
  Clone ID: MRT4577_1971C.1.pep
LIYSFLPDWTLLNCCVGYCLCPVHQHLPLLQLLPILQVWFKNLTWDSST

SEQ ID NO: 281380 - protein, 111 aa, Zea mays
  Clone ID: MRT4577_19720C.1.pep
VFLNGYYRRSYSTRPHLSHWFVIQYYCGMAYKKTPSPWGSCILQDVLPYAYYRVYMHTNMSTTTINGNGWTLHTVMTIGGMNNLFIMRHISTLKTHTLFGHIVRTTTTTLF

SEQ ID NO: 281381 - protein, 88 aa, Zea mays
  unsure (1)..(88): unsure at all Xaa locations
  Clone ID: MRT4577_19721C.1.pep
QKYGQRLFLPIWGPQSSKPAKACHLFSKYGRGGGGNVQDSLLPTGGFKKIKRPMLGSGPKPKSLPFFWVKLARAPYNQFARXKKKKXK

SEQ ID NO: 281382 - protein, 77 aa, Zea mays
  Clone ID: MRT4577_19722C.1.pep
GRAIPSRGCGQAAQRQMGSASQGSPCGGAATAKRGQATPARAQPRCRADTRPQRAQAQPRRAMLVLSWIKLKRVRAI

SEQ ID NO: 281383 - protein, 93 aa, Zea mays
  Clone ID: MRT4577_19723C.1.pep
TRAALSGRLLLVIIHSLLLLAPENFQHCICTNQIAPVPAPPTRPHPPEESHVGKGRGKMPQKFRPLLHLSWTEAAPADVGRRAKDPARLPKNS

SEQ ID NO: 281384 - protein, 47 aa, Zea mays
  unsure (1)..(47): unsure at all Xaa locations
  Clone ID: MRT4577_19724C.1.pep
MAVTITWVKARHIFDSRGNPTVXVDVVLSYCSYSRGALPIXSFTGIY

SEQ ID NO: 281385 - protein, 42 aa, Zea mays
  Clone ID: MRT4577_19725C.1.pep
CVSSIVQAFQSLFMRIVSEKTKKNKHKQKKKKRRAAADMECS

SEQ ID NO: 281386 - protein, 112 aa, Zea mays
  Clone ID: MRT4577_19726C.1.pep
NPRGKVDGMPALSTTMNQGNIAKRRKQEGDKIEDGDVIREIETDKATLEYESPEEGKKAKNTAPEGYKEEQVGQPKAETEEEREDTKRIPAETSHGGEQKEEQPTESAPKNK

SEQ ID NO: 281387 - protein, 80 aa, Zea mays
  Clone ID: MRT4577_19727C.1.pep
LNQQRATTQQLHRETTGGLQQRGHPKVTLWSYQHHTRTDFAPTWIPRACAGTTLKLRGTPGTPQGGRRNQRRMRRVSCTP

SEQ ID NO: 281388 - protein, 46 aa, Zea mays
  Clone ID: MRT4577_19728C.1.pep
MSETHASAGRKIDDPELLEAVRLTIINNMIQYHPVTTLTLFFLLLL

SEQ ID NO: 281389 - protein, 108 aa, Zea mays
  Clone ID: MRT4577_19729C.1.pep
YYIVVVSVAPYPFEPYSIGVYPCIMIADIRMGSFVHWKISGMVSDANGQRMTLMDNRHGILCHHDCVHGGKEVLLPPSSCQVASHIGVSVEGILFIRPYPAVCCCWSV

SEQ ID NO: 281390 - protein, 164 aa, Zea mays
  Clone ID: MRT4577_1972C.1.pep
DEFGQYASAGNSMGTTGMKWSNLDDSLNGMRVVLIIMVVEWAIVLPLAFYVDQVSPLGGGFRKNPFFFLGCFKKSPLSLRRYSFGRQGSKVVVEMDNPDAVQEREVVEQLLLEPIANQAILSDNLKKVYHGKDGNPDKLAVRGLSLAIPKGQCFGMLGPNGAGK

SEQ ID NO: 281391 - protein, 81 aa, Zea mays
  Clone ID: MRT4577_19730C.1.pep
GRGGKSLINRLYFLPGSLGYKPTPYTCLGWTPFKPSSILTIFPVFLPFSRPNFNLFRDRIFTYIHVNGPNTKPTFAINGRL

SEQ ID NO: 281392 - protein, 39 aa, Zea mays
  unsure (1)..(39): unsure at all Xaa locations
  Clone ID: MRT4577_19731C.1.pep
GRETKQNGKGYFXDPRPGSNMDPYVVPPMIAETPIIWKP

SEQ ID NO: 281393 - protein, 254 aa, Zea mays
  unsure (1)..(254): unsure at all Xaa locations
  Clone ID: MRT4577_19732C.1.pep
MARHHLLLFLPLLALAFSFVVAAPERQGDAAAFIDGASHRYLRDQQEDQATSMSLDEVSAAVSVLLGFAPPAMLPAPSSAKFNKLLLPNPFDRPRSVFLMQLDGSHDYVDCFISDAGSIYKTKIDGAKSAAIELTDKDELIVIRSDESSGLDVLDNELANLATWLAGSYQKADSKLNIPLKSGNSLTLFLTKEADVEFASSLISLLKTIKRXIQVHEDFSGGIVSHAELLVCHFTGIXALENEYGPAEIVKQGA

SEQ ID NO: 281394 - protein, 197 aa, Zea mays
  Clone ID: MRT4577_19733C.1.pep
RPGPKKKYPVPVFHQLMDELSHACWFSKLDLKAGYHQILLKAGEEYKTAFQTHIGHFEFRVMAFGLTGAPNTFLEAMNSTLKPVLRRCALVFFDDILIYSSTFEDHLLHLAEVLLLLLKDHWKVKLSKCDFAQQQISYLGHIISAQGVSTDPAKIQAIEQWPVPTSAKKLRQFLGLAGFYQKFARNFRMISRPLFIF

SEQ ID NO: 281395 - protein, 126 aa, Zea mays
  unsure (1)..(126): unsure at all Xaa locations
  Clone ID: MRT4577_19734C.1.pep
AWFSTSSTMATIRAAICHVQSLIKGVTKGYRYKMRXVCDHFXPISGAIASSDPSIQIRHFLGXKKVRKVGMLDGGPILPSDKVKNKLILDGTAVKLVSRCPSLITQRGQCKKKHISKFLDGIYVSS

SEQ ID NO: 281396 - protein, 175 aa, Zea mays
  Clone ID: MRT4577_19735C.1.pep
MDCDGVTDVEEGAVLLDDIVAGAKQGQGSDEVPLLPKAYPPNARVYTTLMKGYTDAGRVDDVLAVLRAMRQEAQTAPASRPDHVTYTTVISALVGAGDMARARAVLNEMAAARVPANRVTYNVLLKGYCQQLQIGQARELFEEMVTDAGIQPGVVTYNTLMDGCVLTDDSAGALA

SEQ ID NO: 281397 - protein, 115 aa, Zea mays
  unsure (1)..(115): unsure at all Xaa locations
  Clone ID: MRT4577_19736C.1.pep
EVYHPGALKAAFAEFISTLMCFVAGQGSGMAFSKLTGXGGPTTLAGLIAEGVAHAFALYEAVSVGANISGGHVNPAVTFGAFVGGIITLLRGLLYXVAHLLGNTAACFLLRFSKG

SEQ ID NO: 281398 - protein, 89 aa, Zea mays
  Clone ID: MRT4577_19737C.1.pep
LKFVKACVSGNKAPLVCRSVQPKREREKKGGFPGCNKPTTTNFGPPWHLSVLVSHMLCCQANTAVCAWPCAAEFVNMLPSPKEKKKKKS

SEQ ID NO: 281399 - protein, 53 aa, Zea mays
  Clone ID: MRT4577_19738C.1.pep
IFDEPQCSGGPLLDSKGHMIGINAAIFTQTGKINSISRNCASKTYDSISTSIK

SEQ ID NO: 281400 - protein, 206 aa, Zea mays
  unsure (1)..(206): unsure at all Xaa locations
  Clone ID: MRT4577_19739C.1.pep
VSHVACLTLAMTNLXDLHNDXDTDIAAALIESLRAXLILLCDLPGLPQPTCPRGPLCLLLAPSMRKRIRIDAALEATDERRIKEVKPELVEGPDCAMDNAGKDFVDLVCPRGYVYDIMTSSKRFVLLTDAHFLVTXYWLAINTAYCAENVECSTTXLLDRPPRLPXSSVGYSVLYXKDYVIIWQPARVIGANCPVFDCDLTNDYLT

SEQ ID NO: 281401 - protein, 209 aa, Zea mays
  unsure (1)..(209): unsure at all Xaa locations
  Clone ID: MRT4577_1973C.1.pep
MAKGGAATVILAVVLLCLCHPAKNDGSLSLLVVGDWGRKGACNQSRVAEQMGRRGVAPREKYIANLLKDLDKALKKSTGKWKIAIGHHTMRSVSHHGNTEELLQLLLPILENNGLDFYINGHDHCLEHISSRDSPIQYFTSGGGSRAWRGFFQPNEDKLKFFYDGQGFMSLQLYQDQAEFPFYEXDGNILYQYSQWSLRETYLRHSYVA

SEQ ID NO: 281402 - protein, 72 aa, Zea mays
  Clone ID: MRT4577_19740C.1.pep
AMLLMHSHVCSEFGSRWTPRHPFWSPTRRSKKREIVELESGTQARGKQKSCIVTHVKDLYQLGDLDTGALVS

SEQ ID NO: 281403 - protein, 43 aa, Zea mays
  Clone ID: MRT4577_19741C.1.pep
VSSSVGCFCSRLASGEARSCPLSGGCLGLPRAQQALQVCLVGV

SEQ ID NO: 281404 - protein, 79 aa, Zea mays
  Clone ID: MRT4577_19742C.1.pep
SLVNRKHGLLSTNWLTSEYEQIILWPLAYRISVIFVYANIQHDSAAPDGSCTACTTYCESIRTTTREHAGEAGISLLHN

SEQ ID NO: 281405 - protein, 79 aa, Zea mays
  unsure (1)..(79): unsure at all Xaa locations
  Clone ID: MRT4577_19743C.1.pep
MASGTMALCSTALTGKAVNVPSLCVFGEARVTMRKTEGNANPYEAYGSSWYGPDRVLYLGPLTGEPPNXLTGELPCDYS

SEQ ID NO: 281406 - protein, 174 aa, Zea mays
  Clone ID: MRT4577_19744C.1.pep
GWSQGPHSRLYPRLELALGFLSQPPLLRCYLQKRVLNSSKGPVVRALRAQTDKREYAIEMKNSVDKVYAVNLAGPYGKGNQWRSLSFSPPAVRPFQLAKRSRAAAMASAGAPAVPQAGRPASNFDVIVVGAGIMGSCTAHAAVSRGARIQLLERLFENRYGTHRTMMFFRVRLT

SEQ ID NO: 281407 - protein, 44 aa, Zea mays
  Clone ID: MRT4577_19745C.1.pep
HAREYKQFYDSMCNEWDRFPSQLTIDSAEGALRNQIRKDYGLSL

SEQ ID NO: 281408 - protein, 85 aa, Zea mays
  Clone ID: MRT4577_19746C.1.pep
MGNVLPCLVQQAGTAAGALPAMNPKRRLISLKLLTKAIHKMKKRLGPSKAAKIDSKPLPSSATVEDGEGGEVRVEARSKATSSTN

SEQ ID NO: 281409 - protein, 53 aa, Zea mays
  unsure (1)..(53): unsure at all Xaa locations
  Clone ID: MRT4577_19747C.1.pep
LXAPRQPNHLGPRLAGKPRFSRRKRPTVLGTVRSIAQGRSGREAEMIEAALND

SEQ ID NO: 281410 - protein, 113 aa, Zea mays
  unsure (1)..(113): unsure at all Xaa locations
  Clone ID: MRT4577_19748C.1.pep
MSPVFLSVCTMTKAPTAPRVRLYVRGTILGYKRSKSNPDESTALVXIDGVXTKEGLSTWYIDXRMMNLYXDRTLSSXTRYRCICXQVARPHXGYSVVDLYKFIAXLPPDYMGG

SEQ ID NO: 281411 - protein, 159 aa, Zea mays
  unsure (1)..(159): unsure at all Xaa locations
  Clone ID: MRT4577_19749C.1.pep
TPPVPTLHWHCFLSLDRMMRVRYASLMRVSKERAGLVSYSVVENSAFCSLNHTVVSFTLFFSEIHSFYSVXRLVVYSSFFVLRNHFXFSLXERLDSWSFRXISLPPTRITXGLLCGSVWXSRAWGSYRNWPPNLSWAFKAWAASSVFLHSRKNPNWKCP

SEQ ID NO: 281412 - protein, 124 aa, Zea mays
  unsure (1)..(124): unsure at all Xaa locations
  Clone ID: MRT4577_1974C.1.pep
DTLVXHGRTDAPGALAPRSDATVSRLVKNGLCGCMPGDDGIDDFGVEDDDAHPTVDARKRKGSMALRDLARDGADTEKKAMKMRMEDHRRGRHTRMVKNKPRSRRKDSCGTYDQDDLERLDPRA

SEQ ID NO: 281413 - protein, 371 aa, Zea mays
  Clone ID: MRT4577_19750C.1.pep
MEFTLNPDLVPQNRHAVIKVYVSRKWIFRGAMDNGPIHHIDLVLIDKEGNGISAEIPGNLAEEKGSIIEENEIYEISRFIISSARQMFKPVHIDKMIHFTYHTIIKASLDSPSTFPRYVYHLTPLHQIESYIQKNEYFLDVLGVITQVSALKPVRTQTQESSNVIKEIIIKDINDVTMRLTLWAERAKAFKLDDVYNPLEQKPIVTLFVGCLAKNFQGAYLNGGTACRWYFNPGIKEAAPYYQRFGSQKIKLQIPSEQEQQLSVAKETHVEHKTLHELLALDPYAFPKQGYECTVTIIEVPTTNRWWFPSCTKCSRACRPQDGGYYCSYCKSEAYTLRSQVLDVAQGTNADKGIPTDKGKEIEPHLQSPPK

SEQ ID NO: 281414 - protein, 59 aa, Zea mays
  Clone ID: MRT4577_19751C.1.pep
PNLLKFSPFCFPDSGRDENKYLRAVSPLFLDNFNINRLMHLVFLPPLRTLYSMFHSVLK

SEQ ID NO: 281415 - protein, 51 aa, Zea mays
  Clone ID: MRT4577_19752C.1.pep
VLFLIQHKSCITKNSYKLRGATDNFVTHSIKTQTPLRIFFSRILFAYFHRI

SEQ ID NO: 281416 - protein, 74 aa, Zea mays
  unsure (1)..(74): unsure at all Xaa locations
  Clone ID: MRT4577_19753C.1.pep
FLGIWERKKVFPRKQFFALFGEGFNRFXIGKVGGLTGTGWDFPGYTRGPMGKGRLFFWSKNLVRKKIFVCQGWV

SEQ ID NO: 281417 - protein, 63 aa, Zea mays
  unsure (1)..(63): unsure at all Xaa locations
  Clone ID: MRT4577_19754C.1.pep
IQEIKEITNAMWLLGLGVTLAGARTPXRRCFMFHKAMARYAITLRQAXVILCAFATEKSWWPD

SEQ ID NO: 281418 - protein, 58 aa, Zea mays
  unsure (1)..(58): unsure at all Xaa locations
  Clone ID: MRT4577_19755C.1.pep
TRKSCRSGRPFTASRVPQGQGLVQXKFFLVVQRALFKNQVTEAMLFTPIFLPANKGAC

SEQ ID NO: 281419 - protein, 50 aa, Zea mays
  Clone ID: MRT4577_19756C.1.pep
PRLLLHQLFIFNLFIASASTRCYRTGRTVPFHTSRMSSRYYSMTSPKTYS

SEQ ID NO: 281420 - protein, 66 aa, Zea mays
  Clone ID: MRT4577_19757C.1.pep
MHSRPLLLCIFSFCMRILYHLFWGVNQRTGHVSKKKKKKKKKKKKRKKRKKNKKKKKKKKKKRGGG

SEQ ID NO: 281421 - protein, 42 aa, Zea mays
  Clone ID: MRT4577_19758C.1.pep
SVASPLTGECLRTVAYRPCRPPRPRHHASPRAHEGGTVVGFL

SEQ ID NO: 281422 - protein, 135 aa, Zea mays
  unsure (1)..(135): unsure at all Xaa locations
  Clone ID: MRT4577_19759C.1.pep
ANVGVYQRXRQLXQIMPTLTQLXMENPAVYLHLLSSXSPVACGQXHYGSLTSNEYACIHMXTQLMTHASXAHTADYLQHXLPFNQLGKSNCDGYLQQRQQLLNALAVANPXVATLLQQQQQVXPYNQLSLMNPAL

SEQ ID NO: 281423 - protein, 59 aa, Zea mays
  Clone ID: MRT4577_1975C.1.pep
PTRIQIPPLILFPPFLNLFPPVFEPKPLPLPFGLHFLNQTAPFFNFSRVKRTRPHATNL

SEQ ID NO: 281424 - protein, 100 aa, Zea mays
  Clone ID: MRT4577_19760C.1.pep
GTPSPSWAPLSSMWPTVVVLCCCFRVRVRGLLDVGCSRVWWALGGGCTVTSASAGTRPCGSSLWGLVLCGAVAPNQVPASAAQLWDTSTLAGGCGRRLIA

SEQ ID NO: 281425 - protein, 66 aa, Zea mays
  Clone ID: MRT4577_19761C.1.pep
SQLFWGGSPNGFVPHRVPSFFSEIGPLIQAGEGDFLPLKKKVFEWGGPPFASGHPGLAEILFPFPP

SEQ ID NO: 281426 - protein, 154 aa, Zea mays
  unsure (1)..(154): unsure at all Xaa locations
  Clone ID: MRT4577_19762C.1.pep
MEIIHQQRKIDEDTKEVRHLTQDDHNQRPQYRELRQEGTFNKDEWYDDFNHGSFTFDDASPLTAELQAIPWPQSYKPPQLTMYDGHSDTKQFLMSYEATISSYGGNAAVMAKSFVMAVQNVVQTWYSSLRPGTITSWQKLKDILVTSFXGFQTK

SEQ ID NO: 281427 - protein, 76 aa, Zea mays
  Clone ID: MRT4577_19763C.1.pep
LFTTKKYRSTTRTNSRSVCYTVPYMYISNENSSIRRLTSFNTYQIPQQGHQDFVHPAPPTFFPSVFLKLVHCLLHF

SEQ ID NO: 281428 - protein, 225 aa, Zea mays
  Clone ID: MRT4577_19764C.1.pep
CILHSFLGLLPRYRNVTAARQRRLPPLGPRRPLPPPHLLAAVIAFAFALLFLLLVLLSSSSPHSPPPSHHAVVARSSSSSAPPSARCSSAAASLGELGDAMVSMLPKDLPFTVFVPSADSFTRVLRLQGSKSNASTGDQEAATDTDTNTYAILSRVLGFSAVPRRLLAADVPVPPRGAGAVRLLDSVSGLRLYASRDARGALVVNGVRSECVDIIRGRTRGRTLA

SEQ ID NO: 281429 - protein, 154 aa, Zea mays
  unsure (1)..(154): unsure at all Xaa locations
  Clone ID: MRT4577_19765C.1.pep
MLKVVCRRLSSALDWSTAAAASGSRGPLAGTLPGRDDDDARDCRARFSXINHPFFARCHRIFSKDSCAPRXHDVDVSELRAXTVASENNPQXKIEHDEHNHERYPPADANKGAFDYFELSAARIIYTYFAASFIDLELVHTMSDSNDDRRLASL

SEQ ID NO: 281430 - protein, 81 aa, Zea mays
  unsure (1)..(81): unsure at all Xaa locations
  Clone ID: MRT4577_19766C.1.pep
MTRALTMVAMIVTDALFFMADSSQQSGTQDGGALCPNCLCCSQXGYCSSTPHYCTYGMHSHRLHRMHRQRQYPYYFPERAC

SEQ ID NO: 281431 - protein, 56 aa, Zea mays
  Clone ID: MRT4577_19767C.1.pep
HWFRRLATLKQGLQSQVRRKAWLVGDQYLLPHPGTPEAKPSPDPERKRVNQVTYFL

SEQ ID NO: 281432 - protein, 97 aa, Zea mays
  Clone ID: MRT4577_19768C.1.pep
LKWLKWRAGRNPANKKERKKGKNDAEPEWQRRNIASSSAANYSSRSSTVLGVCWSLHRAAALPWAVVGAAFAAALPLADDPAAARAAAARVPRPKLV

SEQ ID NO: 281433 - protein, 99 aa, Zea mays
  unsure (1)..(99): unsure at all Xaa locations
  Clone ID: MRT4577_19769C.1.pep
MSGAAEENKKTPEGGCHILLRXKGPDGSDGFFRIXHSTHLTNLMNAYWDRQPADVNAIACLFDDPMLHTEYTPDDLYMEDGDNIHAMLHLTGGSVPSTT

SEQ ID NO: 281434 - protein, 98 aa, Zea mays
  Clone ID: MRT4577_1976C.1.pep
RANWWRIAFGKPKGATLDYVNTRPFSLPPKRAKEFKAFFGRRYFFRLFLKVSKIAPPLIRGAINKKSFPGSHFWGAKNGRFFGVIFSGVSPPLGGKKA

SEQ ID NO: 281435 - protein, 139 aa, Zea mays
  unsure (1)..(139): unsure at all Xaa locations
  Clone ID: MRT4577_19770C.1.pep
MGLPTTLRDLTYADCHEGTKVEGDPPPAGITDYAQYQLGELVAVELPXLTYAXSHGKTLGYGDSVNGAXDLSXPLSGDVVEANEILHDSPGLVNTGAYDNGXPIKGRPNMPGELNGLMHADQCSKYCEQRNHRRNGNGF

SEQ ID NO: 281436 - protein, 65 aa, Zea mays
  Clone ID: MRT4577_19771C.1.pep
YDVTAQAADLGHAHARAPRRTTRSRLARLTGDLYLRSLSVTTPSSSEALVISHAGNDHARTHAAG

SEQ ID NO: 281437 - protein, 71 aa, Zea mays
  Clone ID: MRT4577_19772C.1.pep
TKLGRVVYITAYNIDLACFFMGKKTTDKATKLTATPIPHSATPTRGDNGTVSRPRMAPAHGAAEPRRWHCF

SEQ ID NO: 281438 - protein, 94 aa, Zea mays
  Clone ID: MRT4577_19773C.1.pep
GLGGPQIFSILNPPINPLPQALKNHAITSYQPKPRKPPVPGEMGMPLTSRLRNPAEQDTWTPWLQRTRHTTCAGIAWHSLVISSRAGDQVLHGS

SEQ ID NO: 281439 - protein, 38 aa, Zea mays
  Clone ID: MRT4577_19774C.1.pep
MGSSVKKAAVAETTARAVDQAVAYVLMAAALAVTYLVH

SEQ ID NO: 281440 - protein, 96 aa, Zea mays
  Clone ID: MRT4577_19775C.1.pep
MVKSLDHITIRGLFLLFMFLVASFVGHAQIIRGETKENKDTNSMTMTTTRLGSYVISMDEKSSLCFLDPRTLWYICKITYRLFRTLKDCLEFCHSI

SEQ ID NO: 281441 - protein, 246 aa, Zea mays
  unsure (1)..(246): unsure at all Xaa locations
  Clone ID: MRT4577_19776C.1.pep
NKQYPYPRRCRTGRPRTKKDPETEMREGHNYVPRDEQFSEVKQLTFGATTLRSGLHALLPALRPLLINKKDLRFPHFPAIDELYSDGIPLPAQTGFDAIRTVVPRMVKLVEDTTDHVLRFEXDRFAWFKDEEFARQTIAGLNPLCIQLLTEFPIKSKLDPEVYGPAESAITKEILEKQMNCALTVEQALAAKRLFILDYHDVFLPYVHKVRELQDATLYASRTIFFLTDLGTLMPLAIELTRPKSP

SEQ ID NO: 281442 - protein, 76 aa, Zea mays
  Clone ID: MRT4577_19777C.1.pep
HSPRGLCGATTPSHSCHDKSFHEGLRRESGGPGLVLLFPQLCRGSKVPLFISQPWLASHQEFRLNAFHVMEGKANS

SEQ ID NO: 281443 - protein, 130 aa, Zea mays
  Clone ID: MRT4577_19778C.1.pep
KVGRARAYCLGPPTLHTYQLQDLNTTYTPTDKWWLRRPCRARVGTGSQTVLDSLLSLIASETVQGMVKKGLSSLISLRAWMIWNHRNRCVFDGQTPSLPSILRQADDERRVWELAGAKGLSFLAASLPND

SEQ ID NO: 281444 - protein, 70 aa, Zea mays
  Clone ID: MRT4577_19779C.1.pep
MLTVTASVEASPAIGQMYFQRAVDDVGDLFGKTLLLELVSSELDASEYSHSLLLSVWMGAMHACILTAST

SEQ ID NO: 281445 - protein, 64 aa, Zea mays
  Clone ID: MRT4577_1977C.1.pep
KGFFFVPLWQISIKSFFIHKPKIVCFPSKQIFGVLLRLAFLLMCEVIFCRNWPFPNCYRRAFSK

SEQ ID NO: 281446 - protein, 147 aa, Zea mays
  unsure (1)..(147): unsure at all Xaa locations
  Clone ID: MRT4577_19780C.1.pep
MMNLNLKQPLVLPAHHSNVVGSRLSSPSPSAAAASRRTGGGVSSRSGSRRPVRLPRISCSATEEVSGAVSSVTVERMLTVTASVEASPAIGQMYFQRAVDDVGDLFGKTLLLELXSSELDASEYSHSLILLSVWMGAMHACILTAST

SEQ ID NO: 281447 - protein, 112 aa, Zea mays
  Clone ID: MRT4577_19781C.1.pep
VRRPLPLMPGADVDQDEPETAAQLIIVYGGRALVLDDVAADKAADLLRLAAAAAARGGTEQPLCSLADLPVARKASLQRFMEKRKDRVAARAEPYRRRRPVGDRRNDLALEL

SEQ ID NO: 281448 - protein, 403 aa, Zea mays
  Clone ID: MRT4577_19782C.1.pep
TSTDLGTLMPLAIELVRPKSPTQPQWKRVFTHGPDATDAWLWKLAKAHVVTHDTGYHQLVSHWLRTHCCVEPYIIAANRQLSRLHPVYRLLHPHFRYTMEINALAREALINADGIIEESFWPGRYAVELSSAAYGATWQFDTEALPNDLIKRGLAVRGEDGELELTIKDYPYAHDGLLVWDSIRQWASEYVNVYYKSDEAVAADPELRAFWDEVRNVGHGDKKDEPWWPVLDTRDSLVETLTTIMWVTSGHHSAVNFGQYHFAGYFPNRPTTIRKNMPVEEGGPGEEMEKFLKQPETTLLDMLPTQMQAIKVMTTLDILSSHSPDEEYMGEFAEPSWLAEPMVKAAFEKFGGRMKEIEGFIDECNNNLDLKNRCGAGIVPYELLKPFSKPGVTGRGIPSSISI

SEQ ID NO: 281449 - protein, 95 aa, Zea mays
  Clone ID: MRT4577_19783C.1.pep
SFASDSFAIPSIHVCGSVRLVVCSCVHERLIPRPKWLLHARNARSLTQLFGKLKFGAWPFVVTHLADSIKHHELAITAKKCRYSERHPSYMLWLD

SEQ ID NO: 281450 - protein, 40 aa, Zea mays
  Clone ID: MRT4577_19784C.1.pep
RGLVTSVPRLEAYRTRLQLYKLTGVEGPSRANSMDSFHDR

SEQ ID NO: 281451 - protein, 120 aa, Zea mays
  unsure (1)..(120): unsure at all Xaa locations
  Clone ID: MRT4577_19786C.1.pep
MANPTVLFNXTGTGASAGLIENXLHANEVPREPCENLRALYTVENDLVNCVKPFHYXDCTLHRVIPEXYMCIGXGNFTRVNDTXGDESIYGXKFSDEKLVLKHTAPDLLFMGNNMPNNNG

SEQ ID NO: 281452 - protein, 212 aa, Zea mays
  Clone ID: MRT4577_19787C.1.pep
MMNLNLKQPLVLPAHHSNVVGSRLSSSSPSAAAASRRTGGGVSSRSGSRRHVRLPRISCSATEEVSGAVSSVTVERMLTVTASVEASPAIGQMYFQRAVDDIGDLLGKTLLLELVSSELDASEYSHSYCRPYGWAPCMHDACILLVVAELDPTLMVATILYIYILMGHGHYIAQPATKRKSLLNRGYIYRCVDDGYHNNNENIVQILCVQEI

SEQ ID NO: 281453 - protein, 207 aa, Zea mays
  Clone ID: MRT4577_19788C.1.pep
MLRMDQMEMLLGMPLPVTPGLEKGLSSSYGTIPAPQRFLRSRLLLHSSMNPSISFILPPNFSNAAFTMGSASHDGSANSPMYSSSGGPGEEMEKFLKQPETTLLDMLPTQMQAIKVMTTLDILSFYSPDEEYMGEFAEPSWLAEPMVKAAFEKFGGRMKEIEGFIDECNNNLDLKNRCGAGIVPYELLKPFSKPGVTGRGIPSSISI

SEQ ID NO: 281454 - protein, 59 aa, Zea mays
  Clone ID: MRT4577_19789C.1.pep
AHVLPDRLTIPRVSGSALVHCRPPAHLRGQSSGYPARDNDVRLRKPYRSCCRDTLEELC

SEQ ID NO: 281455 - protein, 294 aa, Zea mays
  Clone ID: MRT4577_1978C.1.pep
MGAASSTIHSADLPRLLCCACVEQSTVAMEETCGRYDTVLQPGCHFMPWCVGRRVAGYLSLRVQQLNVRCETKSKDNVFVTVVASVQYRAIEDKAYDAFYRLSNAREQIQSYVFDVIRASVPNMNLDQVFEQKNEVARAVEEELAKAMTMYGYEIVQTLIIDIEPDEVVKRAMNDINAAARLRVAAAERAEAEKIQQVKRAEGEAESRHLAGVGVARQRQAIVDGLRRFVPDEKSVMDMVLATQYFDTIRDIGATSRAATVFIPHGPAAVHDVAAQVRDGVLQAAAYNPYAGTK

SEQ ID NO: 281456 - protein, 467 aa, Zea mays
  unsure (1)..(467): unsure at all Xaa locations
  Clone ID: MRT4577_19790C.1.pep
MMNLNLKQPLVLPAHHSNVVGDLLGKTLLLELVSSELDAKSGVEKTRVTAYAHKTLREGHYEAEFKVPASFGPVGAVLVENEHHKEVFIKEIKLVTGGDSSTAVTFDCNSWVHSKFDNPEKRIFFTLKSYLPSDTPKGLEDLRKKDLQALRGDGHGERKVFERVYDYDVYNDLGDPDKNPAHQRPVLGGNKQYPYPRRCRTGRPRTKKDPETEMREGHNYVPRDEQFSEVKQLTFGATTLRSGLHALLPALRPLLINKKDLRFPHFPAIDDLFSDGIPLPAQTGFDAIRTVVPRMVKLVEDTTDHVLRFEVPEMIESKLASRRXISGLLVILILKKINDLLCXDRFSWFKDEEFARQTIAGLNPLCIQLLTEFPIKSKLDPEVYGPAESAITKEILEKQMNGALTVEQALAAKRLFILDYHDVFLPYVHKVRELQDATLYASRTIFFLTDLGTLMPLAIELTRPKSP

SEQ ID NO: 281457 - protein, 755 aa, Zea mays
  Clone ID: MRT4577_19791C.1.pep
HEDLGIEAKEAAVREVAKLLPFPELLSSIASIKYDYLTRQQINDAQLSTMVADQVEQAHAGINALALSHITINKLRENFIDIDKLCQECQTLIENHDKIKLLSNTRNNLNTTLKDVGGMMSISVEAVAAHDSLSNDQELIHTYERLTALDGKRRFALAAASSHKEEVGRLREYFEDVDRTWETFEKTLWSQISNCFILSKESPQTLVRALRVVEMQEILDQQVAEEAAEAEGAGAMATITNQRRTAKKGAGATVTPRKGTQEKSKVQGKGYKDKCYESIRMAVEARFNKLLTELVFVEDLMEALEEAKAIGDELGDIYDYVAPCFPPRYEIFQLMVNLYTERFIQMLRLLSDRANDIQNINILKVTGWVVQYQENLIGLGVDESLAQVCSESGALDPLMNMYVERMQATTKKWYSNILEADKTQPPKSTEDGKLYTPAAVDLFRILTEQVQIVRDNSTDVMLYRIALAVIQVMLDFQAAERQRLEEPASDVGLESLCALINNNLRCYELSSELSSSTLEALPQNYAEQVNFEDTCKGFLEVAKEAVLQTVSVIFEDPGVQDLLVKLYQKDWLEGMVTEYLVATFADYFGDVKMYIEERSFRRFVEACIEETIVVYVDHLLSQKNYIKEETIERMRLDEEVLMDFFREHINVTKVESRVRILADMRELASAESLDSFTLIYTNILEHQPDCPPEVVEKLVAMREGIPKKEAKEVVQECKEIYENSLVDGNPQKSGFVFGKLKCLTAKKGIWRKLGQ

SEQ ID NO: 281458 - protein, 95 aa, Zea mays
  unsure (1)..(95): unsure at all Xaa locations
  Clone ID: MRT4577_19792C.1.pep
QGLREGGPSARAGVPPVASLRLPLSFRWPAATLFAFFAPFSRFVGGGGACSQPPGAPVNGFIPSSXATQNAFPLVLVIFVSLLAFCSSCMAWAFP

SEQ ID NO: 281459 - protein, 71 aa, Zea mays
  Clone ID: MRT4577_19794C.1.pep
TFVTFDLREAVSNYVSNGEELCSGRRRLSVEAVTTLLRPSRLVVRPSPELDAYPRVWGDKVPTCLQAHKSA

SEQ ID NO: 281460 - protein, 941 aa, Zea mays
  unsure (1)..(941): unsure at all Xaa locations
  Clone ID: MRT4577_19795C.1.pep
MGAIGGDAPVQWDKVDGAEVANGGGGGAAGRLEKILVSVRLRPLSDKEISRGDPAEWECINDTTIISRSTFPDRPTAPTAYSFDRVFRSDCTTKEVYEEGTKAVALSVVSGINSSVFAYGQTSSGKTYTMTGITEYTAADIYDYIAKHEERAFVLKFSAIEIYNEVVRDLLSAENTSLRLWDDAEKGTYVENLTEVTLRDSDHLKELIXLRVKLKRRTGETYLNENSSRSHQILKLTIESSAHEFLGKDKSTTLVASVNFVDLAGSERASQALSAGTRLKEGCHINRSLLTLGTVIRKLSKVRNGHIPYRDSKLTRIXTFSRRQCKNSNYLYNEPSPEPYGXQSRNTLLFASCAKEVVTNAQVNVVMSDKALVKQLQKELARLESELRCPASYSGLEALVREKDNQIRKMDKEIKELKLHRDLAQSRLQDLLKVVGDNHGSKHPLASSGRNFTFDVPQPCEDEQSTTSEAISSGQXILGFKXPDXTQRDYRSQQSENDVQFATPLSYSISSPPFSGMPPTNGRNDNSHISDEDSEDLCKEVRCIETNETEENECLESSAVGSNSLQDSNLASSMHGNDNTNRSVNSGRNDASSITLEQHLENVKKPFANPGMDLGSSTRNSSSSKVIGRSRSCRSLMGSTLLEDLEKEVCTPPSRSFMDYPGRPETCQRRVPALNYDAESEALSRAGSMLSEITTTRGGLKENSSAAGDTEFVAGIGEFVAELKEMAQGHNGELAEGTIRSVGLDPIMDILQSPSRWPLEFEKKQQEIIDLWHGCNVSLVHRTYFFLLFKGDPADAIYMEVELRRLSFLKNTYSNGSMGYDMVAGSLSTSLVSSAKKLQREREMLCRQMQKRLTIQERESLYTKWGVSLSSKRRRLQVARRLWTETRDLEHVRESASLVARLIGLLEPGKALREMFGLSFAPQQSTRRSHSSWRYGRSSLD

SEQ ID NO: 281461 - protein, 73 aa, Zea mays
  Clone ID: MRT4577_19796C.1.pep
FTLHTRIYLGSKSKEESQGTVENIRGHYFLVSQSTFLVPDFWCPFDSNRSACTGPRLATTRLISPMKEYLFYA

SEQ ID NO: 281462 - protein, 90 aa, Zea mays
  Clone ID: MRT4577_19797C.1.pep
MAPKRSAPPAPPPPTADSSEETASGSGSEEEEEEEEEEDDLETVHSPSSVAPKSVAPMPHNVQEPEASDEDEYDDEDDEPYKVQEPETSD

SEQ ID NO: 281463 - protein, 63 aa, Zea mays
  Clone ID: MRT4577_19798C.1.pep
SISGVIPIYQNMTLREVVLQDKARISLRKPYVFRYSLYKNLDRTNNEVHPISQIHRRGFPRRY

SEQ ID NO: 281464 - protein, 76 aa, Zea mays
  Clone ID: MRT4577_19799C.1.pep
RFSRFRLPSPLWATPRTLHVRNSTPITTGLDLWSVTCTLTSTEFILMYCLLCCRQSSRSRGEVIDFINFRCYLGSY

SEQ ID NO: 281465 - protein, 180 aa, Zea mays
  Clone ID: MRT4577_1979C.1.pep
MSTEKKQLNPMREIKVQKLVLNISVGESGDRLTRAAKVLEQLSGQSPVFSKARYTVRSFGIRRNEKIACYVTIRGEKAMQLLESGLKVKEYELLRRNFSDTGCFGFGIQEHIDLGMKYDPSTGIYGMDFFVVLERAGYRVSRRRRCKARVGIHQRVTKEDAMKWFQVKYEGVILNKSHAS

SEQ ID NO: 281466 - protein, 62 aa, Zea mays
  Clone ID: MRT4577_197C.1.pep
KYINSLSILLKHESGFMQVLFTKDVKKLILYIFVSSQRITLVCICTSTLLGHFLSNSFFVWP

SEQ ID NO: 281467 - protein, 123 aa, Zea mays
  unsure (1)..(123): unsure at all Xaa locations
  Clone ID: MRT4577_19800C.1.pep
RLELIFLXIRETLEXFNDVVKALNKALRDTKQMVRGGSALTAKQMQLQVGILPSIAECLDGFQTLCEMHHDEFTLKSSAISLLTWKTCSSDIAVLRQLLVDQPNIPKDEVQSIFDIIFADEIC

SEQ ID NO: 281468 - protein, 75 aa, Zea mays
  unsure (1)..(75): unsure at all Xaa locations
  Clone ID: MRT4577_19801C.1.pep
VSLTESKCVLGYFLNFTSLRKLXLSIGLLATPYGFVVGAYPHEKAWWSGVIQKPXVQKVPAVINASGSMRCPVNR

SEQ ID NO: 281469 - protein, 327 aa, Zea mays
  Clone ID: MRT4577_19802C.1.pep
MASSDISVDIRPDINSFDHFLSMRYIATDRPWLKLYGIRVQPVPPFSSLSYKPDPALIHHCLPDELMLEIFTRMSPYTLGRAACVCRKWKYTARNPTLWRAACLKTWQRSGMEANYMMVRSLYDSSWRRMWLQRPRIRIDGLYVSRNTYIHTGVTEWQFKKTVNVVCYYRYLRFFPSGKFLYKISPDKVKDAVKCMHFRASKADCVFKGDYVLSEDGQIEMALLYPGHRYTLVRMHLRLRGTTVGANNRLDVLKILTTGVNATELQNWKGSILELVEGWEEDETHDPDVPAVSHSRGLSPFVFVPFEEADTSVLNLPVEKMDYYVPG

SEQ ID NO: 281470 - protein, 76 aa, Zea mays
  Clone ID: MRT4577_19803C.1.pep
ESRCFSLHPELLKKYRDQLNARINDPEAHFTSVSPIDPVCGLTEGSVDPTASLLAQAELLSLDEISDGLESECSLL

SEQ ID NO: 281471 - protein, 80 aa, Zea mays
  Clone ID: MRT4577_19804C.1.pep
GFSSKNTFFVVGNNTFFFIILAGILASSIRLQINPSPLSCGLARPWGPPGSASTSPKKLSDLIEMHYAHESIALTSLNNQ

SEQ ID NO: 281472 - protein, 45 aa, Zea mays
  Clone ID: MRT4577_19805C.1.pep
GSGSQPNPHVGDASYLFSQNPRRDSTNPRNSGCHCDRAYLVVAIN

SEQ ID NO: 281473 - protein, 77 aa, Zea mays
  unsure (1)..(77): unsure at all Xaa locations
  Clone ID: MRT4577_19806C.1.pep
FIAICSQINTNEHRLILSSPNPVTHLPTPKQSCWQKFSGWKFINSCQTHIIHKLSSRHGLSLLPSADYCADVVFPXX

SEQ ID NO: 281474 - protein, 76 aa, Zea mays
  Clone ID: MRT4577_19807C.1.pep
RPPCYSAQVKWIYPPPLQELKKCDGRVRKPGTARSDRPFLFFLFFFFFFFFFFFPFFFFFFLAINMPHGNIDRHMT

SEQ ID NO: 281475 - protein, 129 aa, Zea mays
  Clone ID: MRT4577_19808C.1.pep
LEAAGTVTRGGPHRVAVCALKVEVLVVIGHSCCGGIRALLSLQDGAPDTFHFVEDWVKIGFIAKMKVKKEHASVPFDDQCSILEKGAVNVSLENLKTYPFVKEGLANGTLKLIGAHYDFVSGEFLTWKK

SEQ ID NO: 281476 - protein, 62 aa, Zea mays
  Clone ID: MRT4577_19809C.1.pep
EKMNLILEARGRKYGVFKKASASLDLFDSAALFFFLFFFFTAFKLVLFYIIIVHSLFYFLFI

SEQ ID NO: 281477 - protein, 120 aa, Zea mays
  unsure (1)..(120): unsure at all Xaa locations
  Clone ID: MRT4577_1980C.1.pep
PAGEELAAKIRASHPPDRHSSSQTTTMSLACLVCHGMSSPSHSLRSYSVSSSEEESRCGAVVACLARRVTPAGTSTSVGTSKVTPFPPVVSDQVGXRALLDFNAAVLCPGTLLETGTSTK

SEQ ID NO: 281478 - protein, 359 aa, Zea mays
  unsure (1)..(359): unsure at all Xaa locations
  Clone ID: MRT4577_19810C.1.pep
MYTLPVRPTTSSIVASLATPAPSSSSGSGRPRLRLRLIRNAPVFAAPATVXCARHHVASKRDGGQLRSQTREIERXRKGGHPPAAGDKRGGERGQRRGGEEEENEQLPLPSEKKGGASEGEAVHRYPHLVTPSEPEALXQPPPPPSKASSKGMDPTVERLKSGFQKFKTEVYDKKPELFEPLKSGQSPXXYWVFACSDSRVCPSVTLGLQPGEAFTVRNIASMVPPYDKTKYTGTGSAIEYAVCALKVEVLVVIGHSCCGGIRALLSLQDGAPDNFHFVENWVKIGFPAKIKVKKDHASVPFDDQCSILEKEAVNVSLENLKTYPFVKDGLANGTLKLVGGHYNFVSGEFLTWDPQQPS

SEQ ID NO: 281479 - protein, 206 aa, Zea mays
  Clone ID: MRT4577_19811C.1.pep
MDDPVERLKDGFHKFKTEVYDKKPELFEPLKAGQAPKYMVFACSDSRVCPSVTLGLQPGEAFTVRNIAAMVPAYDKTKYTGIGSAIEYAVCALKVEVLVVIGHSCCGGIRALLSLQDGAPDNFHFVENWVKIGFPAKIKVKKDHASVPFDDQCSILEKEAVNLSLENLKTYPFVKDGLANGTLKLVGGHYNFVSGEFLTWDNKQPS

SEQ ID NO: 281480 - protein, 84 aa, Zea mays
  Clone ID: MRT4577_19812C.1.pep
ATSSSSIKYPNVTGYFLQDETSTDPSTLDYTAVNFGLIDRTYPADQVLKNQGKDLTQWERFQHQVQKMNTESGKDVEYKVLFLG

SEQ ID NO: 281481 - protein, 556 aa, Zea mays
  unsure (1)..(556): unsure at all Xaa locations
  Clone ID: MRT4577_19813C.1.pep
MYTLPVRATTSSIVASLATPAPSSSSGSGSGRPRPRLIRNAPVFAAPATVXCARHHVASKRDGGQLRSQTREXDRERKGGHPXPAGGDKRGGERGQRRGGGEEEEDEQLPLPSEKKGGASEGEAVHRYPHLVTPSEPEALXQPPPPPSKASSKGMDPTVERLKSGFQKFKTEVYDKKPELFEPLKSGQSPRYMVFACSDSRVCPSVTLGLQPGEAFTVRNIASMVPPYDKIKYAGTGSAIEYAVCALKVQVIVVIGHSCCGGIRALLSLKDGAPDNFHFVEDWVRIGSPAKNKVKKEHASVPFDDQCSILEKEAVNVSLQNLKSYPFVKEGLVGAHYDFVKGQFVTWEPPQDAIERLTSGFQQFKVNVYDKKPELFGPLEAGQAPXKYMVFACSDSRVCPSVTLGLQPGEAFTVRNIAAMVPAYDKTKYTGIGSAIEYAVCALKVEVLVVIGHSCCGGIRALLSLQDGAPDTFHFVENWVKIGFPAKIKVKKDHASVPFDDQCSILEKEAVNLSLENLKTYPFVKDGLANGTLKLVGGHYNFVSGEFLTWDNKQPS

SEQ ID NO: 281482 - protein, 113 aa, Zea mays
  unsure (1)..(113): unsure at all Xaa locations
  Clone ID: MRT4577_19814C.1.pep
GILANANSVKECNTLLADMKLVEGCNALLLFVSENPIRSGGGGMCARITCGTELFLLWCGHWLPSKMEVCLRIEMRQLMKEPNTRSRSDLPFSQMETANGKQCGVXRTLTNSR

SEQ ID NO: 281483 - protein, 547 aa, Zea mays
  unsure (1)..(547): unsure at all Xaa locations
  Clone ID: MRT4577_19815C.1.pep
MYTLPVRATTSSIVASLATPAPSSSSGSGRPRLRLIRNAPVFAAPATVXCKRDGGQLRSQTREIERERKGGHPPAGGDKRGGERXQRRGGEEEEDEQLPLPSEKKGGASEGEAVHRYPHLVTPSEPEALXQPPPPPSKASSKGMDPTVERLKSGFQKFKTEVYDKKPELFEPLKSGQSPRYMVFACSDSRVCPSVTLGLQPGEAFTVRNIASMVPPYDKIKYAGTGSAIEYAVCALKVQVIVVIGHSCCGGIRALLSLKDGAPDNFTFVEDWVRIGSPAKNKVKKEHASVPFDDQCSILEKEAVNVSLQNLKSYPFVKEGLAGGTLKLVGAHSHFVKGQFVTWEPPQDAIERLTSGFQQFKVNVYDKKPELFGPLKSGQAPKYMVFACSDSRVCPSVTLGLQPGEAFTVRNIAAMVPGYDKTKYTGIGSAIEYAVCALKVEVLVVIGHSCCGGIRALLSLQDGAAYTFHFVEDWVKIGFIAKMKVKKEHASVPFDDQCSILEKEAVNVSLENLKTYPFVKEGLANGTLKLIGAHYDFVSGEFLTWKK

SEQ ID NO: 281484 - protein, 274 aa, Zea mays
  unsure (1)..(274): unsure at all Xaa locations
  Clone ID: MRT4577_19816C.1.pep
KEGLFGDPEAKWSALNGKPDAAKWWGSYGGQCPELQRIARRIVSQCISSSGCERSWSTFALVHTKLRNKLGFEKLHKLVKVHYNLKLQIEQFEADFQSLQEKDSDPCSMLMDVALYDDQNPIMDWLNNSMSDSAPTLDEYDDSDLDWSTPSRFVTESLQMGIEEVAEXRGTFIWGKKGCKNKQRMQWDGEDAEGTAEDYETDSSQEQGSPIYAESGDSSSNDEGDGNNDVGADGSGGTRAADGPAKGSRHGEPTPLRPRSTRKRKPTLKSITEL

SEQ ID NO: 281485 - protein, 206 aa, Zea mays
  Clone ID: MRT4577_19817C.1.pep
MDDPVERLKDGFHKFKTEVYDKKPELFEPLKAGQAPKYMVFACSDSRVCPSVTLGLQPGEAFTVRNIAAMVPAYDKTKYTGIGSAIEYAVCALKVEVLVVIGHSCCGGIRALLSLQDGAPDTFHFVENWVKIGFPAKIKVKKHHASVPFDDQCSILEKEAVNLSLENLKTYPFVKDGLANGTLKLVGGHYNFVSGEFLTWDNKQPS

SEQ ID NO: 281486 - protein, 207 aa, Zea mays
  unsure (1)..(207): unsure at all Xaa locations
  Clone ID: MRT4577_19818C.1.pep
MYHCPVXCPTSIVGPIVATPAPCSSSGSGRPRLMLIRNAPVFAAPATVXCKRDGGQLRSQTREMXRERKGGHPPAAGDKRGGERGHIIXGEEEENEQLPLPSEKKGGASEGEAVHRCGHLVTPSEPEALXQPPPPPSKASSKGMGPTGERLKSGFQKFKTEVYDKKPELFEPLKAGQSPXYMVFGCSDSRVCPSGTLGLQPGEAFTG

SEQ ID NO: 281487 - protein, 202 aa, Zea mays
  Clone ID: MRT4577_19819C.1.pep
MGDAVEHLKSGFQKFKTEVYDKKPELFEPLKAGQAPKYMVFACSDSRVCPSVTLGLQPGEAFTVRNIAAMVPAYDKTKYTGIGSAIEYAVCALKVEVLVVIGHSCCGGIRALLSLQDGAPDNFHFVENWVKIGFPAKVKVKKEHASVPFDDQCSILEKEAVNVSLESLKTYPFVQEGLAKGTLKLVGAHYDFVSGNFLVWET

SEQ ID NO: 281488 - protein, 89 aa, Zea mays
  unsure (1)..(89): unsure at all Xaa locations
  Clone ID: MRT4577_1981C.1.pep
KPLFWGKKXGWGGFLGGPGPPGQAGGGECFLVANTGGGGALPGRIVGQGNKGGLGLGFEPGVKALGTNGQGFQGGPLPGKYQFVKFGGK

SEQ ID NO: 281489 - protein, 199 aa, Zea mays
  unsure (1)..(199): unsure at all Xaa locations
  Clone ID: MRT4577_19820C.1.pep
GPRAGREIIHEKLPLPSDKSGGASEGGAVHRYPHLRLVLQEPXAPTQCCQPLIPPKVLPSKAHSSPPIXRLXSGIPDSSSTEVLMXKPELFEPLKSGQSPRYMAFACCDSRVCPAVTLGLQPGEAFSVRNIASMCPPYDKIKYAGTVSAIEYAVCALKEQVIVDIGHSCCGGIEEHISLLLGAADNSTSVGVISRQRLE

SEQ ID NO: 281490 - protein, 85 aa, Zea mays
  unsure (1)..(85): unsure at all Xaa locations
  Clone ID: MRT4577_19821C.1.pep
MWLETFMALIGEQFLXKEDICGIVVSVRAKGNKLALWIRTATNEAVQVNIGKKWKDVIVYNEKITDTFHDEFKRAKPSRGGGYTV

SEQ ID NO: 281491 - protein, 653 aa, Zea mays
  Clone ID: MRT4577_19822C.1.pep
MYTLPVRATTSSIVPACHPRAVLLLRLRPPGSGSSGTPRLRRPATVVGMDPTVERLKSGFQKFKTEVYDKKPELFEPLKSGQSPRYMVFACSDSRVCPSVTLGLQPGEAFTVRNIASMVPPYDKIKYAGTGSAIEYAVCALKVQVIVVIGHSCCGGIRALLSLKDGAPDNFTFVEDWVRIGSPAKNKVKKEHASVPFDDQCSILEKEAVNVSLQNLKSYPFVKEGLAGGTLKLVGAHYSFVKGQFVTWEPPQDAIERLTSGFQQFKVNVYDKKPELFGPLKSGQAPKYMVFACSDSRVCPSVTLGLQPAKAFTVRNIAAMVPGYDKTKYTGIGSAIEYAVCALKVEVLVVIGHSCCGGIRALLSLKDGAPDNFHFVEDWVRIGSPAKNKVKKEHASVPFDDQCSILEKEAVNVSLQNLKSYPLVKEGLAGGTSSGWPHYDFVKGQFVTWEPPQDAIERLTSGFQQFKVNVYDKKPELFGPLKSGQAPKYMVFACSDSRVCPSVTLGLQPGEAFTVRNIAAMVPGYDKTKYTGIGSAIEYAVCALKVEVLVVIGHSCCGGIRALLSLQDGAPDTFHFVEDWVKIGFIAKMKVKKEHASVPFDDQCSILEKEAVNVSLENLKTYPFVKEGLANGTLKLIGAHYDFVSGEFLTWKK

SEQ ID NO: 281492 - protein, 293 aa, Zea mays
  Clone ID: MRT4577_19823C.1.pep
MLRRNIRQRREYLYSKSLEGPQRALFEKKRRIRAALEEGKPIPTELRNEEHDLRRQIDLEDQERQVPKSIVDNEYATATIREPKILLTTSRNPSAPLTQFVKELKVVFPNSQRMNRGGQVISEIVEACRSHDITDLILVHEHRGQPDGLIVSHLPHGPTAYFGLLNVVTRHDIKDRKTMGKMSEAYPHLILDNFSTQIGERTATILKHLFPVPKPDSKRIITFANRDDYISFRHHVYEKPGGPKSIDLKEVGPRFELRLYQIKLGTVEQKEAQSEFVLRPYINTAKKQKTLGA

SEQ ID NO: 281493 - protein, 155 aa, Zea mays
  Clone ID: MRT4577_19824C.1.pep
AGRVEYFFLSSVAVNYYCYGETNEYNNCDLKKKKKKKKKKKKKKKKKKKKKKKERRRNKEKGNPRTPGKGKYKNYKGPWGRGGPETRGSPGVGGFVFCFLFPVFLGGGPGPPFPLFGGLLPPFPGRVFTRGGGGKPGGPPPYSLWGNSPFGQWGI

SEQ ID NO: 281494 - protein, 114 aa, Zea mays
  unsure (1)..(114): unsure at all Xaa locations
  Clone ID: MRT4577_19825C.1.pep
AGGTNAEYFLCPSRERVSSGHFPVSNLYESLIFLSWTLYILHTIHKIQNSKNDLSTINTXSNILRQGFEMXGSLVKMQQSXNISHCLPPQWLXMDVSMMSIRLCILIRCVSISI

SEQ ID NO: 281495 - protein, 90 aa, Zea mays
  unsure (1)..(90): unsure at all Xaa locations
  Clone ID: MRT4577_19826C.1.pep
NCELQGKKSKIHLPRISQADIVLSVYAISKVVQLINSVNKFGNHTFMVKVCKMLWLTKAPAPSIXRSCTFSFLWSRSRASCAVVYIKVQL

SEQ ID NO: 281496 - protein, 405 aa, Zea mays
  unsure (1)..(405): unsure at all Xaa locations
  Clone ID: MRT4577_19827C.1.pep
SIWASPLSYCAAEKILTAGVQFHAQLVKVGYVSSISTGNLLISFYSRCSRVGVALPVCLXVRRLDVLGXTAGPSGEPQIYQVESCLQLFALMRHSVCNPNDVTFATIFSVCTNHAFLVLGKSVQALQMRMGFDSYVHVSNALISMYAKCGSIGEARAVFESIRCKDLVSWNSLIFGYSQHGLAEHCLYLLREMEGHITPDAISFLGVLSSCRHACLVAEGRRCFRAMIEHGVVPEIDHYSCMVDLFGRAGLLDEAWDLIQTMPMPPNGVVWGSLLASCRVHGSTWIGIQAAEHRLKLEPSCAGIHVQLANLYGSIGCWDDVARVRKVMKERGLKTNIGCSWIEVGNKVYTFTAENRSKNQVNNVLVVLDCLQSHMDHEYDILLIEGLDWDYPEHIKFKFIHYINL

SEQ ID NO: 281497 - protein, 99 aa, Zea mays
  Clone ID: MRT4577_19828C.1.pep
MVCTNSVVAIAPPQHPQTAQQPQSAPLLQPFLLPTASPSPPYGTPLLQPFPPPNPSPSLASAPVLSPALSRDKVRDALLRLVENDEFIDLVYGEIMNRQ

SEQ ID NO: 281498 - protein, 409 aa, Zea mays
  unsure (1)..(409): unsure at all Xaa locations
  Clone ID: MRT4577_19829C.1.pep
MGRAPCCDKASVKKGPWSPEEDAKLKAYIEEHGTGGNWIALPQKIGXLKRCGKSCRLRWLNYLRRNIKHGDFTEEEEHIICSLYISIGSRWSIIAAQLPGRTDNDIKNYWNTKLKKKLLGKRAPSRRARANQDPYLAAGGGNSSTSGGNSAATATQTLSASALERIQLHMRLQGMYGAFGCSGGGGNDDRNAVVGAAAPQWPKLEALLQANRLLPGSLPTDAMATTVSVQQRHHQHLVDHQSLAVGAGNAAAVEGEQQQLSSADAANYMALPGGGFFERPKLGFYSPSAEAEATAAAASVEMNSVAPMVGGGYGGAGFEQYHHHDVLYEFLYSNYGSVGELAQDGHVPTLPELQCPNGAAVDGADEKFSVWTASAACDYGAAGGYQIQLGNSIGSNLHDYVLGGYDQWE

SEQ ID NO: 281499 - protein, 74 aa, Zea mays
  Clone ID: MRT4577_1982C.1.pep
HFFFGFGEPRDPPNSTILFFRTLPQSTNTNFYILAGKGRLHKLKGEFPGAFLPQARILPKRLRRAPLKGIFGIP

SEQ ID NO: 281500 - protein, 127 aa, Zea mays
  Clone ID: MRT4577_19830C.1.pep
MFRNQYDTDVTTWSPQGRLFQVEYAMEAVKQGSACVGLRSSTHAVLAAVNKPASELSSYQRKVFRVADHAGVALAGLTADGRVLSRFLRNECINHSFVYEAPLPVSMQEEERGPEDAAAAAPAPMDI

SEQ ID NO: 281501 - protein, 72 aa, Zea mays
  Clone ID: MRT4577_19831C.1.pep
GLHSLDLSGCYSRNLIIPLIFSSAPVKMNSFFVFSRPFACSIPSVIMPRVLQIVPIKSSTAVITKPRPASSR

SEQ ID NO: 281502 - protein, 270 aa, Zea mays
  unsure (1)..(270): unsure at all Xaa locations
  Clone ID: MRT4577_19832C.1.pep
MFRNQYDTDVTTWSPQGRLFQVEYAMEAVKQGSACVGLRSSTHAVLAAVNKPASEPSYQRKVFRVADHAGVALAGLTADGLSXRFLRNECINHSFVYEAPLPVSRLALKLADKAQVCTQRSWKRPYVGLLVAGLDESGAHLYYNCPSGNYFEYQAFAIGSRSQAAKTFLERRFQGYNDYTPEQLIKDAXAIKETLQGEKLSSSNCTVAIVGRKEDGTIEPFEMIGAARIQELIDSMEVAEEAPAEEASSMQEEERGPEDAAAAAPAPMDI

SEQ ID NO: 281503 - protein, 67 aa, Zea mays
  Clone ID: MRT4577_19833C.1.pep
YRERSGVIYAWGDLCKRRSSSRSSLSRGAGISLALWSHRSVRGRAFGLAVRGRIPSSRKPSGRRPQA

SEQ ID NO: 281504 - protein, 222 aa, Zea mays
  unsure (1)..(222): unsure at all Xaa locations
  Clone ID: MRT4577_19834C.1.pep
MALSVSSLAAALSHLSLPSTSTPKPHPAPLLRLRSTYRRAVSLALRASAAESFEADLPAEEVMAVEEEAEEDALSGIALRKYVKQRLPGGFAAQRITATGRRKTAIARVVLQEGTGKVFINFRDAKEYLQGNPMWMEYCKXVPLMTLGFENNYDVFVKVHGGGLSGQAQAICLGVARALVKISNANRVPLKSEGLLTRDTRIVERKKAGLKKARKRPQFSKR

SEQ ID NO: 281505 - protein, 275 aa, Zea mays
  unsure (1)..(275): unsure at all Xaa locations
  Clone ID: MRT4577_19835C.1.pep
MFRNQYDTDVTTWSPQGRLFQVEYAMEAVKQGSACVGLRSSTHAVLAAVNKPASELSSYQRKVFRVADHAGVALAGLTADGRVLSRFLRNECINHSFVYEAPLPVSRLAXLKLADKAQVCTQRSWKRPYGVGLLVAGLDESGAHLYYNCPSGNYFEYQAFAIGSRSQAAKTFLERRFQGYNDYTPEQLIKDALSAIKETLQGEKLSSSNCTVAIVGRKEDGTIEPFEMIGAARIQELIDSMEVAEEAPAEEASSMQEEERGPEDAAAAAPAPMDI

SEQ ID NO: 281506 - protein, 58 aa, Zea mays
  Clone ID: MRT4577_19836C.1.pep
RCRQAYNKHTSKRKIKLKNLMIDYLFTAVCHVAARTIRSKNEPSEWDHPYQDENLNSG

SEQ ID NO: 281507 - protein, 540 aa, Zea mays
  Clone ID: MRT4577_19837C.1.pep
MASPHLPFLSFPKTLPPLPPPLKTHAHRTSLAAAPAPPPAPPDGAGPAAPTRGDRFLGRQLATEAAARVLAPEDADRRRRRKEKRRALARKPSGLASCYGCGAPLQTAEEAAPGYVDPDTYQLKKRHHQLRTVLCGRCKPRSDAWVVTAVGGHGGYPGGKKFVSAEQLREKLSYLRHEKALIVKLVDIVDFNGSFLARVRDFAGANPIILVITKVDLLPRDTDLNCIGDWVVESVVKKKLNVLSVHLTSSKSLVGITGVISEIHQERKGRDVYILGSANVGKSAFISAMLRTMAYKDPVAAAAQKYKPIQSAVPGTTLGPIQIEAFLGGGKLYDTPGVHLHHRQAAVIHADDLPSLAPQSRLKGRCFPANDTDVELSGNSLFWAGLVRIDVIKALPRSRLTFYGPKKLKINMVPTTEADQFYETEVGVTLTPPTGKERAEGWTGLQGVRELKIKYEERDRPACDIAISGLGWISVEPSGVPSNSAEEVYDGGELHLVVHVPKPVEVFMRPPLPVGKAASQWYRYQELTEEEEELRPKWHY

SEQ ID NO: 281508 - protein, 78 aa, Zea mays
  Clone ID: MRT4577_19838C.1.pep
WPTLQNFLCHKTLGANEKCCHIGRDIRVAWLYNYAYLLTTFIANITHDNSGITCVCNMMTAICSAQQYRATDIVIAKA

SEQ ID NO: 281509 - protein, 94 aa, Zea mays
  unsure (1)..(94): unsure at all Xaa locations
  Clone ID: MRT4577_19839C.1.pep
RRCTVAERGDFQLTGDEDLYRDSLAPADLVAALCRVLFLASSRRRRLSHAVLCHQPTTYCAGAPPSAVRLRNSITSSSLSPAPPDDTCFXSSWE

SEQ ID NO: 281510 - protein, 106 aa, Zea mays
  Clone ID: MRT4577_1983C.1.pep
MAREKKVYASGGSSWIIDSGCPNPMMGEKRMFSSYVKNKDPQDSIIFGDGNQGKVKGLGKIAISSEPSIFNVFLVESLGYNLLSVSQLCNMGYNCLFPNVDVSVFR

SEQ ID NO: 281511 - protein, 55 aa, Zea mays
  Clone ID: MRT4577_19840C.1.pep
TTTNRTPKRVIFSQACCFFYLQGADNAKPRGHGVFRFDWLQVFGRLQMQYIKIKY

SEQ ID NO: 281512 - protein, 69 aa, Zea mays
  Clone ID: MRT4577_19841C.1.pep
GGRGLRHEEQGPSQVRKCVPVVYTVVPLASSLKAPGTQALVAISVKVERPGIILLFIPSRTSCQLQGGL

SEQ ID NO: 281513 - protein, 71 aa, Zea mays
  Clone ID: MRT4577_19843C.1.pep
RIFSRSSRMTMIIRRTKPPRRRNRRAPPLWRNDQASCSCYTHPLYVCMYPAQIKYLGLIKTHDNITLIMKF

SEQ ID NO: 281514 - protein, 68 aa, Zea mays
  Clone ID: MRT4577_19844C.1.pep
SPLRQQAPPGGSLFALGLGQPRGLTPPLRKGGGVVHCGGGPTPRGRGGGPLAPWFSFGLFGPQSFGGF

SEQ ID NO: 281515 - protein, 97 aa, Zea mays
  Clone ID: MRT4577_19846C.1.pep
ASLKKSTSQRIHSSDLEIIGRDWNTFLIQGLGGIHSKKKGPTQFTNPGLFEGWPLITHKNQEGCKIQSATWLKGLSGDFFHRFHIKALNWGNVRTGF

SEQ ID NO: 281516 - protein, 202 aa, Zea mays
  Clone ID: MRT4577_19847C.1.pep
MGDAVEHLKSGFQKFKTEVYDKKPELFEPLKAGQAPKYMVFACSDSRVCPSVTLGLQPGEAFTVRNIAAMVPAYDKTKYTGIGSAIEYAVCALKVEVLVVIGHSCCGGIRALLSLQDGAPDNFHFVENWVKIGFPAKVKVKKEHASVPFDDQCSILEKEAVNVSLENLKTYPFVQEGLAKGTPKLVGAPYDFVSGNFLVWET

SEQ ID NO: 281517 - protein, 206 aa, Zea mays; identical to SEQ ID NO: 212324
  Clone ID: MRT4577_19848C.1.pep

SEQ ID NO: 281518 - protein, 466 aa, Zea mays
  unsure (1)..(466): unsure at all Xaa locations
  Clone ID: MRT4577_19849C.1.pep
SAGKRHSHDQCTHCPSAPPHPASSPASPPPRRPPPPAPAAPGSGSGSSGTPPSSPPPPPSXGMDPTVERLKSGFQKFKTEVYDKKPELFEPLKSGQSPRYMVFACSDSRVCPSVTLGLQPGEAFTVRNIASMVPPYDKIKYAGTGSAIEYAVCALKVQVIVVIGHSCCGGIRALLSLKDGAPDNFHFVEDWVRIGSPAKNKVKKEHASVPFDDQCSILEKEAVNVSLQNLKSYPFVKEGLAGGTLKLVGAHYDFVKGQFVTWEPPQDAIERLTSGFQQFKVNVYDKKPELFGPLKSGQAPKYMVFACSDSRVCPSVTLGLQPGEAFTVRNIAAMVPGYDKTKYTGIGSAIEYAVCALKVEVLVVIGHSCCGGIRALLSLQDGAPDTFHFVEDWVKIGFIAKMKVKKEHASVPFDDQCSILEKEAVNVSLENLKTYPFVKEGLANGTLKLIGAHYDFVSGEFLTWKK

SEQ ID NO: 281519 - protein, 286 aa, Zea mays
  Clone ID: MRT4577_1984C.1.pep
MDPKGKGMVVNNKTKAFIVNEPRDDKPSDSGSSHKKRDGKKKRRIKKIVYYDSDESSSSPRDDDDEKKKPEQERNGKREKKKTYKKMKGEAHLGKEWDSNCSSSDSDDEGLAASAFNKSSLFPNERHTCLMAKEKKVYASGGSSWIIDSGCANHMTGEKKMFTSYVKNKDSQDSIIFGDGNQGKDKSETQGTLKRFLRRAQNEFELKVKKIRSDNGSEFKNLQVEEYLEEEGIKHEFSAPYTPQQNGVIERKNRTLIDMARTMLGELKTPEQFWSEAMNTACHAIN

SEQ ID NO: 281520 - protein, 549 aa, Zea mays
  unsure (1)..(549): unsure at all Xaa locations
  Clone ID: MRT4577_19850C.1.pep
MYTLPVRATTSSIVASLATPAPSSSSGSGSGRPRPRLIRNAPVFAAPATVXCKRDGGQLRSQTREIERXRKGGHPPAAGDKRGGERGQRRGGEEEENEQLPLPSEKKGGASEGEAVHRYPHLVTPSEPEALXQPPPPPSKASSKGMDPTVERLKSGFQKFKTEVYDKKPELFEPLKSGQSPRYMVFACSDSRVCPSVTLGLQPGEAFTVRNIASMVPPYDKIKYAGTGSAIEYAVCALKVQVIVVIGHSCCGGIRALLSLKDGAPDNFHFVEDWVRIGSPAKNKVKKEHASVPFDDQCSILEKEAVNVSLRNLKSYPFVKEGLAGGTLKLVGAHYDFVKGQFVTWEPPQDAIERLTSGFQQFKVNVYDKKPELFGPLKSGQAPKYMVFACSDSRVCPSVTLGLQPGEAFTVRNIAAMVPGYDKTKYTGIGSAIEYAVCALKVEVLVVIGHSCCGGIRALLSLQDGAPDTFHFVEDWVKIGFIAKMKVKKEHASVPFDDQCSILEKEAVNVSLENLKTYPFVKEGLANGTLKLIGAHYDFVSGEFLTWKK

SEQ ID NO: 281521 - protein, 206 aa, Zea mays
  Clone ID: MRT4577_19851C.1.pep
MDDPVERLKDGFHKFKAEVYDKKPELFEPLKAGQAPKYVVFACSDSRVCPSVTLGLQPGEAFTVRNIAAMVPAYDKTKYTGIGSAIEYAVCALKVEVLVVIGHSCCGGIRALLSLQDGAPDNFHFVENWVKIGFPAKIKVKKDHASVPFDDQCSILEKEAVNLSLENLKTYPFVKEGLANGTLKLVGGHYNFVSGEFLTWDNKQPS

SEQ ID NO: 281522 - protein, 202 aa, Zea mays
  Clone ID: MRT4577_19852C.1.pep
MGDAVEHLKSGFQKFKTEVYDKKPELFEPLKAGQAPKYMVFACSDSRVCPSVTLGLQPGEAFTVRNIAAMVPAYDKTKYTGIGSAIEYAVCALKVEVLVVIGHSCCGGIRALLSLQDGAPDNFHFVENWVKIGFPAKVKVKKEHASVPFDDQCSILEKEAVNVSLENLKTYPFVQEGLAKGTLKLVGAHYDFVSGNFLVWET

SEQ ID NO: 281523 - protein, 69 aa, Zea mays
  Clone ID: MRT4577_19853C.1.pep
RLNRPRLLPGAGSSLICSTIYANGNGDRSMGSDLADCEEEQLLPGEAFWQLIMPRFISPMSPTSFTIYT

SEQ ID NO: 281524 - protein, 455 aa, Zea mays
  unsure (1)..(455): unsure at all Xaa locations
  Clone ID: MRT4577_19854C.1.pep
MYTLPVRATTSSIVASLATPAPSSSSGSGRPRLRLIRNAPVFAAPATVVGMDPTVERLKSGFQKFKTEVYDKKPELFEPLKSGQSPRYMVFACSDSRVCPSVTLGLQPGEAFTVRNIASMVPPYDKIKYAGTGSAIEYAVCALKVQVIVVIGHSCCGGIRALLSLKDGAPDNFHFVEDWVRIGXSPAKNKVKKEHASVPFDDQCSILEKEAVNVSLQNLKSYPFVKEGLAGGTLKLVGAHYDFVKGQFVTWEPPQDAIERLTSGFQQFKVNVYDKKPELFGPLKSGQAPKYMVFACSDSRVCPSVTLGLQPGEAFTVRNIAAMVPGYDKTKYTGIGSAIEYAVCALKVEVLVVIGHSCCGGIRALLSLQDGAPDTFHFVEDWVKIGFIAKMKVKKEHASVPFDDQCSILEKEAVNVSLENLKTYPFVKEGLANGTLKLIGGHYDFVSGEFLTWKK

SEQ ID NO: 281525 - protein, 549 aa, Zea mays
  unsure (1)..(549): unsure at all Xaa locations
  Clone ID: MRT4577_19855C.1.pep
MYTLPVRPTTSSIVASLATPAPSSSSGSGRPRLRLRLIRNAPVFAAPATVXCKRDGGQLRSQTREIERXRKGGHPPAAGDKRGGERGQRRGGEEEENEQLPLPSEKKGGASEGEAVHRYPHLVTPSEPEALXQPPPPPSKASSKGMDPTVERLKSGFQKFKTEVYDKKPELFEPLKSGQSPRYMVFACSDSRVCPSVTLGLQPGEAFTVRNIASMVPPYDKIKYAGTGSAIEYAVCALKVQVIVVIGHSCCGGIRALLSLKDGAPDNFHFVEDWVRIGSPAKNKVKKEHASVPFDDQCSILEKEAVNVSLQNLKSYPFVKEGLAGGTLKLVGAHYDFVKGQFVTWEPPQDAIERLTSGFQQFKVNVYDKKPELFGPLKSGQAPKYMVFACSDSRVCPSVTLGLQPGEAFTVRNIAAMVPGYDKTKYTGIGSAIEYAVCALKVEVLVVIGHSCCGGIRALLSLQDGAPDTFHFVEDWVKIGFIAKMKVKKEHASVPFDDQCSILEKEAVNVSLENLKTYPFVKEGLANGTLKLIGAHYDFVSGEFLTWKK

SEQ ID NO: 281526 - protein, 217 aa, Zea mays
  Clone ID: MRT4577_19856C.1.pep
MALDGAVADFAMDGAGGPRGLKLLENARGKLAGPRNCWQDAYGKLFASCGEIMADKERQSRLAWHLSSCFQEDSGRSPFPSCAEGSEMVHCRKRLGESQDKVFLEFFLETNTLCHQLQAEAFKHNTERLVNDLTRTSKYAEEKLEVIEERADHIIKESSKVQDTLSSIEMQTDNLAEASKHVGVQINDVLLHSKSIFEQSKEIAAAQAELGRGQAEM

SEQ ID NO: 281527 - protein, 123 aa, Zea mays
  Clone ID: MRT4577_19857C.1.pep
LIRKFIVPRGVPPLRGFPKTKDGIFGKNAKPLGQKTAQIQRSKGGAPGLYMRTKIRRKSRSELRDFQKPWGRAARENKTWVDPFARPPKKRKNKNPQLISIIFPVTLAHNSVCPLDLEGLIIA

SEQ ID NO: 281528 - protein, 116 aa, Zea mays
  Clone ID: MRT4577_19858C.1.pep
CVIAFCHMGCIVAHLASLTGKVPRSVLQCSSFMITADLYVLGSLLIPSHMCQLLHLDGPLLQWLFGLRQGPSQSPVQSSDQAPMGVQLLPELKYPPRHKRRVRLSDTDGVDRARAE

SEQ ID NO: 281529 - protein, 51 aa, Zea mays
  Clone ID: MRT4577_19859C.1.pep
RARIARSPPWMSRKTLLVKHITLYHRRKPDYFTTTERCGMNAIKTSLHRYR

SEQ ID NO: 281530 - protein, 1544 aa, Zea mays
  Clone ID: MRT4577_1985C.1.pep
MDPKGKGIVINDKEKESFVNEPKDDKSNDSGSGHRQKDGKKKKTRRIKEIVYYDSDESSSSQKDDDNDYRKTVNSNFSFDYSRIPHNSNSHLLSIPLGKPPHFDGEDYRFWSHKMRSHLFSLHPSIWEIVENGMKFDSSDSPMLINEQIHRNAQATTVLLASLCREEYNKVSGLDNAKQIWDTLKISHEGNDVTMLTKMELVEGELGRFAMIRGEEPTQTYNRLKTLVNKIRSYGSTRWTDHDVVRLMLRSFTVLDPHLVNNIRENPRYTKMSPEEVLGKFVSGRMMIKEARYVDDALNGPIHEPQPIALKATRSKEALPSKVAQVEAAGLNNEEMALIIKRFKTALKGRKGQPSKTKTKEKRSCFKCGKIGHFIANCPDNESDQEKGDKREKKKHYKKAKGEAHLGKEWDSDCSSSDSDNEGLAATAFNKSSLFPNERHTCLMAREKKVCTQNSTYASSSEDESSDEDEVDYSCLFKGLDRTKVDKINELIDALNEKNILLEKQEDLLYEEHDKFVEAQRSHALEVKRNEMLSCELSSCHDAISKLRSINDDFNAKLEIASKSTSCVENVVACTKCKDINIDACSEHLACISKLNEEVASLNAQLNTSKSDFEKLKFARDAYTVGRHPSIKDGLGFKREAKNLTSHKAPISAKEKGKAPMASSTKRNHAFIYHDRRQTRNAYRSYNPYDDFNSHAMFASSSSCMHGRNMPRKNAMPRKNIIHALGKKDRKAYASGGSSWIIDSGCTNHMTGEKKMFTSYVKNKDSQDSIIFGDGNQGKDKSETQGTLKRFLRRAQNEFELKVKKIRSDNGSEFKNLQVEEFLEEEGIKHEFSAPYTPQQNGVVERKNRTLIDMARTMLGEVYLHRLLKKTSYELLTGNKPNVSYFRVFGSKCYILVKKGRNSKFAPKAVEGFLLGYDSNTKAYRVFNKSSGLVEVSRDVVFDETNGSPREQVVDCDDVDEEDVPTAAIRTMAIGEVRPQEQDEQDQPSSSTMVLPPTQDDEQVHQQEACDQGGAQVDHVMEEEAQPAPQTQVRAMIQRDHPVDQILGDISKGEELNNFKRNEVWTLVPRPKQNVVGTKWVFRNKQDEHGVVTRNKARLVAKGYAQVAGLDFEETFAPVARLESIRILLAYVAHHSFRLFQMDVKSAFLNGPIKEEVYVEQPPGFEDERYPDHVCKLSKALYGLKQAPRAWYECLRDFLIVNAFKVGKADPTLFTKTCDGDLFVCQIYVDDIIFGSTNQKSCEEFSRVMTQKFEMSMMGELNYFLGFQVKQLKDGTFISQTKYTQDLLKRFGMKDAKPAKTPMGTDGHTDLNKGGKSVDQKAYRSMIGSLLYLCASRPDIMLSVCMCARFQSDPKECHLVAVKRILRYLVATPCFGLWYPKGSTFDLVGYSDSDYAGCKVDRKSTSGTCQFLGRSLVSWNSKKQTSVALSTAEAEYVAAGQCCAQLLWMRQTLRDFGYNLSKVPLLCDNESAIRMAENPVEHNRTKHIDIRHHFLRDHQQKGDIEVFHVSTENQLADIFTKPLDEKTFCRLRSELNVLDSRNLD

SEQ ID NO: 281531 - protein, 54 aa, Zea mays
  Clone ID: MRT4577_19860C.1.pep
IPLYKNNYLAKPVSKLLSFKTTHPQFKKYPPPLIFHLSKTKNFFLFYPTLPRTP

SEQ ID NO: 281532 - protein, 113 aa, Zea mays
  unsure (1)..(113): unsure at all Xaa locations
  Clone ID: MRT4577_19861C.1.pep
MWRRALFMVLFMAGAALLAGAAGAXAQXGVWCILSRPLFQSLLRHRGVSGCQGAFXXYDAFIEAAGGXPRLFFFFGXXARRRELAAFFGLSPPASAGGWASVPVGPSASGFCR

SEQ ID NO: 281533 - protein, 204 aa, Zea mays
  Clone ID: MRT4577_19862C.1.pep
FFSSSFSLLFFCKKIDCVCRLRASLRNANLQAKENIRKAAQEERELLLGGGEESTIRRRNLQTKVGMTSAAESITESLRRSRQMMVQEVERSASTLATFDESTSVLRKAEGEYQGHRSLLMRTRGLLSTMQQQDVLDRIILTIGFIIFSLAVLYVVSRRIGLLTLQRKLADAIRSGSLSADDIVANAQRGPAPANVPAPIYDEL

SEQ ID NO: 281534 - protein, 97 aa, Zea mays
  unsure (1)..(97): unsure at all Xaa locations
  Clone ID: MRT4577_19863C.1.pep
MDEVTQAVENLKKEWSQAVSQLEESIAAIESCGKTGKGTEEATSLPRLNGSAQDALQLLKSLQFXLDLLAQQLPTFDEVQSGQAXLGSWDEQYRVAC

SEQ ID NO: 281535 - protein, 132 aa, Zea mays
  unsure (1)..(132): unsure at all Xaa locations
  Clone ID: MRT4577_19864C.1.pep
PRSLTLLIPCFLQSLPSSLHRPVPSPSPSLSRDPHPAIPTSDRTSHAALVHPPXPPNTRRPARSRADRSPALAXAPSAGARRNVPPPAGANAGHPLGRLRRRGAPLLHRQAGHAAPGEALARLPRPALPRQG

SEQ ID NO: 281536 - protein, 186 aa, Zea mays
  Clone ID: MRT4577_19865C.1.pep
LGTSRPAGVSSSRYRPPPSPPPPRRTCASPSSPPLLLRTRLTFHWRRRRRHIGRSSPPNLIQIQSLPSESRIRNVSSLPLDPAAGAPPPDPVVNSITPSSTSLSPPPSALTHRFYIATSLVVEDTEDLMCMLVPLALLVCYLQQSLPNGHREPMPRWTALHVGQAIIIRRPSLDFPSAAPSWSLSR

SEQ ID NO: 281537 - protein, 63 aa, Zea mays
  Clone ID: MRT4577_19866C.1.pep
IKGLGKWNFFPVMKLQVIQVHGFQATSFKTPGWAPKIKVRICQPRKIVYMYQGMYVGTLMAWS

SEQ ID NO: 281538 - protein, 298 aa, Zea mays
  unsure (1)..(298): unsure at all Xaa locations
  Clone ID: MRT4577_19867C.1.pep
WARRDERECPDHQAAERWRCRRRQCGRERWRGGPWEEGGGNAARVRGVNAGIMDETVLQLVFRALNWDPQSLCAVARVSRRLRAVAERVLWRELCASRAPRMVAALTGGAATSAPAAGRIGGGWPALAKLLLFCCGAAGXRGGHFAPVSRFSKTSGRSFLSRRCAGDLLYVSDPCEHAVAGANDNVGAYRGVFRGFMRSRTRACLVGHRTALEPRVRCPYCGARVWSMTAAGLAPRSASRRLGAHEDRLEYFVCVSGHLHGSCWLARLSDSEGGGPGGASDDDDDASAAASEEDDASL

SEQ ID NO: 281539 - protein, 300 aa, Zea mays
  unsure (1)..(300): unsure at all Xaa locations
  Clone ID: MRT4577_19868C.1.pep
MSESALTIRRLSGPSNGGGGNAGASSCAVGTWGGGGGGGGGNAASIRGVNVGLMDEKVLQLVFLALNWDPQSLCAVARVSRRLRAVAERVLWRELCVSRAPRMVAALTGGPAGSAPAAGRVGGGWPALAKLLLFCCGAAGAGVXGHFAPVSRFSKTSGRSFLPRRCAGDLLYVSDPCEHAVAGADDVGVYRGVFRGFMRSRTRAWLVGHRAALEPRARCPYCGARVWSMAAAGLAPRSASRRLGAHEGRLEYFVCVSGHLHGSCWLVRLSDSEGTGPDADDGASDEDDADRREGSVQSIR

SEQ ID NO: 281540 - protein, 269 aa, Zea mays
  Clone ID: MRT4577_19869C.1.pep
MKRPRGATPSLSAMPNHQEDDGYGVVGMEADVDVDVDEEMMACGGGGEKKRRLSSEQVRALERSFEVENKLEPERKARLARDLGLQPRQVAVWFQNRRARWKTKQLERDYSALRQSYDALRHDHDALRRDKDALLAEIKELKAKLGDDEAAASFTSVKAEPAASDGPAPAGVGSSESDSSAVLNDADPPVAEAPAPAPEVQGTLLVAPAGPVAGAAAANHGGVFFHGSFLKVEEDETGLLDDDGPCGGFFAVEQPPAMAWWNEPAEHWN

SEQ ID NO: 281541 - protein, 91 aa, Zea mays
  unsure (1)..(91): unsure at all Xaa locations
  Clone ID: MRT4577_1986C.1.pep
EPGRTNRHHPQLSPIFLRAXXTRXRVTAKAXXLLSEGGQGSLLSSGGAWASIGARRANAGTSRRRSAALRCARSDHALTAHTPSRRGGSSN

SEQ ID NO: 281542 - protein, 33 aa, Zea mays
  Clone ID: MRT4577_19870C.1.pep
DKMPRWDLREFDVHCAYNIIYKSDFIMSYLLHN

SEQ ID NO: 281543 - protein, 235 aa, Zea mays
  unsure (1)..(235): unsure at all Xaa locations
  Clone ID: MRT4577_19871C.1.pep
MVPSWPSSSNGALPFLPSAAPALVGSLSLLLSAQGRSSLPGSMAPVKLEQPSSQLWRPPPWSPCAQXPNPVPLQHGEQQLPPMARRRCSFFPPSLCSLCHQQPWPTSTPLEQAPPIAMAPFPVLQRPPXPSSLPWARAPPPAMDAARDPPXPLFFPAVQLPIRLPWPPSSHGRPEIPAASPLPRCTSWCPPAVRQNAQQAARCSSPPVRSPLPLSCVVALVLAAQPPPRRRRNPC

SEQ ID NO: 281544 - protein, 106 aa, Zea mays
  Clone ID: MRT4577_19872C.1.pep
MTKHSDNFTTIKSVSSGVDFYMSGGGLHLNRTISIHSHSLANSSLVQTPSTLSKTSLASLNLINRLCRLTLCKPSKSPLFGALRPQSPLGMARPPQLHPVQPTVLS

SEQ ID NO: 281545 - protein, 65 aa, Zea mays
  unsure (1)..(65): unsure at all Xaa locations
  Clone ID: MRT4577_19873C.1.pep
PRVRAYGGGAYGGGAYGGGAYGGSSYGSAPCDGYGTGGYGXXGGPGGNGGVSTGAKGSSQDYPYG

SEQ ID NO: 281546 - protein, 144 aa, Zea mays
  Clone ID: MRT4577_19874C.1.pep
PPISWGGTRSGSNTGAQGSGTEKKRNRSLSDAQCRNQRKHTERKTFFDRGGNSKRRPKKTTNPNPTGKGNKPLQEPAASERAAYWRRTEGTGRRTRWERKPWGGQRLAERGAETGIEGQQGRQKGNGRGGRPGNRGPGPGSGPA

SEQ ID NO: 281547 - protein, 49 aa, Zea mays
  unsure (1)..(49): unsure at all Xaa locations
  Clone ID: MRT4577_19875C.1.pep
MSXYCGKDKDELIKNAAYIGTPGKGILAADESTGTIGKRLSSINXVENV

SEQ ID NO: 281548 - protein, 33 aa, Zea mays
  Clone ID: MRT4577_19876C.1.pep
YHPHTTSILSFYLYLKLLSGGYFPKLHFSILIL

SEQ ID NO: 281549 - protein, 142 aa, Zea mays
  Clone ID: MRT4577_19877C.1.pep
MISAPLRVRLPAPKAAAGGSFLLGASSVESNPNPKPKPSRIRCAAATLYEVLGLRAGATGREIKAAYRRLARERHPDVAPAPGAAAEFARLHDAYATLSDPDSRARYDGGGAAPAAAVARRPWSGAVYGRPRRRTWETDQCW

SEQ ID NO: 281550 - protein, 77 aa, Zea mays
  Clone ID: MRT4577_19878C.1.pep
CSSILKNNLRVAFCPDQVYSTSSKWRLFFSLKRSFSFRCCRAENNTPAFPTTNKGLVFSVPLGLPHQPPTCILCKIL

SEQ ID NO: 281551 - protein, 62 aa, Zea mays
  Clone ID: MRT4577_19879C.1.pep
FGMLKFIHYALLSCSTLSKLVSPLILASFNPPKPTRELNTLLLNFGSIVQTNNRLINGSSAC

SEQ ID NO: 281552 - protein, 594 aa, Zea mays
  Clone ID: MRT4577_1987C.1.pep
SPYSPPPSRRLSLVQLVKQDKSETQGTLKRFLRRAQNKFELKLKKIRSDNGSEFKNLEVEEYLEEEGVKHEFSAPYTPQQNGVVERKNRTLLDMARTMLGEFKTAERFWMEAVNTACHAINRVYLHRLLKKTSYELLTGNKPNVSYFRVFGSKCYILVKKGRNSKFAPKAVEGFLLGYDSNTKAYRVFNKSSGLVEVSSDVVFDETNGSPREQVDLDDVDDEDVPTAAIRTMAIGDDEHGVVTRNKAKLMAKGYAQVTRLDFEETFAPVARLESIRILLAYAAHHSFRLFQMDVKSAFLNGPIKEEVYVEQPPGFEDERYPDHVCKLFKALYGLKQAPRAWYECLRDFLISNAFKVGKADPTLFTKTCDGDLFVCQIYVDDIIFGSTNQKSCEEFSRVMTQKFEMSMMGELNYFLGFQVKQLKDDTFISQMKYTQDLLKRFGMKDAKPAKTPMGTDGHVDLNKGGKSVDQKAYRSMIGSSLYLCASRPDIMLSVCMCARFQSDPRDCHLVAVKRILRYVVATPCFGIWYPKGSTFDLIGYSDSDYAGCKVDRKSTSGTCQFLGRSLVSWSSKKQTSVALSTAEAEYVAAGLKGK

SEQ ID NO: 281553 - protein, 50 aa, Zea mays
  unsure (1)..(50): unsure at all Xaa locations
  Clone ID: MRT4577_19880C.1.pep
QVPKGPVEGYEEIEEFLRTMHQLLLEVEXIEGTLQCPESGRMFPISRGIP

SEQ ID NO: 281554 - protein, 243 aa, Zea mays
  unsure (1)..(243): unsure at all Xaa locations
  Clone ID: MRT4577_19881C.1.pep
MGKIKIGINGFGRIGRLVARVALQSEDVELVAVNDPFITTDYMTYMFKYDTVHGHWKHSDITLKDSKTLLFGDKPVTVFGIRNPEEIPWGEAGAEYVVESTGVFTDKDKAAAHXIPSSTGAAKAVGKVLPDLNGKLTGMSFRVPTVDVSVVDLTVRIEKGASYEDIKKAIKAASEGPLKGIMGYAEEDLVSTDFLGDSRSSIFDAKAGIALNDHFVKLVSWYDNEWGYSNRVVDLIRHMFKTQ

SEQ ID NO: 281555 - protein, 366 aa, Zea mays
  Clone ID: MRT4577_19882C.1.pep
MGKGAQGSDAAAAGGEVEENMAAWLVAKNTLKIMPFKLPPVGPYDVRVRMKAVGICGSDVHYLREMRIAHFVVKEPMVIGHECAGVVEEVGAGVTHLSVGDRVALEPGVSCWRCRHCKGGRYNLCEDMKFFATPPVHGSLANQVVHPADLCFKLPDGVSLEEGAMCEPLSVGVHACRRAGVGPETGVLVVGAGPIGLVSLLAARAFGAPRVVVVDVDDHRLAVARSLGADAAVRVSPRAEDLADEVERIRAAMGSDIDVSLDCAGFSKTMSTALEATRPGGKVCLVGMGHNEMTLPLTAAAAREVDVVGVFRYKDTWPLCIDFLRSGKVDVKPLITHRFGFSQRDVEEAFEVSARGRDAIKVMFNL

SEQ ID NO: 281556 - protein, 185 aa, Zea mays
  unsure (1)..(185): unsure at all Xaa locations
  Clone ID: MRT4577_19883C.1.pep
MGKIKIGINGFGRIGRLVARVALQSEDVELVAVNDPFITTDYMTYMFKYDTVHGHWKHSDITLKDSKTLLFGDKPVTVFGIRNPXEIPWGEAGAEYVVESTGVFTDKDKAAAHLKGGAKKVVISAPSKDAPMFVVGVNEDKYTSDVNIVSNASCTTNCLAPLAKVIHDNFGIVEGLMXTVHAITA

SEQ ID NO: 281557 - protein, 239 aa, Zea mays
  unsure (1)..(239): unsure at all Xaa locations
  Clone ID: MRT4577_19884C.1.pep
DWYKGPTLLEALDQITEXKRPSDKPLRLPLQDVYKIGGIGTVPVGRVETGVIKPGMVVTFGPTGLTTEVKSVEMHHEALQEALPGDNVGFNVKNVAVKDLKRGFVASNSKDDPAKEAASFTSQVIIMNHPGXDRRSGKELEKEPKFLKNGDAGMVKMIPTKPMVVETFSQYPPLGRFAVRDMRQTVAVGVIKSVEKKDPTGAKVTKAAAKKKCNLSLILYLLLQYNDLSLHPEVLYAVV

SEQ ID NO: 281558 - protein, 337 aa, Zea mays
  Clone ID: MRT4577_19885C.1.pep
MGKIKIGINGFGRIGRLVARVALQSEDVELVAVNDPFITTDYMTYMFKYDTVHGHWKHSDITLKDSKTLLFGDKPVTVFGIRNPEEIPWGEAGAEYVVESTGVFTDKDKAAAHLKGGAKKVVISAPSKDAPMFVVGVNEDKYTSDVNIVSNASCTTNCLAPLAKVIHDNFGIVEGLMTTVHAITATQKTVDGPSAKDWRGGRAASFNIIPSSTGAAKAVGKVLPDLNGKLTGMSFRVPTVDVSVVDLTVRIEKGASYEDIKKAIKAASEGPLKGIMGYVEEDLVSTDFLGDSRSSIFDAKAGIALNDHFVKLVSWYDNEWGYSNRVVDLIRHMFKTQ

SEQ ID NO: 281559 - protein, 59 aa, Zea mays
  Clone ID: MRT4577_19886C.1.pep
TAGVVLPPDNGECDTRNKSCCFQSQPALLPYLCLKFFYSFEQLEVPLDQHENDAQQTGN

SEQ ID NO: 281560 - protein, 214 aa, Zea mays
  unsure (1)..(214): unsure at all Xaa locations
  Clone ID: MRT4577_19887C.1.pep
EGDNMXERSTNLDWYKGPTLLEALDQITEPKRPSDKPLRLPLQDVYKIGGIGTVPVGRVETGVIKPGMVVTFGPTGLTTEVKSVEMHHEALQEALPGDNVGFNVKNVAVKDLKRGFVASNSKDDPAKEAASFTSXRRSGKELEKEPKFLKNGDAGMVKMIPTKPMVVETFSQYPPLGRFAVRDMRQTVAVGVIKSVEKKDPTGAKVTKAAAKKK

SEQ ID NO: 281561 - protein, 116 aa, Zea mays
  unsure (1)..(116): unsure at all Xaa locations
  Clone ID: MRT4577_19888C.1.pep
FPPPPPYXKKRRGGGGGGGGYTXPSCKKKVFFGPPPPPPRGGGGGGGKKKLFFFFFLLPPPAGGGGPPLFFFKGGAPPRPPRGAPFFFFFFFFPKTKASFLKKYFSAPPQKKTFKK

SEQ ID NO: 281562 - protein, 95 aa, Zea mays
  Clone ID: MRT4577_19889C.1.pep
NWRIRYRTGAYKLKHKRTTGSKTSMDPASRGPVHIYSQHRQAAKLVCDQRPLGRPSMGRQKSISLLAYGVLNMGGIRSTTRLLYPPRVLCVVTTA

SEQ ID NO: 281563 - protein, 553 aa, Zea mays
  Clone ID: MRT4577_1988C.1.pep
MDPKGKGIVINDKEKESFINEPKDDKPTDSGSGHKRKDGKKKKTRRIKEIVYYDDNDESTSSQKDNDDNDYERRKPIHRNAQATTVLLASLCRDEYHKVSGLDNAKQIWDTLKISHEGNDVTLLTKMELVEGELGRFAMIRGEEPTQTYNRLKTLINKIRSYGSTRWTDHDIVRLMLRSFTVLDPHLVNNIRENPRYTKMSPEEVLGKFVSGRMMIKEARYVDDALNGPTHEPQPIALKATRSKETLPSKVAQVEAAGLNDEEMALIIKRFKTALKGRKGQPSKTKTKRKRSCFKCGKIGHFIANCPDNESDQEQGSKREKKKAYKKAKGEAHLGKEWDSDCSSSDSENEGLAATAFNKSSLFPNERHTCLMAKEKKVCTRDSTTYDSSSDDESSDEEIDYSSLFKGLDRTKVDKINELIDALNEKDRLLEKQEDLLYEEHDKFVEAQKSYALEVKRNEMLSYELSSYHETISSLRSMNDDLNAKLEIASKSNSCVEHVMICKRCKDFDIDACSEHLVSISKLNDEVASLSAQLKTSKNEFDKLKFARDAYTI

SEQ ID NO: 281564 - protein, 93 aa, Zea mays
  Clone ID: MRT4577_19890C.1.pep
LSVKMTILHRHHLKGFGHPDPSRCSRRSSRWPLSQPSSSPPRSWPPIAWCPGRRAPAPACPSASCSPKQSGVVGPRRSPSSCTRTQSTKPRYA

SEQ ID NO: 281565 - protein, 50 aa, Zea mays
  Clone ID: MRT4577_19891C.1.pep
LGDVPAKGYRSDSQTTGLHPGPPGSTVHHASAKAYELLRDYDGSLIQMRL

SEQ ID NO: 281566 - protein, 85 aa, Zea mays
  Clone ID: MRT4577_19892C.1.pep
GNGEGSARERCGGGGRRGGGEHGGVLVVGAGPIGLVSLLAARAFGAPRVVVVDVDDHRLAVARSLGADAAVRVSPRAEDLSDDVE

SEQ ID NO: 281567 - protein, 96 aa, Zea mays
  Clone ID: MRT4577_19893C.1.pep
VSVVDLTVRIEKGASYGDIKKAIKAASEGPLKGIMGYVEEDLVSTDFVGDSRSSIFDAKAGIALNDNFIKLVSWYDNEWGYSNRVVDLIRHMFKTQ

SEQ ID NO: 281568 - protein, 123 aa, Zea mays
  unsure (1)..(123): unsure at all Xaa locations
  Clone ID: MRT4577_19894C.1.pep
SSSPLAVGNAPTDXQHQLLHQIVPALTQLAVANPAAYLQQLLPFNHLAVSNSAAYLQQRQQLLNPLAVANPLVATFLQQQQQLLPYNQFSLRNPCLAXPLVKKNQIKMGWARQWCPHTEGCFL

SEQ ID NO: 281569 - protein, 91 aa, Zea mays
  unsure (1)..(91): unsure at all Xaa locations
  Clone ID: MRT4577_19895C.1.pep
MGKIKIGINGFGRIGRLVARVALQSEDVELVAXNDPFITTDYMTYMFKYYTVHGHLKHNDITLKDFKTLLFGDMPVTGFCIKNPGEIPWGE

SEQ ID NO: 281570 - protein, 154 aa, Zea mays
  unsure (1)..(154): unsure at all Xaa locations
  Clone ID: MRT4577_19896C.1.pep
MATKXILSLLALLALFASASNASIITQCSLASSSIISQFLPPDTLMAFEHPAAQACRLQQAIAEXVLQQPIAQLQQQSLAHLTIQTMATQQGQQFLPALSHLAMVNPVAYLQQQLLAYNPLALANVVGNQQQQQLRQLLPALSQLAMWNRWRLP

SEQ ID NO: 281571 - protein, 209 aa, Zea mays
  unsure (1)..(209): unsure at all Xaa locations
  Clone ID: MRT4577_19897C.1.pep
PIRSPTSPHPPGCGGGPLLTSPGVGKIKIGVNGFGRIGRLVARVALQSEDVELVAVNDPFITTGGGADMFKYDTGHGQWKHSDIALKDSKTLLFGEKPGTGFGIRNPEEIPWGEAGAEYVXESTGGFTDKDKAAAHLKGGAKKGGISAPSKDAPMGGGGVNEDKYTSDGNIGSNASCTTNCLAPLAKGIHDNFGIIEGLMTTGHAITGT

SEQ ID NO: 281572 - protein, 146 aa, Zea mays
  Clone ID: MRT4577_19898C.1.pep
SNPLVLGKVVAFQQQQQVQQFMPVLRQLAMVNPAVYLQLLLFSPLRVGNAPRYLQHQLVHQIGPGLTQLGGANPVAYLQQLVPFNQRGGSNFGGDLQQGQRFLNPLAGGNPLGGPFLQQQQQLLPYNRFFLMNPALQQPMVGGALF

SEQ ID NO: 281573 - protein, 158 aa, Zea mays
  unsure (1)..(158): unsure at all Xaa locations
  Clone ID: MRT4577_19899C.1.pep
VHAITATQKTVDGPSAKDWRGGRAASFNIIPSSTGAAKAVGKVLPDLNGKXTGMSFRVPTVDVSVVDLTVRIEKGASYEDIKKAIKAASEGPLKGIMGYVEEDLVSTDFLGDSRSSIFGAKAGIALNDHFVKLVSWYDNEWGYSNRVVDLIRHMFKTQ

SEQ ID NO: 281574 - protein, 69 aa, Zea mays
  Clone ID: MRT4577_1989C.1.pep
LFPAFPSSYVVLVAMQTSTQVGLANSASPRFNDGFIYCLLSANIDNKSFLLLFYKKKKKKKKKKKKKKK

SEQ ID NO: 281575 - protein, 249 aa, Zea mays
  Clone ID: MRT4577_198C.1.pep
MRKKSCQPNSHIKNVEISNPSQPNGKSEEVSMKLDMRKGKEKESAKSDDVMTLGVNGGNPTDVTGNRETVRGNYEDIAKVLDSTGGKDTDRVNGWVAVLEAPDSDPASSCSVPAASSLGGYCHHDSAKNSSSILDSSCQPADGSSVSPDLMLDIPPGISAHIPPGFTKAHCQLQMGTAALSFADRHRSLISDIPPGFTEVHRGLPPAIPPAGPACVSTPGTEKKPFVRFSLNVPRPVGMGAPPGFTPLH

SEQ ID NO: 281576 - protein, 56 aa, Zea mays
  Clone ID: MRT4577_19900C.1.pep
VDNLIFFQGIFIFNTWKKRELNKLALMDFTGGMEIRPREKRTGTSKRTTFAYNEGN

SEQ ID NO: 281577 - protein, 138 aa, Zea mays
  Clone ID: MRT4577_19901C.1.pep
AFRNTPREAHYQQPNINGYQSILSLLALFALFASATNAFIIPHCSLAPSSIITQYATSGTSMGFEHPAVQAYRLQQAIAASVLHHPISQLQQQSLAHLTIHTIETQQLQQFLPALSHLAMVNTGDYLQQQMLASYPLA

SEQ ID NO: 281578 - protein, 337 aa, Zea mays
  Clone ID: MRT4577_19902C.1.pep
MGKIKIGINGFGRIGRLVARVALQSEDVELVAVNDPFITTDYMTYMFKYDTVHGHWKHSDITLKDSKTLLFGDKPVTVFGIRNPEEIPWGEAGAEYVVESTGVFTDKDKAAAHLKGGAKKVVISAPSKDAPMFVVGVNEDKYTSDVNIVSNASCTTNCLAPLAKVIHDNFGIVEGLMTTVHAITATQKTVDGPSAKDWRGGRAASFNIIPSSTGAAKAVGKVLPDLNGKLTGMSFRVPTVDVSVVDLTVRIEKGASYEDIKKAIKAASEGPLKGIMGYAEEDLVSTDFLGDSRSSIFDAKAGIALNDHFVKLVSWYDNEWGYSNRVVDLIRHMFKTQ

SEQ ID NO: 281579 - protein, 120 aa, Zea mays
  Clone ID: MRT4577_19903C.1.pep
QLAMVNPAVYLQFLLFSPLGVGNAPRYLQQRLLQQIVPALTQLVVANPVAYLQQLFPFNQRGVSNFGGDLQQGQQFFNPLAVGNPLVGPFLQQQQQLLPYNRFFLMNPALQQPMVGGAIF

SEQ ID NO: 281580 - protein, 71 aa, Zea mays
  unsure (1)..(71): unsure at all Xaa locations
  Clone ID: MRT4577_19904C.1.pep
PFFLAHQDDHLPSFAAQKNTSPLFSYPCPSSSPARADRHYLKWRSPFARCNNNQKKKGAATYNELRTXRLG

SEQ ID NO: 281581 - protein, 64 aa, Zea mays
  Clone ID: MRT4577_19905C.1.pep
VYESVYCRAPRCTFLLMSATLRVLNFTPACVIRGLRSAVRACCRTCRQDPFRSSGIRCYGSPKN

SEQ ID NO: 281582 - protein, 102 aa, Zea mays
  unsure (1)..(102): unsure at all Xaa locations
  Clone ID: MRT4577_19906C.1.pep
SGAIQFLDMTGMLNLESTRRXQQDTXIEVNTPILDALLTLMCLHQHPQRIYNWVLLRRWEQHDILTITKTYCKNGTYXPNYWIHMKDAVILLKLDXIAQYAL

SEQ ID NO: 281583 - protein, 34 aa, Zea mays
  Clone ID: MRT4577_19907C.1.pep
DNSSKATFAGLHDVTDKTAPTGYIAKVRSPLLGQ

SEQ ID NO: 281584 - protein, 74 aa, Zea mays
  Clone ID: MRT4577_19908C.1.pep
ICKDLVPRLLTGKFGIWPRFSFFERGDNFVSVVFKPYFKRVPRAMFLFFDPPDLILEPGFFNQGPVPCSVLVPT

SEQ ID NO: 281585 - protein, 64 aa, Zea mays
  Clone ID: MRT4577_19909C.1.pep
DARVRIANALCSPAESLRLAAVTSVSSILPREDLTLMCCTNPSLMAHATTSGGRLAELGPDYAD

SEQ ID NO: 281586 - protein, 84 aa, Zea mays
  unsure (1)..(84): unsure at all Xaa locations
  Clone ID: MRT4577_1990C.1.pep
MSTKILSLLALFVLIVSATNAFIIPQCSLASSAIFPHFLPPVTSMVCLHLVLXANLLHHALGVCGLQQSIISLVHHLFLVIFYI

SEQ ID NO: 281587 - protein, 206 aa, Zea mays
  Clone ID: MRT4577_19910C.1.pep
TACSETVKFGHVTFFWNGNRSGYFDQNLEKYEEIPSDAGIPFNVQPKMKALEIAQKARDAILSQKFDQVRVNIANGDMVGHTGDMEATIVGCKAADEAVKIILDAVEQVGGVFVVTADHGNAEDMAKRDKSGEPLRDKDGKVQTLTSHTLNPVPIAIGGPGLAPGVRFRTDLASAGLANVAATVMNLHGFQAPDHYEPTLIQVVDE

SEQ ID NO: 281588 - protein, 240 aa, Zea mays
  unsure (1)..(240): unsure at all Xaa locations
  Clone ID: MRT4577_19911C.1.pep
TACSETVKFGHVIFFWNGNRSGYFDQNLEKYEEIPSDAGIPFNVQPKMKALEIAQKARDAILSQKFDQVRVNIANGDMVGHTGDMEATIVGCKAADEAVKVHVHGLVRQALRCDHLSIFPRVFPSYRLIQSVSXIILDAVEQVGGCFVVTADHGNAEDMAKRDESGEPLRDKDGKVQTLTSHTLNPVPIALGGPGLAPGVRFRTDLASAGLANVAATVMNLHGFEAPDHYEPTLIQVVDE

SEQ ID NO: 281589 - protein, 84 aa, Zea mays
  Clone ID: MRT4577_19912C.1.pep
YELRACLLRTFLRQARILARCLELNVGEFKMLNAPSEFKMHNISYVMLTLVLALLLVKTVEKLLDCQSSLLCSCGAPALPIITY

SEQ ID NO: 281590 - protein, 47 aa, Zea mays
  Clone ID: MRT4577_19913C.1.pep
PGLAPGVRFRTDLASAGLANVAATVMNLHGFQAPDHYEPTLIQVVDE

SEQ ID NO: 281591 - protein, 199 aa, Zea mays
  Clone ID: MRT4577_19914C.1.pep
TLRVCRDFSVDELTDSGVLHADRSVQTSPSSIHIFDASESADLPETITDQATVSISASKRAINSLVLNHLIEELRGWMGTTAGTRAIPLMQLFCRLSSAVGGPFMDSSKPENFDLEKFVKWLMDEVNINKQFPAKTRCTFGEALILAFMFFTLMFRNWHQPGSDNSHSKSSGSSDLTDKGPAQVLGSTTITLPSSSADL

SEQ ID NO: 281592 - protein, 35 aa, Zea mays
  unsure (1)..(35): unsure at all Xaa locations
  Clone ID: MRT4577_19915C.1.pep
ILXINHPXLALLLXNYXHFALLTTXXAXXDKFHPL

SEQ ID NO: 281593 - protein, 116 aa, Zea mays
  Clone ID: MRT4577_19916C.1.pep
RQANTCSLCDTHGRTRTGHHFSYTATHYVKLVGTRQRQVSVRGRFIFYVGRQTHARGCLGSTIEHLLVASCSRRMVAQPCHVVTVPHYEHNIFPVWVADPIHGGFGAAGGGALAEL

SEQ ID NO: 281594 - protein, 33 aa, Zea mays
  Clone ID: MRT4577_19917C.1.pep
LIDPLFLRSTKKGMTLVPWEPYIVPIVLARLSS

SEQ ID NO: 281595 - protein, 94 aa, Zea mays
  Clone ID: MRT4577_19918C.1.pep
GGFGPPKPENLFLKIFKGFPIYKIFGKQILRGYTRFKSPLLAHPTHDLCHARTSQEFKGLQPLPKTSNMDLPTLVFILNPTIIPIFENFIHTAW

SEQ ID NO: 281596 - protein, 121 aa, Zea mays
  unsure (1)..(121): unsure at all Xaa locations
  Clone ID: MRT4577_19919C.1.pep
RXAGSLHGLLRTDLMTPRMVSGAAADARRETTTQLYTRGALSTNACSRTKLVTKGNSVRRPGPSAWGSHFTRSKGMDLRGTGTQESRSVYVPAMGMVKYTVGGPAVATISRAKRKEGVQET

SEQ ID NO: 281597 - protein, 1333 aa, Zea mays
  unsure (1)..(1333): unsure at all Xaa locations
  Clone ID: MRT4577_1991C.1.pep
MVVNDKEKESLFNEPRDDKPTDSGSSHKKRDGKKKRRINKIIYYDSDASSSSPRDDNDDDDSSSKKKMVNQNYSFDYSRIPYNSNVLLHSIPLGKPPHFDGEDYSFWSHKMCSHLFSLHPSICEIVENGMHFDSTDNPVIINEQIHKNAQATTVLLASLCRDEYNKVSGLDNAKQIWDTLKISHEGNDATMITKMELVEGELGKFTMIKGEEPTQTYNRLKTLVNKIRSYRSTRWTDHDVIRLMLRSFTIIDPYLVNLIRENPRYTKMTSEEILRNFESGRMMVKEARYMDDALNGPLPVYEPQPVSLKATSSRKALPSKVTQVEAAGLNEDEMALIIKHFKTALKGRKEYSNKNKTRGKRSYFKCGKTGHFIAQCPDNDNEQGQEKSGKKERKKNYRKTKGEAHFGNEWDSDCSSSDSDDEGLAASAFDKYSLFPNERHTCLMAKEKKVRIRYSPKYSSSSDEESSDDEVDYSSLFKGLDKAKVEKINELIDALNEKDRLLEKQEDILYEEHDKFVSVQKSLALETKRNEMLSFELSACHESISSLKNVNDELNAKLEEVSKTSSCVEHVSICNRCKDFDVDVCDEHLISITKLNDEVASLNAQLKTCKIDFDKLKFARDAYTIGRHPSIKDGLGFRKETKNLTSQRIPVLNKEKGKAPLASSPQRNHAFIYDRKIASCSHYNKSYVHTAYNDSHAMFASRSTFVHGRXKMCNEPTTVFHACNTSFVLSCXYASGGSSWIIDSGCTNHMMGENKMFTSYVKNKDSQDSIIFGDGNQGKVKGLGKIAISSKHSISNVFLVESLGYNLLSLWHRRLAHVGMKNLHKLLKGDHVLGLTDVCFEKDRPCAACQAGKQVGSTHHGKNVMTTSRPLELLHMDLFGPVAYLSIGGSKYGLVIVDDFSHFTWVFFLQDKSETQGTLKRFLRRAQNEFELKVKKIRSDNGSEFKNLQVEEFLEEEGIKHEFSAPYTPQQNGVVERKNRTLIDMARTMLGEFKMPERFWSEALNTACHAINRLYLHRLLKKTSYELLTGNKPNVSYFRVFGSKCYILVKKGRHSKFAPKAVEGFLLGYDSNTKLYSVFSKSSGLVEISSDVVFDETNGSPREQVDLDDIDEDEVPTAAMRTMAIDDGQIPQEEGKDQGGAQEDQVVEEEAPRARPTQVRASIQKHHPVDQILGDIIKGVTTRSRLANFCENYSFVSSIEPFRVEEALQDPNLALAMQEELNNFKRIEVWSLVPRPKQNIVGTKWVFRNKQDEHGVVTRNKARLVAKGYAQVAGLDFEETFARVARLESIRILLAYAAHHSFRLFQMDMKSAFLNGPIKEEVYVEQPPGFEDD

SEQ ID NO: 281598 - protein, 723 aa, Zea mays
  unsure (1)..(723): unsure at all Xaa locations
  Clone ID: MRT4577_19920C.1.pep
MSGGAPLLALLLLAAAAMIAPSPANAAVSYDHRAVVINGQRRILISGSIHYPRSTPEMWPGLLQKAKDGGLDVVQTYVFWNGHEPVRGQYYFGDRYDLVRFVKLAKQAGLYVHLRIGPYVCAEWNFGGFPVWLKYVPGISFRTDNGPFKAAMQAFVEKIVSMMKSEGLFEWQGGPIILAQVENEYGPMESVMGAGAKXYANWAAKMAVATGAGVPWVMCKQDDAPDPVINTCNGFYCDYFSPNSNSKPTMWTEAWTGWFTAFGGAVPHRPVEDMAFAVARFIQKGGSFVNYYMYHGGTNFDRTSGGPFIATSYDYDAPIDEYGLLRQPKWGHLRDLHKAIKQAEPALVSGDPTIQSLGNYEKAYVFKSSGGACAAFLSNYHTSAAARVVFNGRRYDLPAWSISVLPDCKAAVFNTATVSEPSAPARMSPAGGFSWQSYSEATNSLDGRAFTKDGLVEQLSMTWDKSDYLWYTTYVNINSNEQFLKSGQWPQLTVYSAGHSLQVFVNGQSYGAVYGGYDSPKLTYSGYVKMWQGSNKISILSAAVGLPNQGTHYETWNVGVLGPVTLSGLNEGKRDLSNQKWTYQIGLHGESLGVQSVAGSSSVEWGSAAGKQPLTWHKAYFSAPSGDAPVALDMGSMGKGQAWVNGRHIGRYWSYKASSSGGCGGCSYAGTYSETKCQTGCGDVSQRYYHVPRSWLNPSGNLLVLLEEFGGDLPGVKLVTRTA

SEQ ID NO: 281599 - protein, 58 aa, Zea mays
  Clone ID: MRT4577_19921C.1.pep
KTRLAISKNAIYRTRAFQHHTSTVQHLNVNVLGGASQGTPILKPRSSPTLIFFKATQI

SEQ ID NO: 281600 - protein, 104 aa, Zea mays
  Clone ID: MRT4577_19922C.1.pep
MGLGSVVLRLFVNGIRVLQFLAGAVMLGIFSYFLAVLADHHLPIAQWIRAVEGLSGAATLYALLGSIFTICLGGIMFFGLLGMVLDACFVGASVAIAVMTRHGT

SEQ ID NO: 281601 - protein, 83 aa, Zea mays
  Clone ID: MRT4577_19923C.1.pep
MAMQVVRNLDLERYAGRWYQIACFPSRFQPKTGTNTRATYTLNPDGTVKVVNETWADGRRGHIESTVWRADPVSDKAKLTVLF

SEQ ID NO: 281602 - protein, 112 aa, Zea mays
  Clone ID: MRT4577_19924C.1.pep
MGIYLTCGGWNKMSKHTAPKTDHVYLKLLVKLYRFLVRRTKTNTNAVILNTLLMSETNPPPISFRRLVKFMEGKERNIAVIVGTVTYDKRIQHVAPIKVTALTLTPTARARI

SEQ ID NO: 281603 - protein, 251 aa, Zea mays
  Clone ID: MRT4577_19925C.1.pep
MAEDLVLDTAIRDWVLIPLSVVMVLIGVLRYFVSKLMRSPATSPSPDPKLVKEGQVVIRARNLRTNAQFIPAKAFKARKVYYTNEENGLLHVPKEDAQKAQAAMFSDPNMAMDMMKKNLSMIVPQTLTFAWVNFFFSGFVAAKIPFPLTQRFRGMLQNGIDLSTVDVSYVSSRSWYFLNLFGLRGLFSLILGEENATDDAQKMMQMGGGFGFNPTMSLGAEKDSLDIMQHDWALPKMERHAEDVLKQLLKK

SEQ ID NO: 281604 - protein, 152 aa, Zea mays
  unsure (1)..(152): unsure at all Xaa locations
  Clone ID: MRT4577_19926C.1.pep
XXRPXVVVSPLPRSSLXXPHQIRGPAPFLDTSXRGDQXKSAAHGPSILGRRTXSPSSYPXXSSXXRGLAPPRRQPNLPRLPSSQGPRLLATLCXAPGSVNQCHSSTIAGAKGEGWSAKHFGTGKARALHRRGDRRERHVHDRAQGQPRGGHL

SEQ ID NO: 281605 - protein, 78 aa, Zea mays
  unsure (1)..(78): unsure at all Xaa locations
  Clone ID: MRT4577_19927C.1.pep
KPADEQPHLHSPTFFXXHXPQGGLFTWRSRPSSYYLIIFSTSCSYILTSSPLYKSFFLQITILPILMTTYTLSILFIK

SEQ ID NO: 281606 - protein, 111 aa, Zea mays
  unsure (1)..(111): unsure at all Xaa locations
  Clone ID: MRT4577_19928C.1.pep
YPPIPPQFPQPPRPFRSAPYSAYQRAYAGAHAGSVVLPPAGWHDMTCSLLMSHTDTATIXRTDSATSRAAAAARCAELEHDDDLLLVAATSSSVVVPPDYLADCTRSSVPN

SEQ ID NO: 281607 - protein, 71 aa, Zea mays
  Clone ID: MRT4577_19929C.1.pep
PYDDNSFGGGGRDFITFSRAENGAPILKMKALDGGSGSKMLKGPGIWTPDGTVLLNDVRRLEKSKAEFMEQ

SEQ ID NO: 281608 - protein, 852 aa, Zea mays
  unsure (1)..(852): unsure at all Xaa locations
  Clone ID: MRT4577_1992C.1.pep
MAVLVLLLLASFLPPTALAAFSPPFSFFLACGAGSTVRDSSARNFTPDDGYLTTKSVPAVTNSNANSAASPLYAAARASSSGAFSYRFSFPNFAGQAAFLVLRLHFFPFTPAPPSAFSISSARFAVSVQLQDTYDVLSSFSPPSAGVVKEFFVPAGGSGDFRVTFTPAAGSAAFVNAVELFPAPEELLWNASVTPVGAAVLDIAAWPRDALETVYRLNVGGPXVSEESDTLWRTWLPDDPFLFSPPGTSTLENTSAPIIYATYTREVAPDVVYRTQRAAANVSGMAVPTSVNVTWTFPAEPGSNYLVRLHFCGYEVLSAVDGVGIVFNVFVPHARDGQVFTPTQFETQPNTALVRGMAASPRMSRTFTVTVGXRLXSSPGEGGFLNGLVXQKLRPSGSSLAAGSRGSSRRVLIIALSAVLGASVLASAVLCLCFVARRKRRMARPAPLEKESSKPLPWSQESSGWVLEPSSRSGEGTTGAMHRVSTQLHIPLEELRSATDNFHERNLIGVGGFGNVYRGALRDGTRVAVKRATRASKQGLPEFQTEIVVLSRIRHRHLVSLIGYCNEQAEMILVYEYMEKGTLRSHLYGXRTRAAAARRXVLSWKQRLEVCIGAARGLHYLHTGYSENIIHRDVKSTNILLGDGFIAKVADFGLSRMGPSFGETHVSTAVKGSFGYLDPEYFKTQQLTDRSDVYSFGVVLFEVLCARPVIDQALEREQINLAEWAVEWQRRGQLERIADPRILGEVNENSLRKFAETAERCLADYGQERPSMADVLWNLEYCLQLQETHVRRDAFEDSGAVGAQFPEDVVVPRWVPSSTSFMTTADPDDSAVTGVGAVDSKVFSQLSGGEGR

SEQ ID NO: 281609 - protein, 56 aa, Zea mays
  Clone ID: MRT4577_19930C.1.pep
GDQKCRKRHTLHMHIMAIKLHECRIIVGTQTCPGMKSLRIIKRPLIKASAMVPGPA

SEQ ID NO: 281610 - protein, 69 aa, Zea mays
  Clone ID: MRT4577_19931C.1.pep
VQANIFKNLNLFFFFKKERGKKKSFFTLVVTTLRGKPAEVHQTGGGFSILLGGPIGPIGGGIKINWPGF

SEQ ID NO: 281611 - protein, 102 aa, Zea mays
  Clone ID: MRT4577_19932C.1.pep
KKNFPLTKLVVGYPREFFPFKQMGALNFHAYVQKQKFFPFSQLTAVSPGAFFTQQHLLPFFLPTGPKVGTLFQLQQLVPFDQLAFSNPTVFFQQPIIGGALF

SEQ ID NO: 281612 - protein, 73 aa, Zea mays
  Clone ID: MRT4577_19933C.1.pep
LVGLASRKKECGGDQIVIGHYPGSIIGSWFLFWVPGTFSWKKGVCLLGFPQKRMAGVPHGGGYLGRGGLEIKV

SEQ ID NO: 281613 - protein, 128 aa, Zea mays
  Clone ID: MRT4577_19934C.1.pep
GFFACGPGIGFSSPSMTKPFFAQFSPGPPLGIVGFPPGPGRTRAGPPPGRHSPPRFPFPPPPIPCPFPPRLWPFFFWFGCLFFSFEGLFFFFCFPVVLLYSCVRTVLILLPSPGSYFFFFVLFSLPFF

SEQ ID NO: 281614 - protein, 68 aa, Zea mays
  Clone ID: MRT4577_19935C.1.pep
SPDMFMTRCSAVIRSPRVDTDRGRPPQLQLGYLDSAIFPCLLTLFVCFFVLPCLFFFVCVIRLILEAC

SEQ ID NO: 281615 - protein, 222 aa, Zea mays
  Clone ID: MRT4577_19936C.1.pep
TTRKNKRSLESQSQRVVVDFNCFYMAMLAHLAFGFTTRQTELIKKAKTICECLVASESTDLKFEESFCSYLLGEETGTTVFEKLQQLQSTGSSNSKNYGLDKKKDSSGEVTVNQSLELWLKDVALSRFADTKDCPPSLTNFFGAPKRVLNTSKQKLGSPRSVLLSSQPSSSASLCNRTSTEQSPRLSPNSHLGEAGNNLHLPLGAPSSMDRQVMVQGKHLFP

SEQ ID NO: 281616 - protein, 203 aa, Zea mays
  unsure (1)..(203): unsure at all Xaa locations
  Clone ID: MRT4577_19937C.1.pep
ALATTRKXKKTLESQSQRVVVDFNCFYMAMLAHLAFGFTTRQTELIKKAKTICECLVASESTDLKFEESFCSYLLGEVXTYLNLTKLLAXFLALLELMISSQETGTTVFEKLQQLQSTGSSNSKNYGLDKKKDSSGKVTVNQSLELWLKDVALSRFADTKDCPPSLTNXFGAXKRVLNTXKQKLGSPRSVLLSSQPPSSASLC

SEQ ID NO: 281617 - protein, 55 aa, Zea mays
  Clone ID: MRT4577_19938C.1.pep
YIFQGPRADRRGLFCINRGLYTEQPLTQLFHSTRMVTFFFAGHPYRPHPQGVAPE

SEQ ID NO: 281618 - protein, 130 aa, Zea mays
  Clone ID: MRT4577_19939C.1.pep
KQRNEESSVESSQWRNIKQHVLPYGSSRPLTRKLSFDASSSESRGTEPSTSMSTENTSVSINVPKLAEGIEFGRQPMVTSSTLVELTTRLDFFKERRSQLMEQLHSLDLGRGSAPQGFPFKPPSPWNHPR

SEQ ID NO: 281619 - protein, 288 aa, Zea mays
  Clone ID: MRT4577_1993C.1.pep
MDPKGKGMVVNDKEKESIFNEPRDDKPTDSGLSHKKKDGKKKRFIKKINYYDSDASSSSPRDDDDDSSSKKRTDNQNYSFDYSRMPYISNAHLLSIPLGKPPHFDGEDYSFWSHKMRSHLFSLHPSIWEIVENGMHFDSTDNPVIINEQIHKNAQATTVLLASICRDEYNKVSGLDNAKQIWDTLKISHEGNDVTMITKMELVEGELGRFAMIRGLEPTQTYNMLKTMVNKIRSYGSTRWTDHDVVRLMLKSFIVIDPYLVNLIHENPRYTKMTLEECWDYASSRRRS

SEQ ID NO: 281620 - protein, 55 aa, Zea mays
  Clone ID: MRT4577_19940C.1.pep
DDRCVRKVTGDRMLPTALVSAFHRGDESTKQTAESILRRLHKMPDYSATYVSMEF

SEQ ID NO: 281621 - protein, 55 aa, Zea mays
  unsure (1)..(55): unsure at all Xaa locations
  Clone ID: MRT4577_19941C.1.pep
SWGWRFFSVFFWLMRFXHVFVHLCFYLESALAAWSQISSLSTKVKGRFIHRGRVR

SEQ ID NO: 281622 - protein, 46 aa, Zea mays
  Clone ID: MRT4577_19942C.1.pep
TQLQKHHKHVTFLHYSSIIVFKKAHNLMHRSTELIPLFPQSEQVNA

SEQ ID NO: 281623 - protein, 304 aa, Zea mays
  unsure (1)..(304): unsure at all Xaa locations
  Clone ID: MRT4577_19943C.1.pep
PGSESVDSSGEEELAIQRLEIAKNDLQNRIAKEARGNAILQASLERRKQALHERRLALEQDVSRLQEQLQAERDLRAALEVGLSMSSGQFSSARSMDVKTKAELEEIALAEADVARLKQKVAELHLQLNQQRQHQYGSVVDANDRHHRLPGHFSQQNFVQQGFDMNLAFCNQEKQRNEESSVESSQWRNIKQHVLPYGSSRPLTRKLSFDASPSESRGPEPSPSMSTENPPVSINVPKLAKGPLIWEATNGPXSSPLVELTTRLDFFKERRSQLMEQLYSLDLGRGFAPQGFPFKPPFPWNPPR

SEQ ID NO: 281624 - protein, 129 aa, Zea mays
  unsure (1)..(129): unsure at all Xaa locations
  Clone ID: MRT4577_19944C.1.pep
RAPPPFGSEDQVSGRVREDGDEMTRXFWRSIKDKLILPFLGLGIKYYDLGILRREATDDMVSGGGAEASLXXNVGITCATITPDEARVLECRLCLVWGSPTGAFGNIINGAVLGEPIMCVNVPRLVPGW

SEQ ID NO: 281625 - protein, 68 aa, Zea mays
  unsure (1)..(68): unsure at all Xaa locations
  Clone ID: MRT4577_19945C.1.pep
PKKKGKKKCNYLXTTSHSLSDLVCPFRGSRLISGLLRRHRFFFGDPEPHFLPRVFQRRSLEKTLPVPT

SEQ ID NO: 281626 - protein, 101 aa, Zea mays
  Clone ID: MRT4577_19946C.1.pep
TLGAKCILLLWSLQGYECSHQWRKSQRRAKFNFQPRKKKSFGFWFWFPKAPGPNTNGEWATCFGKLPKSGPKCQWRGWAKNNFGSLKKPDRGPYKKMGFFF

SEQ ID NO: 281627 - protein, 124 aa, Zea mays
  unsure (1)..(124): unsure at all Xaa locations
  Clone ID: MRT4577_19947C.1.pep
KLNPERSLPRRQRLRRRLEYCTEIRSLAAPKKQNRLVGLNRLPPTHWTWPVSHSLRFEPSHVELHPRLSVSLGNERKLGNFFVLGPHGDTKASSDFSVFGFKFEXXXXXXXXXXXXXXXKKKKK

SEQ ID NO: 281628 - protein, 95 aa, Zea mays
  Clone ID: MRT4577_19948C.1.pep
KKIELKLARVFKGHPSVPFFCRPQRIGRLKSPRGITQGFWFKNSVNPVGQNVGGLSHRRAPFLFQTGPGKKGVNGTGNKEVTRKKRKKRQKERKR

SEQ ID NO: 281629 - protein, 96 aa, Zea mays
  Clone ID: MRT4577_19949C.1.pep
SLGVVVVEPAERMPLDGQGRPRGGLLEYQYALMTREREGQTITSTPSLRMALARPAGGRRDVTFLLLHQRREGGADLHVVTRSGPAGPGPVLTAHP

SEQ ID NO: 281630 - protein, 145 aa, Zea mays
  unsure (1)..(145): unsure at all Xaa locations
  Clone ID: MRT4577_1994C.1.pep
PCGGRDHARVLRSFLPQQNGVVERKIWTLIDIARTMLGEFKTPERFWSEAMNTACHAINRVYLHRLLKKTSYELLTGNKPNVSYFRVFGSKCYILVKKGRNSKFAPKVVEGFXLLGHDSITKAYRVFNKSSGLVEDSSYFVFVET

SEQ ID NO: 281631 - protein, 104 aa, Zea mays
  Clone ID: MRT4577_19950C.1.pep
KLSIGLLKGRGVKGSPPKELFLALPKKGLSMSCWWVWLTIVPELTPACCRETCKMPFCGERLVDPRDRALCVFYSKLSNATCYVVRCTADTCVSILVNGSISNR

SEQ ID NO: 281632 - protein, 122 aa, Zea mays
  unsure (1)..(122): unsure at all Xaa locations
  Clone ID: MRT4577_19951C.1.pep
LGGALYKDCRASPRQPGMRRTXACLDYXSLGGVFSNGPIILLSVLNHRSLSLAAHFFGVAIYGVRRLMLPLPLPKRMRIVARPIFGACGTILLIIKAEGARQMFFPATVPAYYRSVPTGEKE

SEQ ID NO: 281633 - protein, 124 aa, Zea mays
  Clone ID: MRT4577_19952C.1.pep
MGPRGGKPVAFSDFSGIELSPPAMNRLQGPGLGFFDNDGLPLGFPRLKMRKSLVVGLQGLAGAFPVCFSGGSPWGSLPPELGGAAWLVVFSREGGESRTGVIVLDALIQNPLFLIMGNSFGFQF

SEQ ID NO: 281634 - protein, 134 aa, Zea mays
  Clone ID: MRT4577_19953C.1.pep
MGHTQTNGRLPAWCVVWMIISEVQRPTQSTILSLSGMMSSTGNVIVSPVGEGNPRLSNMVNLVAVLNTKLDHALDELSKARAEISELHAECAERRDQEDGFPAPAGTQHPYRSSPRGHHAYGIRDRRTKIDLEP

SEQ ID NO: 281635 - protein, 90 aa, Zea mays
  Clone ID: MRT4577_19954C.1.pep
THKPEANYGAIRAPQKWRKIEPVDVGDLNSSLLQEDTGSCVLTTRLPSRRAAAPDQIQRHRGGQRSRMLRNRRKDAHRSSLRRTVRPHTA

SEQ ID NO: 281636 - protein, 140 aa, Zea mays
  Clone ID: MRT4577_19955C.1.pep
EEKGGSGGRRVPKQRGKGGTRGGANGPAKGGKDRKVKRGKVMKKKKEGGQMGFEANGKKGKRGGVLKIGHSKELPGGKDVGRPDREWKIGGPQGKEIRGQERGGKVGFIHRGRRSSSPFFIFFFFLLKCFFFFFFCFFFF

SEQ ID NO: 281637 - protein, 138 aa, Zea mays
  Clone ID: MRT4577_19956C.1.pep
FFFFFFFFFFLFSFFFFFLLLLVNLVRAIIRALGLGTKRTEPNGLARGLLQGAADIMPLNTTKRTRGPKTEPWHHMFSPLAEGKRTKKGRAHKRRPGPPLRPRKRCQAEGGKRDKPPGKLVPSTSEKNHPEHPGRLRA

SEQ ID NO: 281638 - protein, 72 aa, Zea mays
  Clone ID: MRT4577_19957C.1.pep
PFYSTTHAFTLPSLLGRSNFYEQACTHLLLLVPLYPAQPPPLPTLLTDPTFYPKQIWSHDLAACPLHSFLSL

SEQ ID NO: 281639 - protein, 52 aa, Zea mays
  Clone ID: MRT4577_19958C.1.pep
LVEGLNDLIVVNIVFITVLVEDELNPGLHVVYPNDHLYVGAGLLRLTDSCSS

SEQ ID NO: 281640 - protein, 99 aa, Zea mays
  unsure (1)..(99): unsure at all Xaa locations
  Clone ID: MRT4577_19959C.1.pep
SRPAGSVICVSLSTSCRVLPPSPPLQPPPRPCHRARRRATIQDAPPPEPIQTTPAHFVLPHKAAEEXEIGGYLIPKATTVNFMVAEMVRDEQEWGEPDA

SEQ ID NO: 281641 - protein, 77 aa, Zea mays
  Clone ID: MRT4577_1995C.1.pep
MGTAYAPMASQVMKSSLVVHSRPSGLSGAAALTMRPLFTVKAIQPEKATYQVVQSINCYPFIGSLETPVTSSPLVAW

SEQ ID NO: 281642 - protein, 81 aa, Zea mays
  Clone ID: MRT4577_19960C.1.pep
PRHGMQLLIYSRATRIVLMKPTIPLLCDTEANSELVGRVDDVTVQTCADAAYGLDATWCSNRRINHWTPRVTYIQSGGLIL

SEQ ID NO: 281643 - protein, 86 aa, Zea mays
  unsure (1)..(86): unsure at all Xaa locations
  Clone ID: MRT4577_19961C.1.pep
MAGAAKASWMVAMSVGAVEALKDQVGLCRXNYALKSIHRAANVRGGVLQGAKQLPASAEAAAEKRRGEKAEEGLRTVMYLSCWGPN

SEQ ID NO: 281644 - protein, 32 aa, Zea mays
  Clone ID: MRT4577_19962C.1.pep
LIMQLIDLVSTRFPRGHRDTMVKVRLCERICA

SEQ ID NO: 281645 - protein, 53 aa, Zea mays
  Clone ID: MRT4577_19963C.1.pep
TFFFFFFFKRTLASLKEYSYMNKITNFGIFITYLIREQNIEPWAYINQISGRD

SEQ ID NO: 281646 - protein, 153 aa, Zea mays
  unsure (1)..(153): unsure at all Xaa locations
  Clone ID: MRT4577_19964C.1.pep
GNKEGGPRDFFPKKNRGGEKKKFGEKHKRGKGKKFRKTKKGGGLILSFISGGGVTYWGHNQKKKGPVNLILNLRKNKGGVHRKGQHQAKKNYPEKKNSPNLGEGTQRPQGDHLPIAKTPEGGXKGPNPLFPKGPRPFGGGKKGSRVWGVWGLW

SEQ ID NO: 281647 - protein, 102 aa, Zea mays
  unsure (1)..(102): unsure at all Xaa locations
  Clone ID: MRT4577_19965C.1.pep
LWGASKLMPVVYGIDKLQIXSAIINDLVSVDTRMEDNLWVEPAGEYIQSCDIVAFTNISIFLRQIMPAGGQCSSPTNISPVFRCRSYSSIAYSALLGFWTLG

SEQ ID NO: 281648 - protein, 90 aa, Zea mays
  Clone ID: MRT4577_19966C.1.pep
VCHRPRASYICPLFDHLTGVNIVNTLHLSGSLTRLLNTHIRKASMDALKHASLEQKLTRGSVVVVVAAHACKSCGFVDMPSTQSAGVNML

SEQ ID NO: 281649 - protein, 62 aa, Zea mays
  Clone ID: MRT4577_19967C.1.pep
ERVVLALAMQLRGLRHHSRRRPAVIVREQEQRQEERAYSRPGLHELHRRPDWVGSVIFRTVP

SEQ ID NO: 281650 - protein, 113 aa, Zea mays
  Clone ID: MRT4577_19968C.1.pep
IFQQPPLGGGVQESPVPLGVPKNQGRKKKLGQGPTPKPVKTGGKAWLTNPFPRGFPKKGPPFKRVWPNWGGPQTFLTTGVWVSPKEPPPPLLPFGPKVPILGGGGRPPTPFPF

SEQ ID NO: 281651 - protein, 117 aa, Zea mays
  unsure (1)..(117): unsure at all Xaa locations
  Clone ID: MRT4577_19969C.1.pep
IRLEGCYTHICWLRQKTRFMPSYLYLKXSHMXTALVEYKRKKTVMMHKWNETKDPEKAKMEKERIHGPNIPAHSSLXHKREKVNRMYTQPARPKKQLCTGLLDDALDEDEEPDYGSR

SEQ ID NO: 281652 - protein, 477 aa, Zea mays
  Clone ID: MRT4577_1996C.1.pep
MDPMGKGMVINDKEKESFLNEPKDDKPTDSGSSHKKKDRKKKRHIKKIVYYDIDESSSSQRDDDDKKKKTVNSNFSFDYSRIPQNSNAHLLSIPLGKPPHFDGEDYGFWSHKMRSHLFSLHPSIWEIVENGMQFDSTDNPMEEYHKVGGLDNAKQIWDTLKISHEGNDATMITKMELVEGELGRFAMIKGEEPTQTYNRLKTLVNKIRSYGSTRWTDHDAVRLMLRSFTVLDPHLVNSIRENPRYTKMTPEEILRKFVSGRMMIKEARYVDEALNGPMPIHEPQTVALKATSSKEGLPSKRFKTALKGRKEHPNKSKTKGKRSCFKCGKTGHFIANCPDNDRDQGQEKSGKRENKKVYKKAKVEAHLGKEWDSDCSSSDSDDEGLAASAFNKSSLFPNEHHTCLMAKEKKVYASGGSSWIIDSGCTNHMTGEKKMFTSYVKNKDSQDSIIFGDGNQGKVKGLGKIAISSEHSYLMCF

SEQ ID NO: 281653 - protein, 96 aa, Zea mays
  Clone ID: MRT4577_19970C.1.pep
NSYDYNIRPHYMTRYLTWWVNRCFNKCTYRTMHKPSEQLYVSPNLPKPVHIYSVHILSMLSFPPLLLVFFLSSDLIITRSLKLLYIIPFFTISQFS

SEQ ID NO: 281654 - protein, 134 aa, Zea mays
  unsure (1)..(134): unsure at all Xaa locations
  Clone ID: MRT4577_19971C.1.pep
VGAEQAITRKVEEFLHCDGITQDRDRGDEECRMRIHEEGAIQIEKEKEAPVKEDKRKVXQEKKKREELEKKLEDERRKAXEAWMKEWLEQWQKELESIQEFERLPKERQWAMTRKKMEEEQQRXNQRKFMGKNK

SEQ ID NO: 281655 - protein, 120 aa, Zea mays
  Clone ID: MRT4577_19972C.1.pep
DKDIDRFSKALLNSWLHDKSLDGNNCSKCCQLTMELESMSIASKENGKARRQGTRGKKQQHINDSTKCCSCKQRRIASYISEARRACRLPLLIGASPVCYGVPTIIRKKVMTDSTTREMT

SEQ ID NO: 281656 - protein, 176 aa, Zea mays
  unsure (1)..(176): unsure at all Xaa locations
  Clone ID: MRT4577_19973C.1.pep
QQRAASSEGVYSGITITTVKKLGRLGRTAPPGLVVVHARIRAAGRSGGGGGSEGRAWKGQGARAGEKGAAAFAGEATKGAGERALQEEAAQVPGADPRSACIMHARATPTHGWADGGIQPQGPRLVVRPCLFGEYGQAASGVATFFFTLPSSLPQSSSGLLLXPGRVGRKAWVEPG

SEQ ID NO: 281657 - protein, 328 aa, Zea mays
  Clone ID: MRT4577_19974C.1.pep
MNYAAAATNAPAAAPAAAPASGTEHAHYPYYAGYSYPYGAYHQPAPPTYSSAVAAASSSYYYPVPAAASSTAAQYDPYSGYQHYSHPEGGGSAGAGLVGCYSTVGEALQQAAVASTTQAALEATTKEAGKQFGFDPQSYAQAAVARASNGITQPAAAPGLHHAQWNAHFGYPVPKYVLRKQMKKKPKTVQPAPCEVCKIQCDTLEVLLSHKQGKKHKKNLEKLQDSITRKPIIKPPSNVIGPSMPPVAVSNCVVPSVQPKKKSSSAATREDLEVKKRRVLEAGAAQGEVKICQVCNVVVNSQKVYEFHIAGQKHQALVRKQQPLRFVT

SEQ ID NO: 281658 - protein, 108 aa, Zea mays
  unsure (1)..(108): unsure at all Xaa locations
  Clone ID: MRT4577_19975C.1.pep
TPPKQPHYADMILQSIRLPQRDRGXSSLAISQYIEGKHGDKLVTNFHKQLTAQLKTLTVDDKLTRVNNSFKLPATDANPIASNSKVPNDAPNSNTSHXANANTASKPK

SEQ ID NO: 281659 - protein, 370 aa, Zea mays
  Clone ID: MRT4577_19976C.1.pep
MEAAAAVLPTLVPSGSAVVVLLAYLGYLAAAGAILPGKLVDGALLPDSSRLHYRCNGLLSLLLLLGLSAFGVYMGWMSPTVVADMGLELLSVTFIFSVIVSFALYIAGIKSGHKSSSLRPHVSGSFMQDWWFGVQLNPHFMEVDLKFFFVRAGMMAWLFINLSLFAKSYFAGSANLSVILYQFFCAWYIIDYFVHEEFMTSTWDIIAERLGFMLVFGDLVFIPFTFTIQGWWLLKNKVELSLLSGLANLCIFLIGYLVFRGANKQKHVFKKDPKAPIWGKPPKVVGGKLLASGYWGIARHCNYLGDLLLALSFSLPCGVSSVVPYFYPTYLLILLVLRERRDEARCSQKYREIWAEYCKLVPWRILPYVY

SEQ ID NO: 281660 - protein, 179 aa, Zea mays
  Clone ID: MRT4577_19977C.1.pep
MALSAALRLPLPLPRLLGPSAVIFGAASRRRAAAAAAKAAALRLLSASSPSPASFSSRPTRPLRSRRRNRGDDGRAAAAGGAGGGEGGGAGLVVKERILPVELHKEATEAYMSYAMSVLLGRALPDVRDGLKPVHRRILYAMHEMGLASRRPFRKCARVVGEVLGKFHPHGDTAVYESL

SEQ ID NO: 281661 - protein, 235 aa, Zea mays
  unsure (1)..(235): unsure at all Xaa locations
  Clone ID: MRT4577_19978C.1.pep
MEAAAAVLPTLVPSGSAVVSRRSSLATVVVLLAYLGYLAAAGAILPGKLVDGALLPDSSRLHYRCNGLLSLLLLLGLSAFGVYMGWMSPTVVADMGLELLSVTFIFSVIVSFALYIAGIKSGHKSSSLRPHVSGSFMQDWWXFGVQLNPHFMEVDLKFFFVRAGMMAWLFINLSLFAKSYFAGSANLSVILYQFFCAWYIIDYFVHEEFMTSTXDIIAERLXFMLXVFGDLVFIP

SEQ ID NO: 281662 - protein, 122 aa, Zea mays
  Clone ID: MRT4577_19979C.1.pep
MWHVVLSYLVFRGANKQKHVFKKDPKAPIWGKPPKVVGGKLLASGYWGIARHCNYLGDLLLALSFSLPCGVSSVVPYFYPTYLLILLVLRERRDEARCSQKYREIWAEYCKLVPWRILPYVY

SEQ ID NO: 281663 - protein, 75 aa, Zea mays
  Clone ID: MRT4577_1997C.1.pep
LGKEAIAKGLLKEDALVLTRTNTYSSIGDFLDSMNRRIMETASKSQTLCSENVVRNELAHTLSNVILRHSIDEVP

SEQ ID NO: 281664 - protein, 83 aa, Zea mays
  Clone ID: MRT4577_19980C.1.pep
CRTVLKIAGFPPPVAIHSLKALQAGKYLSVLSILEAHWQQRDTQASKVLDLRRHLFFSLVGLPTSKLLVPVNHVHVRFRILFS

SEQ ID NO: 281665 - protein, 170 aa, Zea mays
  Clone ID: MRT4577_19981C.1.pep
MEAAAAVLPTLVPSGSAVVVLLAYLGYLAAAGAILPGKLVDGALLPDSSRLHYRCNGLLSLLLLLGLSAFGVYMGWMSPTVVADMGLELLSVTFIFSVIVSFALYIAGIKSGHKSSSLRPHVSGSFMQDWWFGVQLNPHFMEVDLKFFFVRAGMMAWLFINLSLLQRATL

SEQ ID NO: 281666 - protein, 84 aa, Zea mays
  unsure (1)..(84): unsure at all Xaa locations
  Clone ID: MRT4577_19982C.1.pep
MVMATAVALAHFLGAALPLLLXGAAXAGEVGVNYGRVANDLPDPASVVQLLKQSGITMVRLDDANPKVLTSLANTGIKVMVMLP

SEQ ID NO: 281667 - protein, 78 aa, Zea mays
  unsure (1)..(78): unsure at all Xaa locations
  Clone ID: MRT4577_19983C.1.pep
LPLGEVDFGWGRPAFPXYQFPWPGGPGYVMPIPSAPGDGNWVVYVHPALKVVQVMKAEPPVFKTLESNYVFDQSGELN

SEQ ID NO: 281668 - protein, 126 aa, Zea mays
  Clone ID: MRT4577_19984C.1.pep
MAASMISSIALAVAPEGLPPVVRRACCFAYVCSKKKIKTDKPYGIGGGLTGDLTANGRKDKGKGVDQVVDKYGANVGGYSPSYNEDDWSATWDFYGGGTTGLTIWAVTLAGILGGSALRGYNTSYL

SEQ ID NO: 281669 - protein, 68 aa, Zea mays
  Clone ID: MRT4577_19985C.1.pep
VSPRHIFSIMGEEQLLLLSPICFVRRSLNVQKRPILVDLKRSPLLSMCPLLKEDWKFVGTSDSMVRLA

SEQ ID NO: 281670 - protein, 81 aa, Zea mays
  Clone ID: MRT4577_19986C.1.pep
SRPAGKFSFQIRRTTILSRKMCFSGWPLHDLDRNEDGMVSDERVLPSNRVLSLLNERLDSCEDCHHNPSFRSLRDQELCAT

SEQ ID NO: 281671 - protein, 56 aa, Zea mays
  Clone ID: MRT4577_19987C.1.pep
KLSNFICLVFYSFLLDLMCFLDFIILFFGFYNFGQSKSSSAGLSNNRWYRRSPPHT

SEQ ID NO: 281672 - protein, 31 aa, Zea mays
  Clone ID: MRT4577_19988C.1.pep
GKLYAHLLFSLTIKKFYLNPQNELSKIAHLT

SEQ ID NO: 281673 - protein, 54 aa, Zea mays
  Clone ID: MRT4577_19989C.1.pep
VNKMARVEVVRLSYSCSRSRGKSVDQFISLTNSYTTAGQRGTECGSLLPRHVLH

SEQ ID NO: 281674 - protein, 234 aa, Zea mays
  Clone ID: MRT4577_1998C.1.pep
PIALVKFQFLKMKANKRAPRATGKFVNLFGACFPKPMLPATPANHTGNAPPTQNPEQHSPWVMGGGEAIASQSLHAADATVCAPPSSVPASTLPTSTAPPARRGGDRGRGEEGRRPRAIVCVPPSALEPPSACHHPLRRRPHKRQRLSTTRSRPRRPPPLSKVTHHPQLAVLRTSSRPWLEVFNDVRPLLVLMYLAKVSNMVAINPTFLIENMMRKLVLFLQNNRGNNRVTWLN

SEQ ID NO: 281675 - protein, 55 aa, Zea mays
  Clone ID: MRT4577_19990C.1.pep
TLSNAPILSSGPTRGYLVLFGHTPTPLPTPLMTFSRNNRLPNLDLLLPMTTLAQT

SEQ ID NO: 281676 - protein, 60 aa, Zea mays
  Clone ID: MRT4577_19991C.1.pep
ECAWGTGAEIPEQKCSAVLWSRPVGAIRMPGLALQLADAAADALELSLPLLPPLHRGDHQ

SEQ ID NO: 281677 - protein, 109 aa, Zea mays
  Clone ID: MRT4577_19992C.1.pep
SLTHWGYKKQKKKKKKKKKTKKKKGGGPFKEPNLTTAGWQRKTFFIGPPKSIHLGRRLKPPEWENPGRHQLKSLGKKSPFPHRGKNKKGPPQPPFQTFATPKREKGHPP

SEQ ID NO: 281678 - protein, 141 aa, Zea mays
  Clone ID: MRT4577_19993C.1.pep
DDPAVDCLRRKASVGDHNYPAFFVVLNSTRDAVTQPRVVRNVGSSARATYWARVTSPAGVRVTVNPRKLRFSATQKTQGYEITFTSRRMWRVPDKYTLGSIVWSNGEHKVTSPIAITWPPPPSQVAAMLCELPNWVCFSSE

SEQ ID NO: 281679 - protein, 131 aa, Zea mays
  Clone ID: MRT4577_19994C.1.pep
FGSSMGFVFFLIDSLKAAQECYEPLRRFPSLLQAQGARSACTPAPTPTAFGPRALCSWGSAFARTPSSSSPSSWPSSSASPTASRTSAPTPATRTRAASMRSHTPPPAETVGATIARPTTDLFYVVPLRVD

SEQ ID NO: 281680 - protein, 120 aa, Zea mays
  Clone ID: MRT4577_19995C.1.pep
MAFCTPSLFKTWAGPKAASKDILCKGNFKYVPGTSGGKGPQVEVVMVHSRRRGINRVSGYMFKKNGIFFFWGSKKWVLQWAGKVETYTQRRQGLGPIKKMKAVFPWPTGPAPLAPTKDTR

SEQ ID NO: 281681 - protein, 141 aa, Zea mays
  unsure (1)..(141): unsure at all Xaa locations
  Clone ID: MRT4577_19996C.1.pep
RYLVAVPFLQPTATKSSIQRSTPCLSALLRAHASCRLHRAXETLNTAVCRNYHRSLSLLSGLQRRLLHRVRLAHRYTQAEGLHPGRHRLSWKCAHDNDGLYCQHHGCVGAERRAVVLSLTKSTRSPSPTASWTGTLRAISL

SEQ ID NO: 281682 - protein, 75 aa, Zea mays
  Clone ID: MRT4577_19997C.1.pep
DHFRLTILIQFRFGLCSHSICDLPFHGNVSICLLWLFRQCKGLTLHGRCHLLCCCSGILPIKSRLWRLICLPSKH

SEQ ID NO: 281683 - protein, 589 aa, Zea mays
  Clone ID: MRT4577_19998C.1.pep
MESEDDMHDANDSAEDDFYSGGEAGLAASDDGDADYDFADHDSDDSAELLSHRQQQNYSILSEVDIKRRQEDDINRVSTVLSISKPEACVLLRNYNWSVSKVHDEWFADEERVRKVVGLPEKHIEMPNDREVTCGICFESCPLGSMSAAACGHPFCGTCWRGYISTAISDGPGCLMLRCPDPSCAAAVGQDMINSLADVEDTEKYGRYLRRSYIEDNRKTKWCPAPGCEYAAEFVMGSGSYDVNCNCSYGFCWNCTEEAHRPVDCATVSKWILKNSAESENMNWILANSKPCPKCKRPIEKNQGCMHITCTPPCKFEFCWLCLGPWSEHGERTGGFYACNRYESARQEGAYDESERRREMAKNSLERYTHYYERWAANQSSRQKALGDLQSLQNDKLERLSDIQSQPESQLKFIIEAWLQIVECRRVLKWTYAYGFYLPEHEHAKRQFFEYLQGEAESGLERLHQCAEKELQIYLDAESPSKDFNDFRTKLAGLTSVTRNYFENLVRALETGLNDVGPSTSHGTCSKSATSKSLGGKSKSGKNRASSTSSKSGGSSRGVDDSNIWTCDQCTYANPKSARACQACDHQHR

SEQ ID NO: 281684 - protein, 42 aa, Zea mays
  Clone ID: MRT4577_19999C.1.pep
RNKTFFFSFQLVIQGIGHTDTAPHGDAGHIITQSSPLKDPTS

SEQ ID NO: 281685 - protein, 671 aa, Zea mays
  Clone ID: MRT4577_1999C.1.pep
HRRLAHVGMKNLYKLLKGEHVLGVTDVCFEKDRPCAACQAGKQVGSTHHIKNVMTTSRPLELLHMDLFGPVAYLSIGGSKYGLDKSENQGTIKCFLRRAQNEFELKVKKIRSDNGSEFKNLQVEEFLEEEGVKHEFSAPYTPQQNGVVERKNKTLIDMARTMLGEFKTPERFWLEAMNTACHAINQLYLHRLLKKISYELLTGNKPNVSYFRVFGSKCYILVKKGRHSKFAPKAVEGFLLGYDSNTKAYRVFNKSLGLVEVSSDVVFDETNGSPREQVDLDDIDEDEVLTAAMRTMAIGDVRPQEPHEEDLPSSSTMVHPPTQDDVQSAFLNGPIKEEVYMEQPPGFEDGRYPDHVYKLSKALYGLKQAPRAWYECLRDFLISNTFKVGKADPTLFTKTCNGDLFVCQIYVDDIIFGPTNQKSCEEFSRVMMQKFEMSMMGELTYFLGFQVKQLKDGTFISQTKYTQDLLKRFGMKDTKPAKTPMGTDGHIDLNKGVSTPCFGIWYPKGSTFDLIGYSDSDYAGCKVDRKSTSGTCLFLGRSLVSWSSKKQTSVALSTAEAEYIATGNCCTQLLWMRLTLRDFGYNLSEVPLLCDNESAICLVDNPVEHSHTKPIDIRHHFLRDHQQKGDIEVYHISTENQLADIFTKLLDEKMFCRLRSELNVLDSRNLD

SEQ ID NO: 281686 - protein, 77 aa, Zea mays
  Clone ID: MRT4577_199C.1.pep
ERERERIVIPARGCRNMDPKTHTTDEGGIMGMASNRTLSGRTWEPGHCARIRHPRIVYKKDEMAVNAEHRTGADIIP

SEQ ID NO: 281687 - protein, 55 aa, Zea mays
  Clone ID: MRT4577_19C.1.pep
RRRGYKERRGNLTTGARNEGKRTKQSDPRPLASETGTLGVANAPVAINVRLQGES

SEQ ID NO: 281688 - protein, 229 aa, Zea mays
  unsure (1)..(229): unsure at all Xaa locations
  Clone ID: MRT4577_1C.1.pep
MPSAILILPARAYLVMMESHNPSHSQIAEVKMDIAASASGAAGSKFCKGAACDFSDASNSSKDARERSASMRKLIVAVVLCVVFMAVEVVGGIKANSLAILTDAAHLLSDVXAAFAIXLFSLWASGWEATPRQSYGFFRVEILGALVSIQLIWLLAGILVYEAVVRLVGESGDVRGSLMFAVSAFGLVVNVLMAVLLGHDHGHGHGHSHDHGHVHGDSDDAHSPPTTRS

SEQ ID NO: 281689 - protein, 53 aa, Zea mays
  Clone ID: MRT4577_20000C.1.pep
GPLPFYSRARGFPHVPCLGGVYLGRFILTTPHVVAFSRKLCCGRLTGHKVIKL

SEQ ID NO: 281690 - protein, 511 aa, Zea mays
  Clone ID: MRT4577_20001C.1.pep
MESEDDMHDANDSAEDDFYSGGEAGLAASDDGDADYDFADHDSDDSAELISHRQQQNYSILSEVDIQRRQEDDINRVSTVLSISKPEACVLLRNYNWSVSKVHDEWFADEERVRKVVGLPEKHNEMPNDREVTCGICFESCPRGSMSAAACGHPFCSTCWRGYISTAISDGPGCLMLRCPDPSCAAAVGQDMINSLAADDDKEKYGRYLRRSYIEDNRKTKWCPAPGCEYAVEFVMGSGSYDVNCNCSYGFCWNCTEEAHRPVDCATVSKWILKNSAESENMNWILANSKPCPKCKRPIEKNQGCMHITCTPPCKFEFCWLCLGPWSEHGERTGGFYACNRYESARQEGAYDESERRREMAKNSLERYTHYYERWAANQSSRQKALGDLQSLQNDKLERLSDIQSQPESQLKFIVEAWLQIVECRRVLKWTYAYGFYLPEHEHAKRQFFEYLQGEAESGLERLHQCAEKELQIYLDAESPSKDFNDFRTKLAGLTRYMLLLSMPSMLALMT

SEQ ID NO: 281691 - protein, 110 aa, Zea mays
  unsure (1)..(110): unsure at all Xaa locations
  Clone ID: MRT4577_20002C.1.pep
STDRPLERGSQAQPRPDRRPRQQQAAQQKVSGPATQQKPXGDPVEGKRGPGPTREETDPRASTKNPPPPEAGQSKATSNNRAADEEGTHKHWKEGRSATSATTPQRAAWP

SEQ ID NO: 281692 - protein, 56 aa, Zea mays
  Clone ID: MRT4577_20003C.1.pep
SRQRTWEWRRRRDPVCELALAVPAITVYGYRLKLNQAIASCFDMLLNYILTSFNSI

SEQ ID NO: 281693 - protein, 127 aa, Zea mays
  Clone ID: MRT4577_20004C.1.pep
KKKKKKKKKKKKKKKKKKKKKKKKKKKKKKKKKKKKKKKFFPLAETPLRGIFANFLHIGGRLTFLLRAPFPLLGSRFKFNWPCFYNVGIGKTLVFPILFLLKKFPFFQFGLLAKRPPPFAFPNICPP

SEQ ID NO: 281694 - protein, 94 aa, Zea mays
  unsure (1)..(94): unsure at all Xaa locations
  Clone ID: MRT4577_20005C.1.pep
FTKRVWGPTGVCLMGGPGGKTWGIPPLLIGGAYFLFILPGGGNFCFGGGSNPQPWGWVQQQLLFPCFGNKPFGLKNGREFYLFGPQKKKKXXKT

SEQ ID NO: 281695 - protein, 43 aa, Zea mays
  Clone ID: MRT4577_20006C.1.pep
QWLLVPLSFDIGTKQLSMTSHNTNWYLYKNTRCTERNAFFTLP

SEQ ID NO: 281696 - protein, 88 aa, Zea mays
  Clone ID: MRT4577_20007C.1.pep
FAEVELAQHAVELDCSAFIQRLPPSRIEERTLNANRAAITVQIMSLNKAYRVGSVPTLDVWVFPRLVGAAKARSPTGLTLLLSMICRP

SEQ ID NO: 281697 - protein, 63 aa, Zea mays
  Clone ID: MRT4577_20008C.1.pep
CKPLYGYVSGLSRVPRCAHPGLMTSICIIIGSMTAQACAYSAEADHRPIVGLCSEHQRECLPQ

SEQ ID NO: 281698 - protein, 66 aa, Zea mays
  Clone ID: MRT4577_20009C.1.pep
MLRVAGRRLSASLCWRAGVAAARSALGGCGAAERDDGSARGCRQTRFSSDCRFVVAARASGKGYSY

SEQ ID NO: 281699 - protein, 634 aa, Zea mays
  Clone ID: MRT4577_2000C.1.pep
MAVKPTSIIAASATARHGDQQVATALLGAAGALCHDSDAVSVPGVLPPRSHHHLHRTHCPLSPLLPHSSCPPHLPAPLPPPHLTSVSARIAGVVLLPRGVFPLLPPRSRYVMGSPLLATPACGAYDVLWGFAAGRFLSILAASDEDQGSSEQEAAASNPEGVDRVCAAIADVVASGADANLEAALSALSPPLCEAVVLAVLHRFKHAHRPSYRFFRWATVSGGFTHTTITYCKMLHILGKTRQFESMVAMIQEMGKAGALSMDAFKVAIKSFAAAGEIKNAVGVFELMRKNGFDDGVESFNCLLVALAKEGLGREARQVFDKMHGQYSPDLRSYTALMLAWCNARNLVEAGRVWNEMLEKGMDPDVVVHNTMIEGLLRGQRRPEAVKMFELMKAKGPPPNVWTYTMLIRDHCKQGKMDMAMECFEEMQEAKCQPDVATYTCLLVGYGNAKQMDRVTAVLEEMTQKGCPPDARTYNALIKLLTNRNMPDDAARIYKKMIKKGLEPTIHTYNMMMKSYFVGDSNYAMGCAVWEEMHQRGICPDVNSYTVFINGHIRHGRPEEAYKYIEEMINKGMKAPQIDYNKFAADFSKAGKPDILFELAQKVKFAGKLDVSNVFYQWADRMKSRVKRNVPSDW

SEQ ID NO: 281700 - protein, 76 aa, Zea mays
  Clone ID: MRT4577_20010C.1.pep
PAHLAGIDLVESTNWSGPFFREARSYRCRHVLFAGIVGRKPWMETDLLLIASTCPPSSWFARDLFLTWYHDSSPGW

SEQ ID NO: 281701 - protein, 233 aa, Zea mays
  Clone ID: MRT4577_20011C.1.pep
MADQFLGFDLSTQQLKGIIVGSDLKLIHEAKVDFDADLSKYGIEKGVLTNPDEGEVFAPVALWLEAIELVLQRLKEQGADFSKIQGISGAGMQHGTVFWNHDAETLLGSLDSGKTLIEQLEGGAKGERKGAFSHPFSPNWQDASTQKQCEAFDKTLGDPRNLALATGSSAHHRFSGPQIFRFREKYPQAYKETARISLVSSFLASIFLGKVAPMDISDVTGANLWDIKKGRWH

SEQ ID NO: 281702 - protein, 70 aa, Zea mays
  Clone ID: MRT4577_20012C.1.pep
RTRGPTFKGSQFYLTSFLQPHSSFIGKPNLNPRAGVLKRFDWETPGVTTVNGLNKHPLLKTWGKTKKSPP

SEQ ID NO: 281703 - protein, 73 aa, Zea mays
  Clone ID: MRT4577_20013C.1.pep
HNNIHPPFQTPQLIIRIVVLLEQMGIKLPKHANCLVTLVSTKKMLLMIIVVCSQHFFLHDAMKDITFGTPGNY

SEQ ID NO: 281704 - protein, 192 aa, Zea mays
  unsure (1)..(192): unsure at all Xaa locations
  Clone ID: MRT4577_20014C.1.pep
MPAVSPHYLCALLSSLSAPPAPPDPSWTGIAMSDSEEHDFXSYADAGASXTYPQHAVTVRKNAFIVIKNRPXXVAEASTSKTGKHGHAKCHXYIAIDIVHGKKLEDMVPSSHNCDIPHGNRTDYQLMDISEDGSVRLLTSDGDTTDGLILPADETLVVQIKEGFXSAKDLVVTDHSAMGDEHICAMKDDDPK

SEQ ID NO: 281705 - protein, 156 aa, Zea mays
  unsure (1)..(156): unsure at all Xaa locations
  Clone ID: MRT4577_20015C.1.pep
MSDSEEHDFESYADAGASDTYPQHAVTVRKNAFIVIKNRPXXVAEASTSKTGNHVHLKCHLXVAIHIVHGKKIEDMVPSSHNCDIPHVXNRTDYQLIDISEEGFVRLLTSDGNTTDGLILPADETLVVQIKEGFXSSKDLVVTDHSAMKDDYICAL

SEQ ID NO: 281706 - protein, 53 aa, Zea mays
  Clone ID: MRT4577_20016C.1.pep
PHHTLNFNNPKLTLFSPFLINFLWRIFKNLGTHIKHKFNILSILSFYNFKHHQ

SEQ ID NO: 281707 - protein, 161 aa, Zea mays
  Clone ID: MRT4577_20017C.1.pep
CLIQDIDILKPISVVPMSTLVPATPRAAVELPNNMFTRYIPIDSLASSGVVLLRYAIEVHGPPEGSVEMATQCLVIPALSSTHHIPAASWNMSTGEFVADREFLTLPSSDLVVGKYYIFPRQPPWPPLVQFVLHGGIEKEYIWRVEELFFKLLSMKMMETG

SEQ ID NO: 281708 - protein, 161 aa, Zea mays
  unsure (1)..(161): unsure at all Xaa locations
  Clone ID: MRT4577_20018C.1.pep
HVLPATLIGYREAVXLKKYISSTPRPVARIVFGGTRIGRARAPAVAVFSARGPSLTNPSVLKPDVVAPGVNIIAAWPGNLGPSGLESDARRSNFTVLSGTSMAAPHVSGIAALIRSAHPSWSPAMVRSAIMTAARAGRVWARAAPSATARCCVTTSRASPS

SEQ ID NO: 281709 - protein, 65 aa, Zea mays
  Clone ID: MRT4577_20019C.1.pep
FHNFFWEIKNSFDLFFGPPTWETEAGFFSLMNNWPKPKKTFSTFFEIRAIWVLWWTGDPHCSGGI

SEQ ID NO: 281710 - protein, 125 aa, Zea mays
  unsure (1)..(125): unsure at all Xaa locations
  Clone ID: MRT4577_2001C.1.pep
MNELCDLEVHINGHHTLYLHQSVMCAFYGRLKTLEKQEKKNKGGGRKEAVFINLSGGFPGGADGFELVARFCYNDRRVLALXSNLPLLHXAGVSLEKTEEVCACYLLAQGEALMNGLYYWTWADM

SEQ ID NO: 281711 - protein, 58 aa, Zea mays
  Clone ID: MRT4577_20020C.1.pep
MSPNVETPPANSIKTTVLAAPTTKASAGGFKAAPKGGGCDCNTCKCGPNCGCSCCNCN

SEQ ID NO: 281712 - protein, 103 aa, Zea mays
  Clone ID: MRT4577_20021C.1.pep
FYLDYIGLKRVKHDTYMIIYRCGNDTEYRLLYLNHIVLTVSTANLLNSAIEDLQGEYDMKDLGATNHFLRMTGKRRAQGLFLHQRQYGIDILERTDMYDCKAC

SEQ ID NO: 281713 - protein, 109 aa, Zea mays
  Clone ID: MRT4577_20022C.1.pep
HINVKFRTVSSTMLSSNGHIGHISSFSSGSSLLRLQLFAYCADRRLVIVQDILSLRHQCSSPLIPINVKRSRIRLYAFDVVENSQLVFLRTGHHLISSNSRASAHDQEH

SEQ ID NO: 281714 - protein, 42 aa, Zea mays
  unsure (1)..(42): unsure at all Xaa locations
  Clone ID: MRT4577_20023C.1.pep
XXXWGRTNKNRRPNMYWGQKIRSQGNGFPGVAVQAISQLPCT

SEQ ID NO: 281715 - protein, 122 aa, Zea mays
  Clone ID: MRT4577_20024C.1.pep
STPDMVHALRAPPLFARPLNEKGGFFRPPLVHIEGGGEVPPPAEAHGLCVRPPQRPCGPSGTGGFSIVPSASLVARRTTAPPRARPSSFFYNKNNKKKTKKKKKKKKTQKKKKKKKTKKKKK

SEQ ID NO: 281716 - protein, 128 aa, Zea mays
  unsure (1)..(128): unsure at all Xaa locations
  Clone ID: MRT4577_20025C.1.pep
MGVSFTNLNSEXGSKSVDEYLLTRSYITGYQASXDDLTVYTSLSSAPSCKNIHAARWFNHIDALMRLSGITAESQSAKVESTAVPSAPTPDVGEAQAPSAEEDDNYDVYLFGDETQHDKKAAEHRAAS

SEQ ID NO: 281717 - protein, 57 aa, Zea mays
  Clone ID: MRT4577_20027C.1.pep
WKLTRQLCMVARYVGSLAGFIPAVLRPWQGQQHPASAAARPRASSARRRRPRRPRVR

SEQ ID NO: 281718 - protein, 61 aa, Zea mays
  Clone ID: MRT4577_20028C.1.pep
SKFCRKPVPGIFFMIAVLDFRVICFFTFIKIPRLRGEKFHLFLLEVFRRFQYFLREKRQLF

SEQ ID NO: 281719 - protein, 42 aa, Zea mays
  Clone ID: MRT4577_20029C.1.pep
GGLFPKAGIYSFAELLGIGFYRLLALFREKIKTLFAANMGTL

SEQ ID NO: 281720 - protein, 65 aa, Zea mays
  Clone ID: MRT4577_2002C.1.pep
AGTKISFGFKNPGGIHFWHATKQLLPQKQGSLPRKSGHYLLQFHTLTYTRHYTLGTTHGHEPTGG

SEQ ID NO: 281721 - protein, 60 aa, Zea mays
  Clone ID: MRT4577_20030C.1.pep
LVFGCKLFPVMGCSVGNPVKGFPQARKGFSRQLKKDLGEGGEKPPAAEPTALNGGEHNGL

SEQ ID NO: 281722 - protein, 332 aa, Zea mays
  unsure (1)..(332): unsure at all Xaa locations
  Clone ID: MRT4577_20031C.1.pep
KKAGAMNALVRTSAIMSNGPFILNLDCDHYVHNSAALREGMCFMLDRGGDRVCYVQFPQRFEGIDPNDRYANHNLVFFDVAMRAMDGLQGPMYVGTGCXFRRTALYGFSPPRATEHHGWLGRRKIKLLLRKPTMGKKTDRENNSDKEMMLPPIEDDAFQQLDDIESSALLPRRFGSSATFVASIPVAEYQGRLLQDTPGAHQGRPAGALAVPREPLDADTVAEAISVISCFYEDKTEWGRRIGWIYGSVTEDVVTGYRMHNRGWRSVYCVTRRDAFRGTAPINLTDRLHQVLRWATGSVEIFFSRNNALFASPRMKFLQRVAYFNVGMYPFT

SEQ ID NO: 281723 - protein, 75 aa, Zea mays
  Clone ID: MRT4577_20032C.1.pep
KNACWRVFETVRFHAVREELSGLVIGRWYCNVGNNIELLLLDDDDDACNLGVYSFSFPRAKTTQKMFIKEKKKKK

SEQ ID NO: 281724 - protein, 83 aa, Zea mays
  Clone ID: MRT4577_20033C.1.pep
PNKSESSMMKNKNRRNRWRRSKAHHQQQLPDTVTDNRVIIRDVSGDYSSFPRYSVAGNGVRPELPVYTSSPDSRNVRSVEHRQ

SEQ ID NO: 281725 - protein, 86 aa, Zea mays
  Clone ID: MRT4577_20034C.1.pep
MEPRKSNYLVALVLASFLLSVAVAGGHRKKLDDASESMETSESTQEDDEIAVVVHERILSQVKMNDYARYDPSPTMAKPRSKDIPN

SEQ ID NO: 281726 - protein, 45 aa, Zea mays
  unsure (1)..(45): unsure at all Xaa locations
  Clone ID: MRT4577_20035C.1.pep
GDSCLMDSLHFPIPQTSPYKAISPCAIPSDFLWIXGKYKTSPIFF

SEQ ID NO: 281727 - protein, 63 aa, Zea mays
  Clone ID: MRT4577_20036C.1.pep
PLLVTIAVDPAESPLDALGFPPKALLNGEPKIVFKAPRWQGLCSEATSLYAGTPERTPPFILG

SEQ ID NO: 281728 - protein, 120 aa, Zea mays
  Clone ID: MRT4577_20037C.1.pep
GRVSLTCTDTKLQIASQKACADDYTALLDPWKFADGSERPGRSFFFPFRRCYSFTNTNGSGRPGFGCTCSTGSFVGKLAVQINFLCMMFQKMQIKDGFHTEGSFCTETKCGRQADVCIGR

SEQ ID NO: 281729 - protein, 188 aa, Zea mays
  Clone ID: MRT4577_20038C.1.pep
MVLVLALGDLHIPHRAPDLPAKFKSMLVPGKIQHIICTGNLCIKEVHDYLKSLCPDLHITRGEHDEDARYPETKTLTIGQFKLGLCHGHQVVPWGDLDSLAMLQRQLDVDILVTGHTHQFKAYKHEGGVVINPGSATGAYSSITYDVNPSFVLMDIDGLRVVVYVYELIDGEVKVDKIDFKKTATMHG

SEQ ID NO: 281730 - protein, 188 aa, Zea mays
  Clone ID: MRT4577_20039C.1.pep
MVLVLALGDLHIPHRAPDLPAKFKSMLVPGKIQHIICTGNLCIKEVHDYLKSLCPDLHITRGEYDEDARYPETKTVTIGQFKLGPCHGHQVVPWGDLDSLAMLQRQLDVDILVTGHTHQFKAYKHEGGVVINPGSATGAHSSITYDVNPSFVLMDIDGLRVVVYVYELIDGEVKVDKIDFKKTATMHG

SEQ ID NO: 281731 - protein, 258 aa, Zea mays
  Clone ID: MRT4577_2003C.1.pep
IGADIVRRFTELEANGFFRWLLQFQGFRERLLADELFLTKLGIECGIGLVAKTVAEFQKRGDNFFKEIEVVISDVVMAIVADVMLVYLPAPTIGLQPPLARNAGAIANFFYNCPDNTFQIAMAGRSFSLLQRIGAFVRNGIKLLAVGTTASLIGTSVTNAALKAKRAVDKDLEDEVMEIPVVSTSVAYGVYMSISSNLRYQLLAGVIEQRMLEPLLHNQKLLLSAMCFIVRTGNTFLGSLLWVDYARWIGVQKSHEDA

SEQ ID NO: 281732 - protein, 169 aa, Zea mays
  Clone ID: MRT4577_20040C.1.pep
MSQQLPSARPPSAGGSIGHGLWPTPHRCAPSAHFLPARAAQASGPGYSQQQALVFHPQRRTYLFGAGALKLVVPWGDLNSLAMLQRQLDVDILVTGHSHQFKAYKHEGGVVINPGSATGAYSSITYDVNPSFVLMDIEGLRVVVYVYELIDGEVKVDKIDFKKAATMQA

SEQ ID NO: 281733 - protein, 77 aa, Zea mays
  Clone ID: MRT4577_20041C.1.pep
AFPHIGHWNAMEKNSKNSTCLNSQQPLATNLQKSLHRKQTPRPFPTYTILKKTGGGQNADRSRPFPKPPNKKTFENK

SEQ ID NO: 281734 - protein, 89 aa, Zea mays
  unsure (1)..(89): unsure at all Xaa locations
  Clone ID: MRT4577_20042C.1.pep
HQLLPFNQLSALSSAGYLQQQMLLPFIQLAAAXNRASFLSQHQLLPLYQQFSANPASFFHLLQLVPFVQLVLADSTASCXQVIVGSALF

SEQ ID NO: 281735 - protein, 188 aa, Zea mays
  Clone ID: MRT4577_20043C.1.pep
MVLVLALGDLHIPHRVPDLPAKFKSMLVPGKIQHIICAGNLCIKEVHDYLKSLCPDLHITGGEYDEYARYPETKTLTIGQFKLGLCHGHQVVPWGDLDSLAMLQRQLDVDILVTGHSHQFKAYKHEGGVVINPGSATGAYSSITYDVNPSFVLMDIEGLRVVVYVYELIDGEVKVDKIDFKKAATMQA

SEQ ID NO: 281736 - protein, 315 aa, Zea mays
  unsure (1)..(315): unsure at all Xaa locations
  Clone ID: MRT4577_20044C.1.pep
TRPDRSSKLKPXCVPSLIDYNFHKAACGHTLTIGLTTSGHIFTVGSPVYGQLGNPNNDGRYPRLVEEQLGGGGVVEVACGSYHVAVLTNAGEVYTWGKGTNGRLGHGDIADRKVPTLVEALKDRSVKRVACGSSFTAAICQHKWVSGMEQSQCSACRQPFGFTRKRHNCYNCGLVHCHSCSSKKALRAALSPNPGKPYRVCDSCYVKLSKVLDSGVSYSRNTIPRLPGDTKAERIDTKATRVAQSNSSDMIRNLDVKAAKQTKKSEYSSQVPATLQLKDIPFISAPDLQNLSTVANQYPYDPRSTLPSLRMPYLN

SEQ ID NO: 281737 - protein, 59 aa, Zea mays
  Clone ID: MRT4577_20045C.1.pep
TNNTSLSSSHARSTEYAPAEYCSHATADNLMSQSTITSVTHLYDLHRLYCTPRRSTHNS

SEQ ID NO: 281738 - protein, 47 aa, Zea mays
  unsure (1)..(47): unsure at all Xaa locations
  Clone ID: MRT4577_20046C.1.pep
LLLPLIMLVLTKSHQFSDAHKGFWAEGXIIIMNNFTMIWLRKHPENE

SEQ ID NO: 281739 - protein, 102 aa, Zea mays
  Clone ID: MRT4577_20047C.1.pep
RFSSCFNGAFRLKGWNLAFRLWNACVDRANHFAARGAEAAVVETEIRQAVPELLLIAGLPEGVLNAVEKAASLFHRTGLFWLDLWRADLASVCFEKATPVVC

SEQ ID NO: 281740 - protein, 99 aa, Zea mays
  Clone ID: MRT4577_20048C.1.pep
KEAPERAAALSRSQSAREASLRSERAAMQRSQHAVHRRPRYMLQEQADRATVAMKQKACAERKEKALSKANDRAEAYRSSKMRAFQEALNTALPAEVER

SEQ ID NO: 281741 - protein, 150 aa, Zea mays
  unsure (1)..(150): unsure at all Xaa locations
  Clone ID: MRT4577_20049C.1.pep
SITCSGSSSNVGNGYVSWYQVIPGSGXRTLIYDDTSRASGVPDRFSGSRSGNTATLTISSLQAEDEADYFCASAEDSSSNAVFGSGTTLTVLGQPKSPPSVTLFPPSTEELNGNKATLVCLISDFYPGSVTVVWKADGSTITRNVETTRA

SEQ ID NO: 281742 - protein, 53 aa, Zea mays
  Clone ID: MRT4577_2004C.1.pep
DLERSPIHTYNKIFLKLYDLYYIHFPKLYNILTNKTLIIHNLISYQNILIYLS

SEQ ID NO: 281743 - protein, 59 aa, Zea mays
  Clone ID: MRT4577_20050C.1.pep
STRNAKSVASFVYIHLVLRGYPYFDCCASCHSSVRRLVQFRPPFLTNLGPPAYRGFCKF

SEQ ID NO: 281744 - protein, 36 aa, Zea mays
  Clone ID: MRT4577_20051C.1.pep
PTNPTTRLPTRQCNPHSAASRRILRSKALTARRSNP

SEQ ID NO: 281745 - protein, 41 aa, Zea mays
  Clone ID: MRT4577_20052C.1.pep
NKFKMFSFYFVSNQIYFFAAKSCLRKNNLKFKVYYDIFTII

SEQ ID NO: 281746 - protein, 86 aa, Zea mays
  Clone ID: MRT4577_20053C.1.pep
LFLTDDTLIPSAGTTLDWLSSCCDAPRGCTSNVSYPDAARRILCVRTRQRSNYLSGEGDMMRNFLTNRPLARRVRDAEGGSSLGYL

SEQ ID NO: 281747 - protein, 93 aa, Zea mays
  unsure (1)..(93): unsure at all Xaa locations
  Clone ID: MRT4577_20054C.1.pep
RPVHIIRIIPELIRDYFKSRSRRAPFGGISLLGSFYVAPTIXLSFGTLGVNDVIAAVVCVLLTEYVTXFPVALLNNFKMGFXYGLFIDAFEHR

SEQ ID NO: 281748 - protein, 55 aa, Zea mays
  Clone ID: MRT4577_20055C.1.pep
SAGVHFWESLFHHFDLAALRLVLFHFKLHEFQLRLVPAVGRACDLQASAPIGNTA

SEQ ID NO: 281749 - protein, 42 aa, Zea mays
  Clone ID: MRT4577_20056C.1.pep
LKKNLDLVDHLERSQPNVDRRSIICFRVRRRRVQHAPTRRTP

SEQ ID NO: 281750 - protein, 84 aa, Zea mays
  Clone ID: MRT4577_20057C.1.pep
TEKEHQTAKKETKKFNKHCLSSPAIIILIPPNQKSALTTCLVDCLVLLSKYLFDLALGAILFPYAGSSFKLPQDFISIYFTFAV

SEQ ID NO: 281751 - protein, 72 aa, Zea mays
  Clone ID: MRT4577_20058C.1.pep
PYNILIIMWTRITNMRVKVRYWIASLELSSKPYNILDKDYKIWVLVRLFLCGMDTNIFINIQLVQKPTIACP

SEQ ID NO: 281752 - protein, 46 aa, Zea mays
  Clone ID: MRT4577_20059C.1.pep
MVYNTYLNFQTTGTDDKGMGNAKECLHYTCFNIHHCMPHLMSPHAI

SEQ ID NO: 281753 - protein, 97 aa, Zea mays
  Clone ID: MRT4577_2005C.1.pep
QPQSPLALCDTQESEVSQTSDHEPWASALDTQPHGGLHQLPIPSSIAKKTHPAHKTGSHHPGLAPVTGNDGSPRASMTTVALSPLRKQGDVSKVPRP

SEQ ID NO: 281754 - protein, 44 aa, Zea mays
  Clone ID: MRT4577_20060C.1.pep
ATAPRRSFTEDSHWFTFLITELQHDCTHVHRQCNRLPPVAPQTS

SEQ ID NO: 281755 - protein, 45 aa, Zea mays
  unsure (1)..(45): unsure at all Xaa locations
  Clone ID: MRT4577_20061C.1.pep
RFFLKGPGALEGPPPEXPGGKSPQCPPPQRAPPKKPRGPPRVCPF

SEQ ID NO: 281756 - protein, 727 aa, Zea mays
  Clone ID: MRT4577_20062C.1.pep
SLLNSCQRQRQLLAVQLGVLATARSPRGRPRLLRAPPWGPPPLLSHTHPVLVVRSAQPNRRNRPPFTPPPPPDPSASPRNRLSVRPESGERVAAAEMESLAQRAALLRESLQKSQQVTDAVVSILGSFDSRLTALDSAMRPIQVRTHAVRTAHENIDRTLRSADVILTQFDRTREAEREIQKGPHENLQGFLDAVDRLRSIERFFSSNRSYRSSDGVLNHVNALLSKALVRMEGEFQNQLSQRSKPMEPDRLFDCLPSTLRPSSESQPEGGKNPSENQQNPEAVVYSPPALIEPKFVPLLSKLAQQLVQAGCQQQCSEIYSEARSSALESSLKNLGVEKLSKDEVQKMPWEILESKIGNWIHFMRIAVKLLFAGERQLCDQVFECSQSLRDKCFAAITKNSLATLLSFGEAIAMSKRSPEKLFVLLDMYEIMCELQTEIDTIFVGESGSQMRDSALSLTKCLAQTAQKTFSDFEEAVEKDATKNIHTDGTVHPLTSYVINYVKFLFDYQSTLKQLFQEFKEDGTGSELAAVTMKIMQALQNNLEAKAKQYKDPALMHIFLMNNIHYIVKSVRRSEAKDLLGDDWIQRHRRIVQQNANQYRRIAWAKVLQCLSGQGLTSSGGSGHVGSDGGNSSGASRTAVKERFRSFNVLFEEIYHKQCGWSVPDTELRESLRLAVAEILLPAYRSFIKRFGPLIENSKAPGKYVKHTPEQLELLLGNLFEGKQERA

SEQ ID NO: 281757 - protein, 57 aa, Zea mays
  Clone ID: MRT4577_20063C.1.pep
LQLEKERLEKRQPEEKARIEAQVKAAEAAAQQKFEEEMRMKRSRKGAARCTRCERRV

SEQ ID NO: 281758 - protein, 328 aa, Zea mays
  Clone ID: MRT4577_20064C.1.pep
STELLIRKLPFQRLVREIGQEFKTDLRFQSSASPAARGEIDTIFVGESGSQMRDSALSLTKCLAQTAQKTFSDFEEAVEKDATKNIHTDGTVHPLTSYVINYVKFLFDYQSTLKQLFQEFKEDGTGSELAAVTMKIMQALQNNLEAKAKQYKDPALMHIFLMNNIHYIVKSVRRSEAKDLLGDDWIQRHRRIVQQNANQYRRIAWAKVLQCLSGQGLTSSGGSGHVGSDGGNSSGASRTAVKERFRSFNVLFEEIYHKQCGWSVPDTELRESLRLAVAEILLPAYRSFIKRFGPLIENSKAPGKYVKHTPEQLELLLGNLFEGKQERA

SEQ ID NO: 281759 - protein, 89 aa, Zea mays
  Clone ID: MRT4577_20065C.1.pep
SVRSHTRVFITQLYNPTCVRMIIQQHHLTLTNSLTHQHTFTLLLQTYYIHLSFHIIYINHLQKLMSTNINNSISTNNNCYYTTSTQQHH

SEQ ID NO: 281760 - protein, 95 aa, Zea mays
  Clone ID: MRT4577_20066C.1.pep
VLILNGIPLPHVIRRRTHPSSHTLFYPFPTLLMHVNFTRYPEVASAASWASKASTCCGLTNLDDTTTPSHPCLLALRGGHTTQPGTIALLSGLSS

SEQ ID NO: 281761 - protein, 126 aa, Zea mays
  Clone ID: MRT4577_20067C.1.pep
TGVSATNGLHEWALTKTEVIAVLYAGIVASCLSYSIMTWANKILGPSLVALYNPLQPAFSTVLSTIFLGDPVYIGSIIGGVSIIVGLYLVIWARYNEEQRAPMDGYLDPLIVDNPRIPKTEEISFI

SEQ ID NO: 281762 - protein, 182 aa, Zea mays
  unsure (1)..(182): unsure at all Xaa locations
  Clone ID: MRT4577_20068C.1.pep
MPAHPPSLFLPLLPSDEAARRPSEAWNPPPTGKDRNRKTEGKMSTAFSEDETGRFFGCLGAAAALVFSCMGAGKRTAKSSVXGERSMRVMRPXLVMNPIWPAVMRGERCIYRLIIADIIRTRIYRKAXKTYYLLDGYCQLXSALACVCSAIEAVMACQNDGEDGVQXDEQRTKVFQEMSLVL

SEQ ID NO: 281763 - protein, 126 aa, Zea mays
  Clone ID: MRT4577_20069C.1.pep
WVYRTGVFLLVCVLFRLTCELQILRFEGIYRMFDVEARPTAAEIFAEHRRIRTQLLATSHRYRVFILCCLVTITISQLGALIVVLSSRDAKSFSNTGDLVVGSAVQLSGFFMCLLGAARITHRAQR

SEQ ID NO: 281764 - protein, 73 aa, Zea mays
  unsure (1)..(73): unsure at all Xaa locations
  Clone ID: MRT4577_2006C.1.pep
YSARGFGAGKLGIWCAELFLAQLDLLRAIRFDSIRVGSFQSGFCYFRCHRGAPSCSSWARETXXFFXIXXPTP

SEQ ID NO: 281765 - protein, 192 aa, Zea mays
  unsure (1)..(192): unsure at all Xaa locations
  Clone ID: MRT4577_20070C.1.pep
MLTRLLALAGHALAEXTRPEPKDLWEEPINATLWRPCSDQRDWKASEGTNGYIMISANGGINQQRVAICNAVTISRLLNATLVLPKFLYSNVWLDKSQFGDIYQEEYFIKYLKSDIQIVKDLPVELQSLDLEAIGSLVNDTDVMKEAKPSLYMKKILPILLRNRVVHFIGFGNRLSFDPIPSDLQVLLQLVT

SEQ ID NO: 281766 - protein, 113 aa, Zea mays
  Clone ID: MRT4577_20071C.1.pep
FSLQKIASLARSQQAPISTPGAQHRGSWIGQHLELHQSSRAYPPRRAGDVKPPWSVVHQLKPVDLTASVHVEHATLPVAGRARQVSVPCQHRKTLAPVRAAETKILELSPRAE

SEQ ID NO: 281767 - protein, 56 aa, Zea mays
  Clone ID: MRT4577_20072C.1.pep
CSKDAFLWQFSKEKPPLCSTACFSISGQEGQLRCGGLDGWIRFKKQSQSRGVCRGF

SEQ ID NO: 281768 - protein, 69 aa, Zea mays
  Clone ID: MRT4577_20073C.1.pep
FSSTVGDPSSTQTRSSFIGKKLNKRQVSASVTYHGKSSSSNSRFKAMAAKEVDETMQTDEDSWKCLALP

SEQ ID NO: 281769 - protein, 315 aa, Zea mays
  unsure (1)..(315): unsure at all Xaa locations
  Clone ID: MRT4577_20074C.1.pep
MDPMDIVGKSKEDVSLPKXCLKSSTXLNFLLCTLATMFKIIKEMLPPDVRVARDAQDLLVECCVEFINLLSSESNEVCSREEKKTIAPEHVIKALSDLGFREYIEEVYAAYEQHKLDTLDSPKAGKFTGIEMTEEEAVAEQQRMFAEARARMNNGAPKPKETEQEPPQQPQAQPQLQLHTEPQQPVQSQVQLHSPTQHSLQPQVQLHPQPQQLPQVQVHSQTQLHPQPQQPQVQVHPQLQQLPQLQAHSQPPQPQVXPPQPQQPPQVQLQSSVQQTSQPQPQXSLQSQGGLXAQLQPQLPGQLQTQGQTGPGIDS

SEQ ID NO: 281770 - protein, 308 aa, Zea mays
  unsure (1)..(308): unsure at all Xaa locations
  Clone ID: MRT4577_20075C.1.pep
MDPMDIVGKSKEDVSLPKSTMFKIIKEMLPPDVRVARDAQDLLVECCVEFINLLSSESNEVCSTEEKKTIAPEHVIKALSDLGFREYIEEVYAAYEQHKLDTLXYHLLLTGLCISFPLICVLCLTPICFEQDSPKAGKFTRIAMTEDDAAAEHQRMFAVARARMNNGAPKPKEPEQEPPQLPQAQPQLQLHTEPQQPMQSQVQLHSQTQHYLQPQLQLHSQPQLQPLSXQLPPQLQVHQQLQQPPQVQVHQQPEVQPQEAQLQSSAQQTSQPQPQAQLQSQGHSQAQLQAGLLGQLQTQAQTGPDMDS

SEQ ID NO: 281771 - protein, 26 aa, Zea mays
  Clone ID: MRT4577_20076C.1.pep
KSPPIRGISGGLTMRGVINRPRTEFR

SEQ ID NO: 281772 - protein, 297 aa, Zea mays
  Clone ID: MRT4577_20077C.1.pep
MDPMDIVGKSKEDVSLPKSTMVKIIKEMLPPDVRVARDAQDLLVECCVEFINLLSSESNEVCSREEKKTIAPEHVIKALSDLGFREYIEEVYAAYEQHKLETLDSPKAGKFTRIEMTEEEAVAEQQRMFAEARARMNNGAPKPKEPEQEPPQLPQAQPQLQLHTEPQQPMQSQVQLHSQTQHSLQPQLQLHHQPQQLPQVQLHSQPQLQPQVHLHPQPQLPPQLQVHQQLQQSPQVQVHEQPQVQPQEAQLQSSAQQTSQPQPQAQLQSQGHSQAQLQAGLLGQLQTQAQTGPGMDS

SEQ ID NO: 281773 - protein, 78 aa, Zea mays
  Clone ID: MRT4577_20078C.1.pep
PMYNFLWPLFPEQIFFLVLAGMDHNPQPPLFKHGTTSPLFPCLAMQGIFGPVGVISPLYYANKEFPIGRCFGYKKALY

SEQ ID NO: 281774 - protein, 155 aa, Zea mays
  Clone ID: MRT4577_20079C.1.pep
FWGGPALGATLRGAWPPRSFGAGPPPGGFFGASGWVRGGPPPPPRLEGGRVKVLFPPARVLPFFGVRAARPSPRFFLELGPVPILFLLFTSCGGSRGPRISLASGGFFLRPPRKKKKNIKKKKKKKKKKKKKKKTKKKKKKKKKKKKKKKKKKNS

SEQ ID NO: 281775 - protein, 119 aa, Zea mays
  Clone ID: MRT4577_2007C.1.pep
KVLRFPPKTKERGAPPSGGKKGQGLQQPKPFTGKRGGGVFPPKKKTRPPKNNFSKKKSPKKPPPQGDGGGEENPPPRGGKGRPHGPTHPGDISGKWFVFGGPPPRAQGRGPPPKPKGGG

SEQ ID NO: 281776 - protein, 58 aa, Zea mays
  unsure (1)..(58): unsure at all Xaa locations
  Clone ID: MRT4577_20080C.1.pep
RLELGAHTLVCSAXLYNDGEGQRQYLPQAWTVSVXNPLSVRTKVRTIKVGHLLLCKGK

SEQ ID NO: 281777 - protein, 177 aa, Zea mays
  Clone ID: MRT4577_20081C.1.pep
RRHRSSNHVTPRSTTPSFPQRGTGGRYNKHVWTSAGSGSLLPTCAHKWSSKQQISVQQQVHGRLPNPAATLCLPSPFVQANRPTHMKKQEKTVSTPPYRRRRLLSHRVGYHAVQAGQIREGSTAQRMFRNAHKKRPNPAGQPCQCSVPCTPVLMRMPCHEDRHSSPLPATRGTLPCT

SEQ ID NO: 281778 - protein, 102 aa, Zea mays
  Clone ID: MRT4577_20082C.1.pep
MATEVMGTHLRVDDGADLPNAIYVSVRVKGHYVTSGRVSYVTRRRPTCDFAGREGNCDLGNMCKDEVDDYRDLSVAHREGSRRPRRLGYQCPCQVRRRRPTR

SEQ ID NO: 281779 - protein, 275 aa, Zea mays
  unsure (1)..(275): unsure at all Xaa locations
  Clone ID: MRT4577_20083C.1.pep
MSASPENVVAGGSGPPVAWWSAASPVGGDVVLCSVALLFVALALAFVLYXTPRPRSVAAAAARGWGAAPTSAQQHQQHGTLGRGRDATGGLDPSVLRALPVTVYEAKDDHRAGEALECAVCLAELADGEPARFLPRCAHGFHAECIDQWLRGHSTCPLCRVDVGLLPAPAPAXSSALPPALPAPATYPTDLPTNVLFXIPGRGHRGEGGGTQRPEXPRGAPPPLVIHVRETAPAPPPPPPPREGGAAKAQGLARLSSLRRLWSRGRHDDAAAATT

SEQ ID NO: 281780 - protein, 86 aa, Zea mays
  Clone ID: MRT4577_20084C.1.pep
DNSFIYILFHLIYHIFRMGGSNLLKGFAHSPQATVIRSQSSRSCWSESFQVGEEPWRLWRFFDLTYPSNTIHTQISACLLARHRLN

SEQ ID NO: 281781 - protein, 104 aa, Zea mays
  Clone ID: MRT4577_20085C.1.pep
LTGEGFWDAAKQTVLTILGIIAAFFLIANFNILVASVINSLLLVLRQIRRILSFIAYCVFQGALVERSGPKSSTLGLSNVAGVPVKEKAGMSAKERVVGKWAMD

SEQ ID NO: 281782 - protein, 88 aa, Zea mays
  Clone ID: MRT4577_20086C.1.pep
MNKFIFALISSPVHFLNQRFFSILQVIKLSIQNGVPSEYTDMIFLQTNLDKVEGTQKVKQKLKGHKGRDEQQIYGLKLGFGNKDATRD

SEQ ID NO: 281783 - protein, 57 aa, Zea mays
  Clone ID: MRT4577_20087C.1.pep
PPAEAFGGVCLGALTVLAVFLGAIGSGTGILPPVAIFFPFFETFGKERAPKPGFFGF

SEQ ID NO: 281784 - protein, 104 aa, Zea mays
  unsure (1)..(104): unsure at all Xaa locations
  Clone ID: MRT4577_20088C.1.pep
QAAISNVFTLDAVSNQNLXXGCWVMIXXXVYYXTNFFVDHLKRDYRLVASTCKDATYYFEDVCHSNTALAIIDEYFGGEIYSSTIPSRTKYVPPKQPHYNQDKT

SEQ ID NO: 281785 - protein, 355 aa, Zea mays
  unsure (1)..(355): unsure at all Xaa locations
  Clone ID: MRT4577_20089C.1.pep
MVGSDALQSIVYSRGSLRLLDQXLDGVFTLSXFNSTQRKLPLEMEYIDVKSSADGWNAIRDMVVRGAPAIAIAAALALAVEVSDLDFIGTPEEAASFVSKKLEYLVSSRPTAVNLSDAATKLQTLVSKAAETAKDSKSIFQVYIEAAETMLVDDVADNKAIGSHGAVFLQRQLANSKKISVLTHCNTGSLATAGYGTALGVIRALHSGGVLEKAFCTETRPFNQGSRLTAFELVHEKIPATLIADSAAAALMKQGHVQAVIVGADRIAANGDTANKIGTYNLAISAKHHSVQVYVAAPXGLGKQVAASGISVWNPAFDVTSANLITAIITXKGXVITKTDADGSFDIKGFLLPAK

SEQ ID NO: 281786 - protein, 116 aa, Zea mays
  unsure (1)..(116): unsure at all Xaa locations
  Clone ID: MRT4577_2008C.1.pep
PPXGLSLRCVLLPRVLXVLFXRRXPXAFCWALVGGGPACGWCXXALSPRRCXLVPVVWPLSLALGPALPRLAGXLPPXGRPGSPAARPXARSVWPLVGAGAVPRAPAGAWXXXRTL

SEQ ID NO: 281787 - protein, 130 aa, Zea mays
  Clone ID: MRT4577_20090C.1.pep
MAVTLPTPTHADTQVLSKAVQSKDSTYKFLYFGLHGRGEFTRTLLKYGGVKVEELTADWPAQKSLVPFRCLPVVYETTTDGTVLELAESAAIERYLSKKFNLLGQNDYENLLLDQYVSSTDSLAQTFSVK

SEQ ID NO: 281788 - protein, 55 aa, Zea mays
  Clone ID: MRT4577_20091C.1.pep
ARAISWVMLDISQSGDSSMSCSAFKLGDARDLLVSRMYEYVKWVHLKWQYIKIMF

SEQ ID NO: 281789 - protein, 157 aa, Zea mays
  Clone ID: MRT4577_20092C.1.pep
AVLEKAFCTETRPFNQGSRLTAFELVHEKIPATLIADSADRIAANGDTANKIGTYNLAISAKHHSVQFYVAAPVTSIDLSLPSGDEIVIEERSPKELLNSEGGLGKQVAASGISVWNPAFDVTPANLITAIITEKGVITKTDADGSFDIKGFLLPAK

SEQ ID NO: 281790 - protein, 127 aa, Zea mays
  unsure (1)..(127): unsure at all Xaa locations
  Clone ID: MRT4577_20093C.1.pep
VYHSQTHQAKRTSNNLPSGATKILPLLALLALLVSATNALIIPQSSLAPSAIMPQLLTPDTLMGYKHPAXQAYMLTISLAVSVLQQPMVQLQQQYLAHIILQTITAQHAQQFLTSLTHLAMVNPVIY

SEQ ID NO: 281791 - protein, 367 aa, Zea mays
  Clone ID: MRT4577_20094C.1.pep
MAASDALQSIVYSRGSLRLLDQRKLPLEMEYIDVKSSADGWNAIRDMVVRGAPAIAIAAALALAVEVSDLDFIGTPEEAASFVSKKLEYLVSSRPTAVNLSDAATKLQTLVSKAAETAKDSKSIFQVYIEAAETMLVDDVADNKAIGSHGAVFLQRQLANSKKISVLTHCNTGSLATAGYGTALGVIRALHSGGVLEKAFCTETRPFNQGSRLTAFELVHEKIPATLIADSAAAALMKQGHVQAVIVGADRIAANGDTANKIGTYNLAISAKHHSVQFYVAAPVTSIDLSLPSGDEIVIEERSPKELLNSEGGLGKQVAASGISVWNPAFDVTPANLITAIITEKGVITKTDADGSFDIKGFLLPAK

SEQ ID NO: 281792 - protein, 88 aa, Zea mays
  unsure (1)..(88): unsure at all Xaa locations
  Clone ID: MRT4577_20095C.1.pep
EPPNLEGPLQGARLGSPSGKTGTCRISMSEVALNVAAPKVKEGVDVTLSRVEGKVKXPSLDVRGPKXDVSAPDVEAYSPAWNLQMHSM

SEQ ID NO: 281793 - protein, 54 aa, Zea mays
  Clone ID: MRT4577_20096C.1.pep
ATSLIHKTMQNAIINFNNSVQSIIKSSSFLFVCVCICAFFIMACSKHNFLYDPL

SEQ ID NO: 281794 - protein, 89 aa, Zea mays
  Clone ID: MRT4577_20097C.1.pep
FVLYAECDRRSGVGSCILYSGCRGDPLVIISLASVVDGVPVLVGIEHGVSNVMDHDGVHWASRACLGWRRGFALSRRHRMPHSAPGYLA

SEQ ID NO: 281795 - protein, 133 aa, Zea mays
  Clone ID: MRT4577_20098C.1.pep
RKGAPGPLPFLFKGHPPIQKTRGAPHRMGHQPPPPRFPLNRLTGTLKQPIKLQKATPIPMRKQALDRGGNLTFGPKNQCPPPPPKKKQTFFFSPPGGKKKNKRMGRGKNPPLGGLPLPNRTTRFGAAGPHHWG

SEQ ID NO: 281796 - protein, 270 aa, Zea mays
  Clone ID: MRT4577_20099C.1.pep
MPALPAFPLTRRPSDARRRGRLVLSLVVFVAVSAAAALAYLSFPSAGRTSPPAVRTEADCCRGMEGLELWGPAVKWGSDHRLPSAAACCAACKAMCPHPKDGACRCDSWVFCGDERKCKDRLGEGIVGLETNLGTLHIQLLPGCAPRSVDHFIELLGLRNCAGCRFYRAEGRGNVWDAKGDHEKNVAFGPPYALLQGTLEVDGVPFKKIPREACPAVKRGSVAWVGSGPEFLISLADHEEWRDAYTVFGNVLPWDMAIAEEMTLLPTSTD

SEQ ID NO: 281797 - protein, 48 aa, Zea mays
  Clone ID: MRT4577_2009C.1.pep
ELEVLPAGVPLFDPPVFVHLHAPCSISSVCGFCLCCVIYLSNPSMLSS

SEQ ID NO: 281798 - protein, 57 aa, Zea mays
  Clone ID: MRT4577_200C.1.pep
YTWSVPDALLSSTSCERSGAVYSINATRYSQVLSDWLYLTYVVSGGKQYISALRGLV

SEQ ID NO: 281799 - protein, 122 aa, Zea mays
  Clone ID: MRT4577_20100C.1.pep
PPPFFLCIVFFFLLLLFCYLACLFTHLAEKSNAVETNTMGGRGSKERGETLQRKGRGEKEKREGGKREKKRERKVGRGSMKKKKKLGGGEPKGEVGKKPKKGGRGGVSLGGPKWPKRGGKKK

SEQ ID NO: 281800 - protein, 330 aa, Zea mays
  Clone ID: MRT4577_20101C.1.pep
MPALPAFPLTRRPSDARRRGRLVLSLVVFVAVSAAAALAYLSFPSAGRTSPPAVRTEADCCRGMEGLELWGPAVKWGSDHRLPSAAACCAACKAMCPHPKDGACRCDSWVFCGDERKCKDRLGECWLKKQKDVMAPAVIAKGEDVMWTSGLIFGKGEGIVGLETNLGTLHIQLLPGCAPRSVDHFIELLGLRNCAGCRFYRAEGRGNVWDAKGDHEKNVAFGPPYALLQGTLEVDGVPFKKIPREACPAVKRGSVAWVGSGPEFLISLADHEEWRDAYTVFGNVLPMDMAIAEEMALLPTSTDVWSNVKVKVLKDPVYFKVKRSSNASAV

SEQ ID NO: 281801 - protein, 127 aa, Zea mays
  Clone ID: MRT4577_20102C.1.pep
IWVVLESLGFGGRFSGPRGSQQALVFWGPFPSPLGGGWGATFWANPLGFLGGPVSGTPGGSMFVFCVLQCPVPRWWHPLGFSPRGGFAPVGVCPRFFHWGGVKPRRYCWWPVGLMGLSALLGWAAAY

SEQ ID NO: 281802 - protein, 96 aa, Zea mays
  Clone ID: MRT4577_20103C.1.pep
QRRQWHRQEDVMACISVTHYRKKKDYLHANMRRLRANGGRHAVTYTYLPSNVASATSSVSACAGTMRTAAPSVGWVGTAPLLPPSPPARGGDAGGV

SEQ ID NO: 281803 - protein, 49 aa, Zea mays
  Clone ID: MRT4577_20104C.1.pep
VQSNVEPLVYQTYTTRRHDSLRIISLAECARYLGKPYQITVAVSCWLAD

SEQ ID NO: 281804 - protein, 82 aa, Zea mays
  Clone ID: MRT4577_20105C.1.pep
MVAAEARRRPARVARYSLARSRSEGPEPQAHFAAATSRRANRRCFCEVTCSLCVVRTSHLVKPQTLPLPEPLLYDDLLIARA

SEQ ID NO: 281805 - protein, 41 aa, Zea mays
  Clone ID: MRT4577_20106C.1.pep
FPKRRVVAYKAHRVKGRVKGSPPKNFRWVKDPYLDLVKGWS

SEQ ID NO: 281806 - protein, 74 aa, Zea mays
  Clone ID: MRT4577_20107C.1.pep
MACHNHTLIIRQYLGKKPDDGHSIHQTTVHTLLCMGVVQPSMNTALTTDTKRPCNEKHRWATTNTRLTRINPMH

SEQ ID NO: 281807 - protein, 62 aa, Zea mays
  Clone ID: MRT4577_20108C.1.pep
AVMGPASGVPVFGPWDSGLTWAAGPVLVWPWFVPRLLSVRYGLLCMHFCSPSLPCQHMCLTP

SEQ ID NO: 281808 - protein, 141 aa, Zea mays
  unsure (1)..(141): unsure at all Xaa locations
  Clone ID: MRT4577_20109C.1.pep
LQRSWQPRLTGYPCGCYAWAVLVTYSFEAGSLDHELDITCCDXRYKVLDNRQLLTLTLDRTYGSRFQSLHEYLFSKIDMQLQLVXPINYDGTVTDYYHDVQSQTHDEIDFEFMGNLSGEPYTLHTNIFTRGHGHHEQQFRL

SEQ ID NO: 281809 - protein, 86 aa, Zea mays
  Clone ID: MRT4577_2010C.1.pep
LHRMLCAPPSSPSDDTFSGLLALETVAASNRHVVKSRRPTTTPAAGARALPMMMSLVAILLAVARAQSRPTSRRRGTYATYPSLSA

SEQ ID NO: 281810 - protein, 142 aa, Zea mays
  unsure (1)..(142): unsure at all Xaa locations
  Clone ID: MRT4577_20110C.1.pep
MALSQGLFTFKDVAIEFSQEEWECLDPAQRALYRDVMLENYRNLLSLDEDNIPPEDDISVGFTSKGLSPKENNKEELYHLVILERKESHGINNFDLKEVWENMPKFDSLWDYDVKNYXGNALTCNKXLTHXXDQTYKLIHFS

SEQ ID NO: 281811 - protein, 84 aa, Zea mays
  Clone ID: MRT4577_20111C.1.pep
FPFTGGAGIHSFFEKKIFALPALKATGVFEQQALYQKETGIIIYLFKTTRFFPNKRAWNWEVLNPGTKRLGGGKPCKGWIAGFG

SEQ ID NO: 281812 - protein, 145 aa, Zea mays
  unsure (1)..(145): unsure at all Xaa locations
  Clone ID: MRT4577_20112C.1.pep
GGASHAAALCARVLELGGQDQSAALRDLLAGHPCLADQPPPWDSPGRGAEPMSXLMGPGGYGAVGWIDVLLSPXHQGEPNRASPGCLSTALHLAGSGGASTAPGAGSRLLGAXAHPTCGEHLHRRPADVTLPPNSVPVKNHLLSL

SEQ ID NO: 281813 - protein, 89 aa, Zea mays
  Clone ID: MRT4577_20113C.1.pep
GGRSATQISRPLMLPVPSSRATSGSISPHSSQSNIGSLISQTLLPTGAIEDVKTQFFNPTGSNRQSHLAFYLYHPCSSYYSSCLLQEIP

SEQ ID NO: 281814 - protein, 97 aa, Zea mays
  unsure (1)..(97): unsure at all Xaa locations
  Clone ID: MRT4577_20114C.1.pep
PDDTTREXXXXHXGQAGSQXGNAXXEXHHXEXGXQGGGQXPGDKTXGGGXXXXNTGGXETGAGKHXRRAGGGGPXPAGXGEGGTGAGRRGRPRAGPR

SEQ ID NO: 281815 - protein, 73 aa, Zea mays
  unsure (1)..(73): unsure at all Xaa locations
  Clone ID: MRT4577_20115C.1.pep
STFERYSQRYGKAPXPLGANRVSIXQRPCFRDHWQDLIKLSXHQIAEIRSHEFFFEVLLSSLTRHHIIXPGIH

SEQ ID NO: 281816 - protein, 46 aa, Zea mays
  Clone ID: MRT4577_20116C.1.pep
PLFFFFFYFFFFFFFFFFFFFFFFFFFFFWGGYIGVLKGGEKNTYA

SEQ ID NO: 281817 - protein, 76 aa, Zea mays
  unsure (1)..(76): unsure at all Xaa locations
  Clone ID: MRT4577_20117C.1.pep
RGAYVDVLTSDSYMLTVFCIGNTTRRPNQDKRTCYAQASHIRSRRSKKVGMISNRACTXDLKELGCKFMPEVIGGE

SEQ ID NO: 281818 - protein, 65 aa, Zea mays
  Clone ID: MRT4577_20118C.1.pep
GFYHQKLYLAQQRLSNYKAGENQREPQPPPRPKGESNGSNSNFNLGGEAEKDPFLSPKAPWGEES

SEQ ID NO: 281819 - protein, 98 aa, Zea mays
  unsure (1)..(98): unsure at all Xaa locations
  Clone ID: MRT4577_20119C.1.pep
MAPRLACLLALAMAAIVVAPCSAQNSPQDYVDPHNAARADVGVRPASCHDTVAAHAHSYAAPRQXDCQLTHSGGPYGDNLLRRPPAPDRPPPRPPALP

SEQ ID NO: 281820 - protein, 122 aa, Zea mays
  Clone ID: MRT4577_2011C.1.pep
KHIVEQYYLEKKKAIQYMTGIKSRVAITSDMWTYNNQKRGYMAITAHFVDESWTLRNIIMRFIYVPSPHTHDVIGDVLYESLMDWNLDEKVSTITLDNCTTNDSAISYLLRKIERSKLMANE

SEQ ID NO: 281821 - protein, 143 aa, Zea mays
  unsure (1)..(143): unsure at all Xaa locations
  Clone ID: MRT4577_20120C.1.pep
GPIFSGGLGRLPAKGEPPSPKSISGARPRKQKRGGSQKWNRPGGGAPNPNPWFPPKKGGGGEKXRGPPQNPWAGARGGGPPPPSPGWKASLGQGKTPLFGPRGPPGKPPNXGKKKGPQNWKRGPPGGPNGPPILARKNQDYPP

SEQ ID NO: 281822 - protein, 63 aa, Zea mays
  Clone ID: MRT4577_20121C.1.pep
GLVFFFYFFFFFFFWGKKSFPLNLRGFPPPTINNPVVVCPYTWWAHHRLLFKGHFLARKKIFP

SEQ ID NO: 281823 - protein, 92 aa, Zea mays
  Clone ID: MRT4577_20122C.1.pep
SLFIPYQPRKGILNGILGKKSLALFSFLKFKTLESKGPGLKVLSRYFRGNPPLVFFFYQPPFKWEPPKLSFLYIKICPGPVACIMCCKLCYG

SEQ ID NO: 281824 - protein, 130 aa, Zea mays
  Clone ID: MRT4577_20123C.1.pep
MAEPEPPPQVSSEPTTPPQEGSGRTKKKNKKNRSKKQPKRAAADTDGLSSGASTMAEDPFFVLAGGKEGGFLDLEEIDEADFGIFGGVLDDVGQSVEEAGKDHGKKKKKTKKRKRGGDGEGFQWRRCVGS

SEQ ID NO: 281825 - protein, 227 aa, Zea mays
  Clone ID: MRT4577_20124C.1.pep
GDYKLDATVTIASGDDIYLGDLVYEPPRDGPTMWEIGVPDRSAAEFYVPDPNPNYVNRLYVNHPADRFRQYGLWERYAELYPDSDLVYTVGQSDYSTDWFYAQVNRKIDDNTYQPTTWQIKFDLDSVSPSSTYKFRVALASSALAELQISFNDQDRAVPHFATGLIGRDNAIARHGIHGLYWLFNIDVASAWLVQGVNTIYLKQPRSQSPFQGLMYDYLRLEGPCGF

SEQ ID NO: 281826 - protein, 84 aa, Zea mays
  Clone ID: MRT4577_20125C.1.pep
RACVDPWLRQRPTCPVCRTLPLPSPMPTPLAEVTPLASARPSLGLFFFPLSLSLAVCLASATLIASCLRPVPCAVSFLRTQHGV

SEQ ID NO: 281827 - protein, 62 aa, Zea mays
  Clone ID: MRT4577_20126C.1.pep
GLCGLFLFKSVPSFVLCTPSCRSSFDCSFDICLHVVSICTSSCRRCFCLEDLRWRRRPPTTS

SEQ ID NO: 281828 - protein, 45 aa, Zea mays
  Clone ID: MRT4577_20127C.1.pep
RLDVRVRSLLQCSIRLKLCMTELGGILDSMLLYPNERHHDRPIQN

SEQ ID NO: 281829 - protein, 88 aa, Zea mays
  Clone ID: MRT4577_20128C.1.pep
YFILLTSVQFFLLLKKEGAAFIGVAYSIDHLETKTKRKKITGGLGDLQCLKGYCFFMSTGSFLMYQFPVISHLLILELHPFELSLHCL

SEQ ID NO: 281830 - protein, 74 aa, Zea mays
  Clone ID: MRT4577_20129C.1.pep
GSAHHRSSTTPGSERPGSQTGTKLALQLKCIAAVVVSFYLLRRTSVELDRTKDRPVHHAHFCNPTTDAPRARLS

SEQ ID NO: 281831 - protein, 200 aa, Zea mays
  Clone ID: MRT4577_2012C.1.pep
MPAAAAAASGTAVASYTDYIPDSVKSFVSDLYRSIRGGDVVGTDKLYEGDFHRLSARVYRDAPWPPAKAVATYCDDDHVFLLLYSELTSRDAHARLPGLTLTRRADSWDTYCSLFTVVLQNALTMQLPNQWLWDMVDGFVSQFQTFCQYRTKLEDKTEEEISLLQRFDQAWSVYGVFNYLKALVENSMIREVLEREERLE

SEQ ID NO: 281832 - protein, 101 aa, Zea mays
  Clone ID: MRT4577_20130C.1.pep
GGLPTNLPTYLPPSGWIPQVVGDPRDRGQTPKGVFLVACCFAHFYPAGVGGGPWGWSLARPQVVKRGLGQNKTRAPPPITIQGGLAVGVFPFSGCCSPGSL

SEQ ID NO: 281833 - protein, 382 aa, Zea mays
  Clone ID: MRT4577_20131C.1.pep
MSSTAARVVHPAAAAPPPPRPRRLAPARCAAGSATDTATAGPTRVTTVSNRGDSLAICRVLNGMWQTSGGWGRIDRDAAVDAMLAHADAGLSTFDMADHYGPAEDLYGMFINRIRRERPPEFLEEVKGLTKWVPPPVKMTRSYVEDNINRSRKRMDVTALDMLQFHWWEYSNPGYLDALKHITDLKEEGKIKTVALTNFDTDRLQIILENGIPVVSNQVQHSIVDMRPQQRMAELCQLTGVRLITYGTVMGGLLSEKFLDTNVSIPFAGPPLNTPSLQKYKRMVDAWGGWSLFQTLLQTLKKVSLKHGVTISTVAVKYILNQTSVAGSMVGVRLGLSEHIKDTNAIFSLELDEEDMNIITEVSKRGRNLIDIIGDCGDEYRA

SEQ ID NO: 281834 - protein, 520 aa, Zea mays
  unsure (1)..(520): unsure at all Xaa locations
  Clone ID: MRT4577_20132C.1.pep
LSHSIKKAKGIDTRSNTEPILLGILSAVGTTYTNIMANLADSFLADLDELSDNEGYPEEDNAEAAGRDDDEDDDMPDLESLNYDDLDSVSKLQKTQRYNDIMQKVENALQKGTDFSNQGSILEEDPEYQLIVDCNALSVDIENEIIIIHNFIRDKYRLKFPELESLVHHPIDYARVVKKIGNEMDLTLVDLEGLLPSAIIMVVSVTASTTXGSPLSEDNFGKTTEACDRALTLDASKKKVLDFVESRMGYIAPNLSAIVGSAVASKLMGTAGGLGALAKMPACNVQLLGAKRKNLAGFSTATSQFRVGYLEQTEVFQSTPPPLRTRACRLIAAKSTLAARIDSIRGDPTGKAGRNLLEEIRKKIEKWQEPPPAKLPKPLPVPDSEPKKKRGGRRLRKMKERYAQTDMMKLANRMQFGIPEESSLGDGLGEGYGMLGQAGSGKLRVSAGQSKLAAKVAKKFKEKSYGSSGATSGLTSSLAFTPVQGIELSNPQVQGNLLGGGTQSTYFSETGTFSKIRRTQ

SEQ ID NO: 281835 - protein, 66 aa, Zea mays
  Clone ID: MRT4577_20133C.1.pep
STIACTFISAYEGYIDGLVVMKSLVWLCAFLSLGAMLALGASRYLVRRIMGWHVGQFDMSLRSLLG

SEQ ID NO: 281836 - protein, 87 aa, Zea mays
  unsure (1)..(87): unsure at all Xaa locations
  Clone ID: MRT4577_20134C.1.pep
FPNKKFPGPDVGYXGGLWFDPLGWGSGSPKKIKKLRPKEFKKGGLPMFPVMGAWFQAEYTGTGPIENLFAPLADLGHAPFFQAFPPK

SEQ ID NO: 281837 - protein, 138 aa, Zea mays
  unsure (1)..(138): unsure at all Xaa locations
  Clone ID: MRT4577_20135C.1.pep
SKPFFLLFQGTHFVALPRYWQMLSVTLLKAFGSPFLPFQRGLLPPFKPGVLSXHSFSPGFFFFRPSSLFVPPFLCAGPFPPPTVHRVSLFSTFPTFVFKSEPLPTHCFPLALPSHSALRVLPCALRPSFFFFSWLPIF

SEQ ID NO: 281838 - protein, 300 aa, Zea mays
  unsure (1)..(300): unsure at all Xaa locations
  Clone ID: MRT4577_20136C.1.pep
MARLLLSVSVPMSASSSRRIVVPGTARHRGRSGVCVAVPATSTATATQQEFDPAAAPPFGLGDIRAAIPKHCWVKDPWRSMGYVVRDVVLVLGLAAAAARLDSWLVWPLYWAAQGTMFWALFVLGHDCGHGSFSNNPILNSVVGHILHSSILVPYNGWRISHRTHHQNHGHVDKDESWHPLPERLFKSLDSVVLMLRFRLPFPMLVYPFYLANRSPGKSGSHFHPASDLFQPSESKQVLTSTACWLAMVALLAGLAFLMGPLQMLKLYLVPYWVFGMWLDFVTXLHHHGHNDKXLPWYPR

SEQ ID NO: 281839 - protein, 91 aa, Zea mays
  unsure (1)..(91): unsure at all Xaa locations
  Clone ID: MRT4577_20137C.1.pep
GTGAGLFEVVKIGDEYFSFINDCKNPKACTVMLRGASKDMLNELERNLQDAMSVAKNLLIEPYIVPGGGATEMLVGKYLLEXSXSITDVAQ

SEQ ID NO: 281840 - protein, 83 aa, Zea mays
  Clone ID: MRT4577_20138C.1.pep
RVPYRNASYVERTLICYLGDRNGNSCSFIGFRDFIVRPDLLAAVNDFGWRLLPDSPVRRVLFRLWGKAHRQAHKQAHKSAQRS

SEQ ID NO: 281841 - protein, 109 aa, Zea mays
  Clone ID: MRT4577_20139C.1.pep
KKKKKKKKGGEKKKKKKKKKKKKKKKKKKKKKKKKKKKKKKKRGGPFYGTQLSLPLRLPPPWLFFWCPPQFNSLGPGFFHRPALGKPLPVPYLNLLGGDNPFSFPWFFA

SEQ ID NO: 281842 - protein, 167 aa, Zea mays
  Clone ID: MRT4577_2013C.1.pep
LTRPFREKQLSLTQTSLLPTESRCSEQEEKRCSFASAARACSSGLGGRRKHTLQDDLILQARVFTPKGAVAPSASTTSSAKPDPASGGAAVQGLLRESGPSRRLNRLPLGPRSTGFQGRQPDPRPRLTDFGVGSVASKVPSQTGLRFRPRGYERPRACGATTSAAAA

SEQ ID NO: 281843 - protein, 45 aa, Zea mays
  Clone ID: MRT4577_20140C.1.pep
DPVVAACPYITPQGSRRSQCGSASPVNICANRAVKGQQLRPMEAY

SEQ ID NO: 281844 - protein, 52 aa, Zea mays
  Clone ID: MRT4577_20141C.1.pep
MLLQPTKKKNTNTKKKNKKKPKKKKKKKKKKKKKHHQKKKKKSGPRAPLLSL

SEQ ID NO: 281845 - protein, 46 aa, Zea mays
  Clone ID: MRT4577_20142C.1.pep
SNPITDGFNLKETGGLPLRPYIWETRSCFVHHTPNELNIVGINDEA

SEQ ID NO: 281846 - protein, 63 aa, Zea mays
  Clone ID: MRT4577_20143C.1.pep
SKRPAGGGGFFFFFFFFFFFFFFFFFFFFFFFFFWTQERGFFKPKAGGHQRSDTNSGGGGGLI

SEQ ID NO: 281847 - protein, 120 aa, Zea mays
  unsure (1)..(120): unsure at all Xaa locations
  Clone ID: MRT4577_20144C.1.pep
PTRPPDQLTRFPYGDIQARVYVILAKKKKKKKKKKKRGGRLRGPRLTSPCLQRNSSLMGQPKSNXWAVVYHRRTGKNLGVPKLNGLEENPLLAGGGNSKRAGTNGLSKNWPILNGKGNPP

SEQ ID NO: 281848 - protein, 32 aa, Zea mays
  Clone ID: MRT4577_20145C.1.pep
IINSSAFLRGMQACLHSRQYKKNFKMDKKTNN

SEQ ID NO: 281849 - protein, 99 aa, Zea mays
  unsure (1)..(99): unsure at all Xaa locations
  Clone ID: MRT4577_20146C.1.pep
CSCFDQQSCQQGLTDHIVTVPSXQLQMIMQIEFAFPCKSNLLEAPQKQQKQKILATQGVNPMLMMMVQNKQAIGSLSQYHKTSYRXNPCGMFSANPPFY

SEQ ID NO: 281850 - protein, 137 aa, Zea mays
  unsure (1)..(137): unsure at all Xaa locations
  Clone ID: MRT4577_20147C.1.pep
MAVRGKAIGAGAAXKKATSRSSKLGCSFPCGRXIPRILKGGGDAKRVGTGAPVYLADGLEYLADEVLELAGNPMRDNKKTRIVPRDMQLAVRNDEELTXLLGGATIWSGGVMPNIHHHLLPKKAGSIKAYTGTNDDN

SEQ ID NO: 281851 - protein, 69 aa, Zea mays
  Clone ID: MRT4577_20148C.1.pep
KSVFGILRAGNNLGSLVKVVKILGVGKMGASGKEIVGLIPKVECCVYAPCPGWAPPKDHLWGGSPLFFV

SEQ ID NO: 281852 - protein, 87 aa, Zea mays
  Clone ID: MRT4577_20149C.1.pep
KKNNPSMFEGPSKNKVRPDGNKHTPGGGPICVIGGTPRRGTKPVCKTQPKKYAPPQNYIKKPGPACRVGLLWTPGLLKNQKTWRAPF

SEQ ID NO: 281853 - protein, 1546 aa, Zea mays
  Clone ID: MRT4577_2014C.1.pep
MDPKGKGMVINDKEKESFVNEPRDDMSNDSSSGHKRKDGRKKKTRRIKEIVYYDSDESSSSQKDDDDYDRRKTRIPHSSNAQLLPIPLGKPPHFDGEDYGFWSHKMRTHLFSLHPSIWEIVESGMKFDSSDSPMFINEQIHRNAQATTVLLASLCRDEYHKVSGLDNAKQIWDTLKISHEGNDVTLLTKMELVEGELGRFAMIRGEEPTQTYNRLKTLINKIRSYGSTRWTDHDVVRLMLRSFTVLDPHLVNNIRENPRYTKMSLEEVLGKFVSGRMMIKEARYVDDALNGPINEPQTLALKATRSKKALPSKVAQFEAAGLNDEEMVLIIKRFKTALKGRKGQPSKTKTKGKRSCFKCGKLGHFIANCPDNDSDQEHGSKREKKKHYRKAKGEAHIGKEWDSDCSSSDSDNEGLTATAFNKSSLFPNERHTCLMAREKKVCNQNNVTYDSSSDDESSDDEIDYSSLFKGLDRTKVDKINELIDALNEKDRLLEKQEDLLYEEHDKFVEAQKSYALEVKRNEVLSSELSSCHETIATLKSVNDDLNAKLEVASKSNSCVEHVEICTRCKDFDVDACSNHLVSISKLTEELASLNAQLRTSKNEFDKLKFARDAYTIGRHPSIKDGLGFKREAKNLTSHKAPIPAKEKGKAPMATSAKKNHAFLYYDRRQPRNAYRSCNAYNAFDSHAMFASSSSYVHDRNVGRRNVVHNMPRRDVVNTPRKVNEPSTIYHALNASFAICRKDRKVYASGGSSWIIDSGCTNHMTGEKKMFTSYVKNKDSQDSIIFGDGNQGKDKSETQGTLKRFLRRAQNEFELKVKKIRSDNGSEFKNLQVEEFLEEEGIKHEFSAPYTPQQNGVVERKNRTLIDMARTMLGEFKTPKCFWSEAVNTACHAINRVYLHRLLKKTSYELLTGNKPNVSYFRVFGSKCYILVKKGRNSKFAPKVVEGFLLGYDSNTKAYRVFNKSSGLVEVSSDVVFDETNGSPREQVVDCDDVDEEDVPTAAIRTMAIGVVRPQEQDERDQPSSSTMMHPPTQNDEQPFRVEEALLDPDWVLAMQEELNNFKRNEVWTLVPRPKQNVVGTKWVFRNKQDEHGVVTRNKARLVAKGYAQVAGLDFEETFAPVARLESIRILLAYAAHHSFRLFQMDVKSAFLNGPIKEEVYVEQPPGFEDERYPDHVCKLSKALYGLKQAPRAWYECLRDFLLANAFKVGKADPTLFTKTCDGDLFVCQIYVDDIIFGSTNQKSCEEFSRVMTQKFEMSMMGELNYFLGFQVKQLKDGTFISQTKYTQDLLKRFGMKDAKPAKTPMGTDGHTDLNKGGKSVDQKAYRSMIGSLLYLCASRPNIMLSVCMCARFQSDPKECHLVAVKRILRYLVATPCFGLWYPKGSTFDLVGYSDSDYAGCKVDRKSTSGTCQFLGRSLVSWNSKKQTFVALSTAEAEYVAAGQCCAQLLWMRQTLRDFGYNLSKVPLLCDNESAIRMAENPVEHSRTKHIDIQHHFLRDHQQKGDNELFHVSTENQLADIFTKPLDEKTFCRLRSELNVLDLRNLD

SEQ ID NO: 281854 - protein, 79 aa, Zea mays
  unsure (1)..(79): unsure at all Xaa locations
  Clone ID: MRT4577_20150C.1.pep
CXCAXAXFXCRXCXRVSXXXSGLXGXFWCXVAPPALLAWPRLLXGFCAGRCCAWRGXXSASFRSLRXCPWVXAAPVAPG

SEQ ID NO: 281855 - protein, 88 aa, Zea mays
  Clone ID: MRT4577_20151C.1.pep
MAGGSMVFEPHAGTVAGGDVVFCAAIVCLSLLSMIIFAASGSSGAGDGEEGVKPRRRGRSNGPVFVGGRGCGCGGCGAGAGVCGTYLS

SEQ ID NO: 281856 - protein, 55 aa, Zea mays
  Clone ID: MRT4577_20152C.1.pep
VADSVCTEVGGEGDVAIVVQRGGKQLARPRSHTVASEYRARLFIPRPAESYMWAL

SEQ ID NO: 281857 - protein, 62 aa, Zea mays
  Clone ID: MRT4577_20153C.1.pep
GIVVFFLGLALVMRFLLVDLTSFYWMLLSLVVTVKTLAFPILMALYCFAFFPVGAFPVGSDP

SEQ ID NO: 281858 - protein, 67 aa, Zea mays
  Clone ID: MRT4577_20154C.1.pep
VQDLDRRLLVMLEARVGRQSGGVAWTCHPCSRSVVIERARCVHIGGERSMPVMSSRIAWADAVGGNR

SEQ ID NO: 281859 - protein, 190 aa, Zea mays
  unsure (1)..(190): unsure at all Xaa locations
  Clone ID: MRT4577_20155C.1.pep
AGDGHTTYGFATXASTMGSGFIDKGSPWTTAAGPGKGQAVALRVGGDLCVEDQGAIHTYQDTLYVHCARQSYTYDYIYGAVDCILGNAPAGLQNCDMQARRPSPGQKDTVTAQGXTDPNQNSRMCMHRCRITGAPNLWGTPEYLRRARHTYSGTGVMESLLDRSVSPDGWLEWSGQFAMSTXYYGEYGNT

SEQ ID NO: 281860 - protein, 72 aa, Zea mays
  Clone ID: MRT4577_20156C.1.pep
FLFFFEPNKPFPEPDPGDLHCYFSRWIITSFQGSLLKISVKQGNILILGRSHKGVRYLNDSLTHYFKVLIPN

SEQ ID NO: 281861 - protein, 146 aa, Zea mays
  unsure (1)..(146): unsure at all Xaa locations
  Clone ID: MRT4577_20157C.1.pep
KAKKLWKVAQAPFKTLIMRGFIMGREGSLVPFLRMGIPFFVLGHPLNAFRFVGKVFDPFRAPGGETIAPKLLFKPPNLAPMGLGKXKFKTLALFPKNPPDWGFSRAPPRGVKNPGGGPPLIKGPFPFDLIFLVVKLNPGAFFPNPP

SEQ ID NO: 281862 - protein, 50 aa, Zea mays
  Clone ID: MRT4577_20158C.1.pep
RMCRSVCRNFGLGVIIGVCDKHFCYMFAPVDKGIFIGILVDVCYNLWLYF

SEQ ID NO: 281863 - protein, 102 aa, Zea mays
  Clone ID: MRT4577_20159C.1.pep
MGFFPGDLARALCEVVGSSFDRDPKKSPQIKKVPPRIKKIPPLGPDGAPPKVSPLWWAELEIIPFESWVPPIPNNIVFPRGPENFLSYYGLLLILFVEGVIR

SEQ ID NO: 281864 - protein, 256 aa, Zea mays
  Clone ID: MRT4577_2015C.1.pep
MAAAAEAVAPQARGRSYPRGRNRSPVCDGTLDASEFVHCGCRGLNVLVEETPRPPFGGSRPGVAISVRTEAELAREWGTWLAGAYPCCPSAGPTPKSISRGLGSGWRPWKPVDRGPRGNRLSRLLGPDSRRGPWAAAPPEAGSGFAEDVVDAEGATAPFGVKTRTCRIRSSCSVCFLRPSRPEEHALAALAKLRLFSSYFEHLDSVGNRDVCVSESCFSRKGRVRYPYTRGVGIPRIGRPCRLRILSPVHEALSPT

SEQ ID NO: 281865 - protein, 70 aa, Zea mays
  unsure (1)..(70): unsure at all Xaa locations
  Clone ID: MRT4577_20160C.1.pep
MMAIKSLSMVEASLPPGFRFHPRDDELVLDYRAKKLGGGGGPCGGXSIYGCPTMVDVDLNECEPWDLPGM

SEQ ID NO: 281866 - protein, 145 aa, Zea mays
  Clone ID: MRT4577_20161C.1.pep
MAEAAAVGGPHLPDEIVTWEILIRLPPKPLLRCRAVCCSWHRRLTSDSKFLLAHHRRQPSLPLVTTGETHERRIDALDHCTREQRPVARTATAGDLDVLASCDGLLILVAYGGLHICNPATGQRAPLPLLHAACISGLYPHRPSG

SEQ ID NO: 281867 - protein, 130 aa, Zea mays
  unsure (1)..(130): unsure at all Xaa locations
  Clone ID: MRT4577_20162C.1.pep
PTTPVQAHLMAEFIFEFQKKERQLKEETRVLKKELAERQKAVASRQKKVQGNQKTHAQAQTXANXSSLMRGQDQQGWPLQNKICFPPWPMENRGEKLVAAAHKKPLPGQAQPKFRMEGLPPWMLSXHLNA

SEQ ID NO: 281868 - protein, 61 aa, Zea mays
  Clone ID: MRT4577_20163C.1.pep
SRSRTSLILLLSSEIDQQVICSNLEKNYVHLLTGGRNQGQKAKWQSSYRVSSITILPYELK

SEQ ID NO: 281869 - protein, 94 aa, Zea mays
  Clone ID: MRT4577_20164C.1.pep
LSYNNKSTEVFQSVPYVVALFIVMLWIYYALLKSNQLLLITINSASCLIDTLYIAMYLLYTPKKAKMFTVKILLLLNVDLFWLILLLTLLLSVR

SEQ ID NO: 281870 - protein, 364 aa, Zea mays
  Clone ID: MRT4577_20165C.1.pep
MDRAALTVGPGMDMPIMHDGDRYELVRDIGSGNFGVARLMRNRADGQLVAVKYIDRGEKIDENVQREIINHRSLRHPNIIRFKEVILTPTHLAIVMEYASGGELFERICNAGRFSEDEARFFFQQLISGVSYCHSMQVCHRDLKLENTLLDGSTAPRVKICDFGYSKSSVLHSQPKSTVGTPAYIAPEVLLKKEYDGKVADVWSCGVTLYVMLVGAYPFEDPDEPKNFRKTIQRILGVQYSVPDYVHISPECQDLISRIFVANPSTRITMPEIRSHPWFLKNLPADLVDDSATTTSKQYEEPEQPMQGMDEIMQILGEATIPAAGSRGLNQFLNDGLDLDDDMEDLDSDADLDLESSGEIVYAM

SEQ ID NO: 281871 - protein, 101 aa, Zea mays
  unsure (1)..(101): unsure at all Xaa locations
  Clone ID: MRT4577_20166C.1.pep
MTYLPIDFKNKCNVGYAFVNMISSVHIISFYQAFNGKKWEKFNIXEGSLVAYARIHGRSALISHFQNSRTVCTDKRCRPILFNPNGSISNQWHMHPHAFER

SEQ ID NO: 281872 - protein, 389 aa, Zea mays
  unsure (1)..(389): unsure at all Xaa locations
  Clone ID: MRT4577_20167C.1.pep
MDRAALTVGPGMDMPIMHDGDRYELVRDIGSGNFGVARLMRNRADGQLVAVKYIERGEKIDENVQREIINHRSLRHPNIIRFKEVILTPTHLAIVMEYASGGELFERICNAGRFSEDEARFFFQQLISGVSYCHSMQVCHRDLKLENTLLDGSTAPRLKICDFGYSKSSVLHSQPKSTVGTPAYIAPEVLLKKEYDGKVADVWSCGVTLYVMLVGAYPFEDPDEPKNFRKTIQXLSADARVYYIQCSKTADEIILVLQRILGVQYSVPDYVHISPECQDLISRIFVANPSTRITMPEIRSHPWFLKNLPADLVDDSATTTSKQYEEPEQPMQGMDEIMQILGEATIPAAGSRGLNQFLNDGLDLDDDMEDLDSDADLDLESSGEIVYAM

SEQ ID NO: 281873 - protein, 38 aa, Zea mays
  Clone ID: MRT4577_20168C.1.pep
QVVGQLTKVRVQLPWKEDAAGDAAHGGENEMVEVAEAG

SEQ ID NO: 281874 - protein, 100 aa, Zea mays
  Clone ID: MRT4577_20169C.1.pep
KMARCFFLKRVKAFPLEVGKAGSLKPLGFGGVLPVLELGVWVGLELMLHLSGVGPCFAAPFSAFSVLAGFSFGCFCLLFDWGSLSLDQKKKRKKKKKKKK

SEQ ID NO: 281875 - protein, 624 aa, Zea mays
  Clone ID: MRT4577_2016C.1.pep
MDPKGKGIVINDKEKESFVNEPKDDKSNDSGSGHKHKDGKKKKTRRIKEIVYYDSDESSSSQKDDDNDYRKTVNSNFSFDYSRIPHSSNSHLLSIPLGKPPHFDGEDYGFWSHKMRSHLFSLHPSIWEIVENGMKFDSSDSPMFINEQIHKNAQATTVLLASLCRDEYNKVSCLDNAKQIWDTLKISHEGNDITMLTKMELVEGELGRFAMIRGEEPTQTYNRLKTLINKIRSYGSTRWTDHDGVRLMLRSFTVLDPYLVNNIRENPRYTKMTPEEVLGKFVSGRMMIKEARYVDDALNGPINEHQPLALKATRSKEALPSKVAQIEAAGLNDEEMALIIKRFKTVLKGHKGQPSKTKTKGKRSCFKCGKIGHFIANCPDNDSDQEQGNKREKKKNYKKAKGEAHIGKEWDSDCSSDSDNEGLAATAFNKSSLFPNERHTCLMAREKKVSTRDSTYASSSDNESSDDDDIDYSCLFKGLDRSKIDKINELIDALNDKNVLLERQEDLLYEEHDKFVEAQKSLALEIKRNEMLSCELSTCHDSIASLKSINDDLNTKLEKSSKSTSCVEHVEICTRCKDFDVDACSDHLVSISKLTEELASLNAQLKTSKNEFDKLKFARDAYTI

SEQ ID NO: 281876 - protein, 125 aa, Zea mays
  Clone ID: MRT4577_20170C.1.pep
PRVRPRVRSYSSTTANRIEGEETNSYRPGGRSNEAPAAYRPCAHDHDTDDVPRPAPSTTGGRVYSHGAFDYSPMWMTTSPSARSTTATRTTISRPYMTLTPKRNASTSTDMHAPMALYTTCMTRQ

SEQ ID NO: 281877 - protein, 84 aa, Zea mays
  Clone ID: MRT4577_20171C.1.pep
LPLLFPASSMHAVSPSQRHQLLRASGDLYCPFPVQVESKEFLFWLRGIFCRPLCNLFTMSTGAASAPMLLTPEKRSHYHYKYTE

SEQ ID NO: 281878 - protein, 132 aa, Zea mays
  Clone ID: MRT4577_20172C.1.pep
GGRPKRVQPRGLEKKGWEKVVEQHKEGRKDFNHWEGGGTPGPDDRNNKETVGPRQVCQGMKKALCRLSGDWVPLFAQATGRLPPGGKSFQNISGRKPTGAGAQARAQNGCALAGLPVVKTGMVLYDFPFALE

SEQ ID NO: 281879 - protein, 112 aa, Zea mays
  Clone ID: MRT4577_20173C.1.pep
ARKGLRLEEYCQEHNIAYIPFDTFADIKREIEKILAEDQAKTCGHGKPLLFNPRANMWQRVSSKQAVPRFVAMTPSKEERMFLWPETFSELKPGQPDAAALKSPGVTTRAMA

SEQ ID NO: 281880 - protein, 64 aa, Zea mays
  Clone ID: MRT4577_20174C.1.pep
DGARRSPATVGGYITAAAVVDVIMALTGVHFLREYWNGRRGGGGVSFVSCTYTSVMSPAASSAA

SEQ ID NO: 281881 - protein, 69 aa, Zea mays
  Clone ID: MRT4577_20175C.1.pep
MLGSITDHERALGDLFSENAEGSHNFNARPNTRAPRIFTVFVSMREPPLVHYRIGQTIGAFALTTLRDL

SEQ ID NO: 281882 - protein, 53 aa, Zea mays
  Clone ID: MRT4577_20176C.1.pep
ISVQIFQNLSFRGTMLVKDLANFMALLVTIYHDSITYLLGIIYSTFMFSLYKS

SEQ ID NO: 281883 - protein, 112 aa, Zea mays
  Clone ID: MRT4577_20177C.1.pep
GTSRPAGKEFLAVLFSLLPSWKRQTSLPALFCPRIPAVMAGRPRRILLFLLTGNDQAGDTCTLPALCRVCDGGSRPSRTSSLALLLGVRHLPRPDSAAQRRTSTRSATSATV

SEQ ID NO: 281884 - protein, 254 aa, Zea mays
  unsure (1)..(254): unsure at all Xaa locations
  Clone ID: MRT4577_20178C.1.pep
MKIQCDACEGAAATVVCCADEAALCARCDVEIHAANKLASKHQRLPLEALSASLPRCDVCQEKAAFIFCVEDRALFCRDCDEPIHVPGTLSGNHQRYLATGIRVGFASASSACSDACDAHDDSDHHAPPXGRRRHRTAQQVPSPPQFLPQGWAVDELLQFSDCESSDKLHKESPLGFKELEWFTDIDLFHGQTPKAGRRLAEVPELSGTQAANGAAYYRPAKATATAGTGVRQSKKARTEVTDDEDHLIVPDLG

SEQ ID NO: 281885 - protein, 126 aa, Zea mays
  Clone ID: MRT4577_20179C.1.pep
AGTGLCFHGGDMFEHIPSADAVMLKWILHDWDDDKCVKIMERCKEAISGKEGGGGKVIIIETVLGSRPDDDATCKETYVLDLQILSFVNGAEREEHEWRRIFLAAGFRDYKITHTRGIPSIIEVFP

SEQ ID NO: 281886 - protein, 211 aa, Zea mays
  Clone ID: MRT4577_2017C.1.pep
GGGDQARVLPSLHTSAKWCDEEDVPTAAIRTMAIGDVRPQEQLEQDQPSSSTMVHPPTQDDEQVPQVEAHDQGGAQDVQIEEEEAPQAPPTQVRATIQRDHPVDQILGDISKGVTTRSRLVNFCEHYSFVSSIEPFRIEEALLDPDWVLAMQEELNNFKRNEVWTLVPRPKQNVVGTKWVFRNKQDEHGVVTRNKARLVAKGYAQVAGLDF

SEQ ID NO: 281887 - protein, 138 aa, Zea mays
  unsure (1)..(138): unsure at all Xaa locations
  Clone ID: MRT4577_20180C.1.pep
CIFFFFFFFFFLFETNSEVFPRKSSNWNAWAERITSFKGQAIKPNHPEKQGSSVVGLKWLGDRKVGMRQSGPRHQSLGTHSTVFPPEPGLATVVLTSSLRVPPPGILQTLVGPGGXSXXGGACVRAPGWAWSGRGRAP

SEQ ID NO: 281888 - protein, 48 aa, Zea mays
  unsure (1)..(48): unsure at all Xaa locations
  Clone ID: MRT4577_20181C.1.pep
GRKYITXTYSLIFTHAITYNLPCGFTTFCILPNXALNNTTLNTYHNQF

SEQ ID NO: 281889 - protein, 94 aa, Zea mays
  Clone ID: MRT4577_20182C.1.pep
KKGGPLTHQTLKGKSKRGAGCKKGYYFCFKKKKGGKPKPYWFTLAKPKRASGEKKKGKSPVWKKKRGEIKGGGGLKSPAGSKEKGGGTCFAKLD

SEQ ID NO: 281890 - protein, 197 aa, Zea mays
  unsure (1)..(197): unsure at all Xaa locations
  Clone ID: MRT4577_20183C.1.pep
MPECSPALLLAAGLAVLAIGSYLAAIVVGRGAARYPPVAGTVFHQVYHLRRLHDYYTDLFREHATFRLLAPGRRQIYTSDTAVVEHILRTNFANYGKGASHYDKTSDLFGDGIFTADGDKWRQQRKIASYDFSTRALRDFSGGVFNRDAAKLAHIVSGNAAAKQPMDFQELLMKATMDSIFTIASXVDLDTXSGSDE

SEQ ID NO: 281891 - protein, 107 aa, Zea mays
  unsure (1)..(107): unsure at all Xaa locations
  Clone ID: MRT4577_20184C.1.pep
KNCQVTFRMEPHIFRELATYLRRRRIIVDTRITIEEKLGFFLYMLSHNASYQDLXVYFGHSNDTFHHHINHFFTKVIPILSRRFIQSSDPNQVHQKIQDNPRLYPFF

SEQ ID NO: 281892 - protein, 58 aa, Zea mays
  Clone ID: MRT4577_20185C.1.pep
PRDSFVPLPDVTPIMFRYNLSDAFGAFLPLSELYHSVSFHVLSVEKGRQSLKIPPQPA

SEQ ID NO: 281893 - protein, 56 aa, Zea mays
  Clone ID: MRT4577_20186C.1.pep
LQCGDSQQLGRTKPPCSCSCIVLVLWLAHTEVWRRFMYFRVMRRCSPVPGFCEDDD

SEQ ID NO: 281894 - protein, 269 aa, Zea mays
  unsure (1)..(269): unsure at all Xaa locations
  Clone ID: MRT4577_20187C.1.pep
MGAESATPEPNSEVLFLCSYEGCGKTFFDAGALRKHAHVHGERQYICHYENCGKKFLDSSKLKRHFLIHTGEKNFVCPHEGCGKAFSLDFNLKAHMKTHSADNYHVCQYPECGRRFTQESKLRAHIRAQHEKAVGLQNPGASSMNHSAIGGPHQPPKPAKVSAAPPAPSAERPYVCPYDGCDKAYIHEYKLNLHLKKEHPNHYQDGGPNGAAAPSKRSISKSSHRSKLDITSRMPPANIPKHRGYATPLPAVVSLPEEQQLXKESGVRG

SEQ ID NO: 281895 - protein, 285 aa, Zea mays
  unsure (1)..(285): unsure at all Xaa locations
  Clone ID: MRT4577_20188C.1.pep
DRLAALKAKDKKHGAESATPEPNSEVLFLCSYEGCGKTFFDAGALRKHAHVHGERQYICHYENCGKKFLDSSKLKRHFLIHTGEKNFVCPHEGCGKAFSLDFNLKAHTXTLSADNYHVCQYPECGRRFTQESKLRAHIRAQHEKAVCLQNPGASAMNHSAIGEQHQPPKPAKVSATPPAPSAERPYVCPYDGCDKAYIHEYKLNLHLKKEHPNHYQDGGPQGAAPSKRSISKSSHRSRPDITARMPPAKVSKRKGGYAAPSPAVNLPEEHLPEEQQXAKESDVRG

SEQ ID NO: 281896 - protein, 85 aa, Zea mays
  Clone ID: MRT4577_20189C.1.pep
GLKHYIQWVEHILLLPFFAIHNHYYPSITDNMHTYISNTLSFKNTHLHSHITLSIEILILINTSQPYSLIALYPLLLHLIFIKEP

SEQ ID NO: 281897 - protein, 1595 aa, Zea mays
  Clone ID: MRT4577_2018C.1.pep
MDPKGKGIVINDKEKESFVNEPKDDKPTDSGSGHKRKDGKKKKTRRIKEIVYYDDSDESTSSQKDDDNDYKKTVNSNFSFDYSRIQHSSNSHLLSIPLGKPPHFDGEDYGFWSHKMRSHLFSLHPSIWEIVENGMKFDSSDSPMFINEQIHRNAQATTVLLASLCREEYNKVSGLDNSKQIWDTLKISHEGNDITMLTKMELVEGELGRFAMIRGEEPTQTYNRLKTLINKIRSYGSTRWTDHDVVRLMLRSFTVLDPHLVNNIRENPRYTMMTPEEVLGKFVSGRMMIKEARYVDDALNGPLHEPQPIALKATRSKESLPSKVAQVEAAGLNDEEMALIIKRFKTALKGRKGQPSKAKTKGKRSCFKCGKLGHFIANCPENDSDQEQGKNGKRENKKGYKKAKGEAHLGKEWDSDCSSSDSDDEGLAATAFNKSALFPNEHHTCLMAREKSDNESSEDEIDYSSLFKGLDRTKIAKINELIDALNEKDRILEKQEDLLYEEHDKFVSAQNSLALEVKRNGILSCELSTCNETISSLKGEINVLTAKLEVASNSCVENITICTRCKDFDVNACNKHLVSISKLNDEVASLNAQLKTSKSEVDKIKFARDAYTVGRHPSIKDGLGFKREAKNLTSHKAPIFVKEKGKAPMASSAKRNHAFLYHDRRHARNTYNDFDSHVYDSHAMFASSSSYKHDRDMCRRNVVPRRNFAHVPRKVVNKPSTIYYACNAPFAICRKGRKIVARKLGARCKGDKTCIWVPKDICANLAGPNMSWVYASGGSSWIIDSGCTNHMTGEKKMFTSYVKNKDSQDSIIFGDGNQGKIDLVQLVKQDKSETQGTLKRFLRRAQNEFELKVKKIRSDNGSEFKNLQVEEFLEEEGIKHEFSAPYTPQQNGVNSRPPECFWSEAVNTACHAINRVYLHRLLKKTSYELLTGNKPNVSYFRVFGSKCYILVKKGRNSKFAPKAVEGFLLGYDSNTKAYRVFNKSSGLVEVSSDVVFDETNGSPREQVVDCDDVDEEDVPTAAIQTMAIGEVRPQEQDEQDQPSSSTTVHPPPQDDEHVHQQEADDHVMEEDAQPAPPTQVRAMIQRDHPVDQILGDISKGVTTRSRLVNFCEHYSFVSSIEPFRVEEALLDPDWVLAMQEELNNFKRNEVWTLVPRPKQNVVGTKWVFRNKQDEHGVVTRNKARLVAKGYAQVAGLDFEETFAPVARLESIRILLAYAAHHSFRLFQMDVKSAFLNGPIKEEVYVEQPPGFEDERYPDHVCKLSKALYGLKQAPRAWYECLRDFLIANAFNVGKADPTLFTKTCDGDLFVCQIYVDDIIFGSTNQKSCEEFSRVMTQKFKMSMMGELNYFLGFQVKQLKDGTFISQTKYTQDLLKRFGMKDAKPAKTPMGTDGHTDLNKGGKSVDQKAYRSMIGSLLYLCASRPDIMLSYPKGSTFDLVGYSDSDYAGCKVDRKSTSGTCQFLGRSLVSWNSKKQTSVALSTAEAEYVAAGQCCAQLLWMRQTLRDFGYNLSKVPLLCDNESAIRMAENPVEHSRTKHIDIRHHFLRDHQQKGDIEVFHVSTENQLADIFTKPLGEKTFCRLRSELNVLDSWNLD

SEQ ID NO: 281898 - protein, 59 aa, Zea mays
  unsure (1)..(59): unsure at all Xaa locations
  Clone ID: MRT4577_20190C.1.pep
FSCVLSFHRRPFVLLLSCSCGPLFLFLLVCPFGHNQMWFGCFPGLSLIKTPXXXXGGAR

SEQ ID NO: 281899 - protein, 135 aa, Zea mays
  Clone ID: MRT4577_20191C.1.pep
GQLCRLTRFSRCRQWRSPTHRCAGTRSLKADPGVALMAIAGCVGGAQPVYGSGRRRHAADADVGRQGDKMERGLDIVRRKHGRRIDGDEEPKRKRWATAIAGMVWQMDQEDRRKQGGIFPLAVCGVEFSFLSGVK

SEQ ID NO: 281900 - protein, 52 aa, Zea mays
  Clone ID: MRT4577_20192C.1.pep
KWLSNLLCAIVKPTRSLNPCLGHRSTPSVNHTMPPCFQPHDGCHFYSLVPRH

SEQ ID NO: 281901 - protein, 117 aa, Zea mays
  Clone ID: MRT4577_20193C.1.pep
KINITGSKIHPWRQKVNWETPPRSNRTPRCVAPLEPPVLLHESRDARPYPRCSADPRWRCVVSEQLTETHRFTAPGVALSRSLTRKRCALPTSGEPNGTTDQIRVRWCLQALLCGCE

SEQ ID NO: 281902 - protein, 60 aa, Zea mays
  Clone ID: MRT4577_20194C.1.pep
EIILIYPESHRALQLTNSVRKAQNSMLYGMHEWRVIWGIAGTEALALVRLCVCTCLSRLC

SEQ ID NO: 281903 - protein, 192 aa, Zea mays
  unsure (1)..(192): unsure at all Xaa locations
  Clone ID: MRT4577_20195C.1.pep
MAIGSEEHVNTLKAPNDWMLNKLAAYFDPKASSVPHKSXRSALPLILIIRNRLKYALTYREVISILMQRHVLVDVYVRTDKNYPAGFMDVIIHPXTNHNYRLLYHTRGRFSPSPQVRYEDAKSWFCKIKNCISCVHNGIPYLKTYDGRTIRXPVPLIKGNDTLRIDLXTKRIXDFIKFDVSNVDMLTGGRNT

SEQ ID NO: 281904 - protein, 48 aa, Zea mays
  Clone ID: MRT4577_20196C.1.pep
FFLLYLIVFLEQKGSPDISTQIVWFQNLYGLTTILFLTQPSLLFSIDM

SEQ ID NO: 281905 - protein, 84 aa, Zea mays
  unsure (1)..(84): unsure at all Xaa locations
  Clone ID: MRT4577_20197C.1.pep
NLRISLAXXGASRTSGSKTVITWLGHIPGAFCLFVEVVGIGYLGEIFFRRGPYMLSEPESGQGQSAALLGPIQHLSDXMMPCDS

SEQ ID NO: 281906 - protein, 89 aa, Zea mays
  unsure (1)..(89): unsure at all Xaa locations
  Clone ID: MRT4577_20198C.1.pep
EGHRHSHATHEHRGHGHDMHGHCDEHQHSDTVAENACDHECHAELNSVHSAXNXHHCHDHDHDHGQHDLAEIEEPVKDCHYHEQHCLHE

SEQ ID NO: 281907 - protein, 113 aa, Zea mays
  unsure (1)..(113): unsure at all Xaa locations
  Clone ID: MRT4577_20199C.1.pep
QRPVALXVFLAXYRSFVPADSAIVGLTDRIFCAMGSKSMTTEQSTFMIDLHQVGTMLRHATSRSLCLLDEFGKGTLTEDGIGLLGGTISHFANYGSPPRLDSYLGKCCFRNSI

SEQ ID NO: 281908 - protein, 176 aa, Zea mays
  Clone ID: MRT4577_201C.1.pep
PARPTTRPRPSQQLYHVPRSFLRQKDNMLVLFEEEFGRPDAIMILTVKRDNICTFISERNPAHIMSWERKDSQITAKANADDLRARAALACPPKKLIQQVVFASYGNPAGICGNYTVGSCHTPRAKEVVEKACLGKRVCTLPVAADVYGGDANCSGTTATLAVQAKCSKRSPSAAQ

SEQ ID NO: 281909 - protein, 91 aa, Zea mays
  unsure (1)..(91): unsure at all Xaa locations
  Clone ID: MRT4577_20200C.1.pep
IRLEDGRTLRKDRAAKVIRCLEAAISRRVSAGFTLEVCCRNRLDLLSDVTRVLREHGLTVSRSDVTTXDGQAKNVFYVRNPSGQPVDMKTV

SEQ ID NO: 281910 - protein, 115 aa, Zea mays
  unsure (1)..(115): unsure at all Xaa locations
  Clone ID: MRT4577_20201C.1.pep
MASGGNPNPTGAPTQPRPMHQQQQPQTGGSPATPMXPPPPSLPRRLPLPGPLPXRLPTTPPXPDPXMGASSSPQTPLXPPLQDRPSAPRKSPLSGPWHPAQPRRPQRPRRLPRTR

SEQ ID NO: 281911 - protein, 240 aa, Zea mays
  unsure (1)..(240): unsure at all Xaa locations
  Clone ID: MRT4577_20202C.1.pep
MASFARQEHQFLAELGLAPRNPGSFACGAWGGSGPVVSTTNPSNNEVIAEVVEASMDDYEKGMSACFDAAKTWMAVPAPKRGEIVRQIGDALRAKLHHLGRLLSLEMGKILPEGIGEVQEIIDMCDYAVGLSRQLNGSIIPSERPNHMMMEVWNPLGVVGVITAFNFPCAVLGWNACIALVCGNCVVWKGAPTTPLITIAMTKIVASVFEKNNLPSAIFTAFXCGGAEIGQAIALDTGIP

SEQ ID NO: 281912 - protein, 53 aa, Zea mays
  Clone ID: MRT4577_20203C.1.pep
IGEGLERGIDGQERRPGASAHGRARGGFLPSNSCLLYFSSIDYINRPVGAAPI

SEQ ID NO: 281913 - protein, 86 aa, Zea mays
  Clone ID: MRT4577_20204C.1.pep
MPNIGYGSNKKTKHMLPSGFRKFLVHNVKELEVLLMCNKSYCAEIAHNVSSKNRKAIVERAAQLAIRVTNPNARLRSEENGRQLMC

SEQ ID NO: 281914 - protein, 213 aa, Zea mays
  Clone ID: MRT4577_20205C.1.pep
MEAYLFFHSGRAHEVACAEQEEDIGSPSDSESPSPSTSRESAGSSSELDDDASSSGSDRFEMSALMTQLPLKRGLSRFFDGKSQSFASVAAVGSLEDLAKPARKRLKPSRSCGGALDAHRGRLLSPRRHWTKPAAASGARKTAARSGGLSVLTAVAPRMPPPVRGLRTWPPRFSSLIEPRISLPELDIDARLHVTGCAVAGTATHQRIHPCLN

SEQ ID NO: 281915 - protein, 304 aa, Zea mays
  Clone ID: MRT4577_20207C.1.pep
MASAANFAAASWQPASPSPWNVPHATFVTLSWQPTSPSAWAAPHATFVTPSWQPTSPSPWAASPANFVNTSWTSACPSPGTMPNFVTSSSLTTSLSPWTTPIEAAMAQQSPAPSMGDLWTNIRADLAKMQDSLRMVEQGLLQIKAAVQHEQQQLALSARLQTSAAMGIQAAVCGFLARWRVREMHRQMLEEALVTVDLGTWGRDLGLSDNHQQWRRALSPSASMVRVPQATNFKSTATVVGKALPSSSARAHCLAPPYSAVGRHEGASAGHYCDLLQVAIHVLPFCPNGVHGMLVVAHVQVQCV

SEQ ID NO: 281916 - protein, 109 aa, Zea mays
  Clone ID: MRT4577_20208C.1.pep
SSNLISNYPYLILLGGPMAAAAAAPPWASLGPDRYTMKLIACCFVLILFSSVSCTQLLDNKQVDDLSMEPQVERELMLIKVNAERESYLRYGFGSHFKAKWLIFQTHTN

SEQ ID NO: 281917 - protein, 84 aa, Zea mays
  Clone ID: MRT4577_20209C.1.pep
HLVSANLSFDLIPWLLLPISRRHLGNRHPHLHGQRRMSPSSRRPGNQRPHLHGLRHMPPSSRHPGNRRPYLHGPHHLPILSHAS

SEQ ID NO: 281918 - protein, 666 aa, Zea mays
  Clone ID: MRT4577_2020C.1.pep
MDPKGKGIVINDKEKESFVNEPRDDKSNDSGSGHRRKDGKKKKTRRIKEIVYYDSDESTSSQKDDDHNEYERKKPVNSNFSFDYSRIPQSTNAHLLSIPLGKPPHFDGEDYGFWSHKMCSHLFSLHPSIWEIVESGMHFDSTDSPMFINEQIHKNAQATTVLLASLCRDEYHKVSGLDNAKQIWDTLKISHEGNDVTLLTKMELVEGELGRFAMIRGEEPTQTYNRLKTLINKIRSYGSTRWTDHDVVRLMLRSFTVLDPHLVNNIRENPRYTKMTPEEVLGKFVSGRMMIKEARYVDDALNGPIHEPQPIALKATRSKEALPSKVVQVEAAGLNNEEMALIIKRFKMALKGHKGQPSKTKTKGKRSCFKCGKIGHFIANCPDNDSDQEQGNKREKKKNYKKAKGEAHIGKEWDSDCSSSDSDNEGLAATAFNKSSLFPNERHTCLMAREKKVSTHDTSTYASSSEDESSAEDEVDYSCLFKGLDRTKVDKINELIDALNDKNMLLEKQEDLLYEEHDKFVEAQKSHALEVKRNEMLSCELSSCHETISKLRSINDDLNAKLEIASKSTSCVENVVTCTRCKDINIDAYSEHLACISKLNEEVASLSAQLETSKSDFEKLKFARDAYTVGRHPSIKDGLGFKREVKNLTSHKAPISAKEKGKAPMA

SEQ ID NO: 281919 - protein, 86 aa, Zea mays
  Clone ID: MRT4577_20210C.1.pep
CLKIILTYLPKLPLKVFSVPEAAPFTEELKYAVEAFKSAAHTSAIITNDGLGINPEQSAGNVFLKHGAELCIIPRDRVAAVHMSSG

SEQ ID NO: 281920 - protein, 44 aa, Zea mays
  unsure (1)..(44): unsure at all Xaa locations
  Clone ID: MRT4577_20211C.1.pep
CLSQERIIQFQATPCPKEPNKEMINDGASWTIIXAEYTFYEGMG

SEQ ID NO: 281921 - protein, 149 aa, Zea mays
  unsure (1)..(149): unsure at all Xaa locations
  Clone ID: MRT4577_20212C.1.pep
LGGRWAPFSFILQSPPTTTNLPNPKKEKSKTKPKEEPGTPRLPDGRPPKPPPNQGGGPRPFXFKPKARPPTHQKQNKNPPPPKPRRPGEPTXQTAPPPGEPPSFVPLKGGKGPPARKKGQTCSREKRAIPPPPHKTNRPKTKRGKPGAP

SEQ ID NO: 281922 - protein, 276 aa, Zea mays
  unsure (1)..(276): unsure at all Xaa locations
  Clone ID: MRT4577_20213C.1.pep
SPAGTILIGCIGGVGFFLIVTGIEVSARLEGNLNYDLETLHKLFSSDTWYLWTLPLALAILIMVLRRLSKSPFVLPAFFVSVFAIFYLVVKGILHKDLEPVRNAGWIFELPEAGVQFYRFYTYFKFGSVDAGALVSTIPTMFALSFFGIIHVPINVPALGAAVREDNLDVNRELIAHGISNTLSGCLGSIQNYLVYANSVMFVDNGGNSRTAGVMLAFATTAVWLAGPAMVGYIPICLVGALIFPLGIDLMKEALXDTFGKWHKLEYLTHPGHRAH

SEQ ID NO: 281923 - protein, 114 aa, Zea mays
  unsure (1)..(114): unsure at all Xaa locations
  Clone ID: MRT4577_20214C.1.pep
MSKRGRXGSAANKTRMSLGVGVAXTVNCTNNTGAKNLYIISVKGIKGRLNRLPSACVGDIXMATVKKGKPDXLTKKVMPAVIVRQRKPWRRMDGVYMYFEDNAGVIVNPKGEMK

SEQ ID NO: 281924 - protein, 125 aa, Zea mays
  unsure (1)..(125): unsure at all Xaa locations
  Clone ID: MRT4577_20215C.1.pep
MDSVAVAIVTVSFPAQGHLNQLLHLSPLLAWRGFPIHFAAPESHLREVRARLHGWXPRPXATVCFHTMNVTAHDXPSPPPFPAHMQPLFEAFCTGARASLVALERRRRKWGRRRDARTKDVDLMI

SEQ ID NO: 281925 - protein, 136 aa, Zea mays
  unsure (1)..(136): unsure at all Xaa locations
  Clone ID: MRT4577_20216C.1.pep
RRGMPPHKQRAETFIYFFFEAAHTGETMACICIRLLGANKNWGGRAGALAKVKKDVGPTVGVPGRNVNPTVGGEPDALFALWGAPHRQKVQALALGGVKQVTKTALVAKWPQALSGXGGPRGELPPLLLLPPPXFC

SEQ ID NO: 281926 - protein, 59 aa, Zea mays
  Clone ID: MRT4577_20217C.1.pep
CSGFNNKKGGGVLGTLKNPPVKKQKMFWFPRRQSSKKIFFCFALINFCPKVDFPGVFGV

SEQ ID NO: 281927 - protein, 108 aa, Zea mays
  Clone ID: MRT4577_20218C.1.pep
TPKGLPFFLPFPPTSFFPLSNPPFYFRAPPGGNFNFPPTPVFFAGLPQQFFAVPLKSPKPAFNNAWCAMPPTTAFLFIKLFWTIFGKGPSPEFSPWRWHWPSSSPWPF

SEQ ID NO: 281928 - protein, 39 aa, Zea mays
  Clone ID: MRT4577_20219C.1.pep
RSCFLLRFREKRIKTYVIACKSPQDYTANEKVKAPWSSL

SEQ ID NO: 281929 - protein, 183 aa, Zea mays
  Clone ID: MRT4577_2021C.1.pep
AFDILDQYIKEASESARGHSFITPMTGKCKGMKQTSASKSTSQAVVAVFTVGSLILACPIANVKDITPLLHTIVTSGNSEPRPKNLIGGTISFKELAPSLYIQSWDTLAKICLVDEKVAKRYIPIFVHELERSDMATLRNNIMIAMADFYVRYTALVDCYMPKITKSLRDPCEVVRRQTFILL

SEQ ID NO: 281930 - protein, 164 aa, Zea mays
  Clone ID: MRT4577_20220C.1.pep
GKGLFFIGIRTRGSFYLQLNHPPKTKTVTRRDVRPALCSRSTNNHNIHRPKKGPGPDQPEHTQVMLSNQTPHDQGTRKTLGAGAGETQMEKGSWEQVTNFGKIQKPGGGGKTTGLFHTFPAGGGGKGPKIGVGGRPFPGSPPPSSIKGIKLPPCPGLYGPGPPK

SEQ ID NO: 281931 - protein, 125 aa, Zea mays
  Clone ID: MRT4577_20221C.1.pep
CCCCSRWRCRRCRRRPRSCCSSPWSCCSSWRPSRSAPPRPPRRRRCMPPTTGRSGPLDHRTYVDADDERSRRSTVGLQWRVGIKQFAVRTRMHMPDDDAMDRSEEKKCTVQGKLASRVIGLLRRL

SEQ ID NO: 281932 - protein, 58 aa, Zea mays
  Clone ID: MRT4577_20222C.1.pep
GASQVYKELHEAIKSYPDAFHRVIDLNNIKHTHCVSFITYKPPVSDYTELVGRPPAAS

SEQ ID NO: 281933 - protein, 60 aa, Zea mays
  Clone ID: MRT4577_20223C.1.pep
TPQTTNRFHNMIPWKTIKSPWMDPCPATQNPHWSPSLWLPNNWGVLPRSLYRGAFVLAKT

SEQ ID NO: 281934 - protein, 61 aa, Zea mays
  Clone ID: MRT4577_20224C.1.pep
PLTSPPKRRFGSKESRKGYTEDFDDISLHAESREPKEKGGGLFLETKFNPRLFQTNSFFFG

SEQ ID NO: 281935 - protein, 75 aa, Zea mays
  Clone ID: MRT4577_20225C.1.pep
LVQHAKVRNPRALILYLHAIEAEKLGSFVQSGSSLASSFPMIPRHTRARHTPTPALRCCHATRYARPRMQRALHS

SEQ ID NO: 281936 - protein, 57 aa, Zea mays
  Clone ID: MRT4577_20226C.1.pep
SVLYRLLCLFGQFHCHGGCRSQLPAPGVSFMPSLRSDHRPGNKKSVVCVRVDASVNP

SEQ ID NO: 281937 - protein, 419 aa, Zea mays
  unsure (1)..(419): unsure at all Xaa locations
  Clone ID: MRT4577_20227C.1.pep
MAASPSSPLTAPPEPVTPPSPWTITDGAISGTLPAAEAFAVHYPGYPSSPARAARTLGGLPGLAKVRSSDPGARLELRFRPEDPYCHPAFGQSRASTGLLLRLSKRKGAAAPCAHVVARVRTAYYFEGMADFQHVVPVHAAQTRKRKHSDSQNDNENFDKTGHDEADGDVMMLVPPLFSVKDRPTKIALVPXPMPYLKPCTGGVVQEXGDECWTNXALPFNTQVVPEKINWEDHIRKNSVEWGWQMAVCKLFDERPVWPRQSLYERFLDDNVHVSQNQFKRLLFRAGYYFSTGPFGKFWIRRGYDPRKDSESQIYQRIDFRMPPELRYLLRLKNSESRKWADMCKLETMPSQSFIYLQLYELKDDFIQAEIRKPSYQSVCSRSTGWFSKPMIKTLRLQVSIRLLSLLHNEEAKNLLRNA

SEQ ID NO: 281938 - protein, 86 aa, Zea mays
  Clone ID: MRT4577_20228C.1.pep
AAFFFFFLLFFFFFFFFFFFFFFFFSFFFFFTPARRGDRNCHYPKKKRTLLTGDQLLGTPLEKQPPLAGPGAHGNFLKPNTRALRN

SEQ ID NO: 281939 - protein, 46 aa, Zea mays
  Clone ID: MRT4577_20229C.1.pep
GGLKAARVKMDNPEGITPNPDFWGLPAKGFPVKVVPAKMKRHAPFP

SEQ ID NO: 281940 - protein, 279 aa, Zea mays
  Clone ID: MRT4577_2022C.1.pep
MDPKGKGIVINDKEKESFVNEPKDDKPTDSGSGHRRKEGKKKKTRRIKEIVYYDDIDESTSSQKDDDHNDYERRKPEHGSKREKKKNYKKAKGEAHLGKEWDSDCSSSDSDNEGLAATAFNKSSLFPNERHTCLMAREKKDKSETQGTFKRFLRRAQNEFELKVKKIRSDNGSEFKNLQVEEYLEEEGIKHEFSALYTPQRNGVVERKNRTLIDMARTMLGEFKTPECFWSEAVNTACHAINRVYLHRLLKKTSYELLTDEEDVPTAAIRTMAIGEVRP

SEQ ID NO: 281941 - protein, 55 aa, Zea mays
  Clone ID: MRT4577_20230C.1.pep
KKKYAGKLKHLIKWNCFFYFRPTNKGIKTKVNKSTEKGRFKNNLNSSKFKLRGVI

SEQ ID NO: 281942 - protein, 105 aa, Zea mays
  Clone ID: MRT4577_20231C.1.pep
MRTALPISTSKTTTTATVRLTDDNDDDWDDYNHHDDYLDHQEQVYGENHQEEQLPTYSLVQPLGRAYDEQLSTDFDPNKNSEVSYNYDIDEYDYDGYDYVKAHTC

SEQ ID NO: 281943 - protein, 130 aa, Zea mays
  unsure (1)..(130): unsure at all Xaa locations
  Clone ID: MRT4577_20232C.1.pep
RRDAFNRPGWGRTDPHPCWVLMLEVXCWDFSVCSCVLCVDQRSAMTSSCTFTHYDLXLDNLPHDLVYSPDQVSPWMEVGIEKVKGXSSQAFEVYEPLQDPLISRCGDIIGMNDDKASVSEKLAFAGKGVL

SEQ ID NO: 281944 - protein, 275 aa, Zea mays
  unsure (1)..(275): unsure at all Xaa locations
  Clone ID: MRT4577_20233C.1.pep
LGTSRPAGQGIPYLQNNCTGIVIGLVCGLGSISFALGAIVLTDKWKKGIQRRIRREYFKKNQGLLLEQLISNENATTKTKIFTLDELEEATNKFDATRVLGHGGHGTVYKGILSDQRVVAIKKXSKIVEQIEIDQFINEVAILSQIIHRNVVKLFGCCLEDEVPLLVYEFISNGTLYDILHENIATKCLLSWDDRIRIATEASGALAYLHSAAAIPIFHRDVKSSNILLDDNFTVKVSDFGASRSLSLDETHVVXIVQGTFXYLDPEYYYTGSLT

SEQ ID NO: 281945 - protein, 209 aa, Zea mays
  unsure (1)..(209): unsure at all Xaa locations
  Clone ID: MRT4577_20234C.1.pep
MAALAPSKILGTQLNFAGSSRYATAAPTAGAQKIVSLFSKKPAQKPKPAAVSSSSPDISDELAKWYGPDRRIYLPDGLLDRSEVPEYLTGEVPGDYGYDPFGLGKKPEDFAPXAEYYRITNGLDLEDKLHPGGPFDPLGLASDPDQAAILKVKEIKNGRLAMFSMFAFFIQAYVTGEGPVENLAKHLSDPFGNNLLTVISGAAERTPSL

SEQ ID NO: 281946 - protein, 87 aa, Zea mays
  Clone ID: MRT4577_20235C.1.pep
KKERAGGGTLNLSLCWGLLLKGVQVQRGWGWFKGFGARPRGVFCQASPGARLSPNEQNRGAFPFSGWRFGPPPGGQGCGKKPGGVPP

SEQ ID NO: 281947 - protein, 52 aa, Zea mays
  Clone ID: MRT4577_20236C.1.pep
ICWEYCSMDRVKVGQRICGNLVDPDRWLEMLEPISVVKDVKRDCPCKLPRMS

SEQ ID NO: 281948 - protein, 142 aa, Zea mays
  unsure (1)..(142): unsure at all Xaa locations
  Clone ID: MRT4577_20237C.1.pep
CQKPKPAAVSSXSPDISDELAKWYGPDRRIYLPDGLLDRSEVPEYLTGEVPGDYGYDPFGLGKKPEDFAKYQAYELIHARWAMLGAAGAVIPEACNKFGANCGPEAVWFKTGALLLDGNTLNYFGNNLLTVISGAAERTPSL

SEQ ID NO: 281949 - protein, 276 aa, Zea mays
  unsure (1)..(276): unsure at all Xaa locations
  Clone ID: MRT4577_20238C.1.pep
MAALAPSKILGTQLNFAGSSRYATAAPTAGAQKIVSLFSKKPAQKPKPAAVSSSSPDISDELAKWYGPDRRIYLPDGLLDRSEVPEYLTGEVPGDYGYDPFGLGKYQAYELIHARWAMLGAAGAVIPEACNKFGANCGPEAVWFKTGALLLDGNTLNYFGNSIPINLVVAVIAEVVLVGGAEYYRIINGLDLEDKLHPGGPFDPLGLASDPDQAAILKVKEIKNGRLAMFSMLAFFIQAYVTGEGPVENLAKHLSDPFGNNLLTVISGXAERTPSL

SEQ ID NO: 281950 - protein, 218 aa, Zea mays
  Clone ID: MRT4577_20239C.1.pep
MAALAPSKILGTKLNFAGSSRYATAAPTAGAQKIVSLFSKKPEDFAKYQAYELIHARWAMLGAAGAVIPEACNKFGANCGPEAVWFKTGALLLDGNTLSYFGNSIPINLVVAVIAEVVLVGGAEYYRIINGLDLEDKLHPGGPFDPLGLASDPDQAAILKVKEIKNGRLAMFSMFAFFIQAYVTGEGPVENLAKHLSDPFGNNLLTVISGAAERTPSL

SEQ ID NO: 281951 - protein, 1656 aa, Zea mays
  unsure (1)..(1656): unsure at all Xaa locations
  Clone ID: MRT4577_2023C.1.pep
MDPKGKGIVINDKEESFINEPKDDKPTDSGSSHKKKDGKKKRRIKKIVYYDDSDKSSSSQKDNDDNDYEKKKTVNSNFSFDYSCIPHSSNAHLLSIPLGKPPHFDGEDYRFWSHKMRSHLFSLHPSIWEIVENGMQFDSTDSPLFINEQIHKNAQATTVLLASLCKDEYHKVSGLDNAKQIWDTLRISHEGNDVTMLTKMELVEGKLGRFAMIRGEEPTQTYNRLKTLVNKIRSYGSTRWTDHDVVRLMLRSFTVLDPHLVNNIRENPRYTKMSPEEILGKFVSGRMMIKEARYVDEALNGPIHEPQAIALKATNSKEALPSKVAQVEAAGLNEEEMALIIKRLKTTLKGRKEHPKKTKTKGKRSCFKCGKIGHFIANCPDNDSDQEQGKNGKRENKKVYKKAKGEAHLGKEWDSDCSSSDSDDEGLAATAFNKSSLFPNEHHTCLMAKEKKVSTRNAITYASSSDDESSDDEIDYASLFKGLDRTKIDKINELIDALNDKNRLLEKQEDLLYEEHDKFVEAQKSLALEVKRNEMLSCELSTCHETISSLKSVNDDLNAKLEVANRSNSCVEHVVICNRDAYTIGRHPSIKDGLGFKREAKNLTSHKAPISAKEKGKAPMTNSSQKNHAFIYGDKRYSRNAHRSCNAYDSNVMFASSSSIMHDRNFARKNVVHHMPRRNVVHVPRKVYASGGSSWIIESGCTNHMTGEKKMFTSYVKNKDSQDSIIFGDENQGKVKGLGKIAISSEHSISNVFLVESLGYNLLSISQLCNMGYNCLFTNVDVSVFRRSDGSLAFKGALDDKLYLVDFAKEEAGLDACLIAKTSMGWLWHRRLAHVGMKNLHKLLKGEHVIGLTNVTFEKDRPCAACQAGKQVGSSHHTKNVMTTSRPLELFHMDLFGPVAYLSIRGSKYGLVIVDDFSRFTWVFFLQDKTETQGTLKRFLRRAQNEFELKVKKIRSDNGSEFKNLQVEEYLEEEGIKHEFSAPYTPQQNGVVERKNRMLIDMARTMLGEFKTPERFWSEAVNTACHAINRVYLHHLLKKTSYELLTGNKPNVSYFRVFGSKCYTLVKKGRNSKFAPKAVEGFLLGYDSNTKAYRVFNKSSGLVEVSSDVVFDETNGSPREQVELDDVDEDDVPMDAIRTMAIGDVRPQEHKEQDQPSSSTTVHPPTQDDEQVPQEEACDQGGTQDVQVEEEEAPQAPPTQVRAMIRRNHPVDQILGDIIKGVTTCSRLVNFCEHYSFVSSIEPFRVEEALLDPDWVLAMQEELNNFKRNEVWTLVPRPKQNIVGTKWVFRNKQDEHGVVTRNKARLVAKGYAQVTGLDFEETFAPMARLESIRILLAYAAHHSFRLYQMDVKSAFLNGPIKEEVYVEQPPGFEDERYPDHVCKLSKALYGLKQAPRAWYECLRDFLIANAFKVGKADPTLFTKTCDGDLFVCQIYVDDIIFGSTNQKSCEEFSRVMTQKFEMSMMGELNYFLGFQVKQLKDGTFISQTKYTQDLIKRFGMKDAKPAKTPMGTDGHVDLNKGGKFVDQKVYRSMIGSLLYLCASRPDIMLSVCMCSRFQSDPRECHLVAVKRILRYLVATPCFGIWYPKGSTFDLIGYSDSDYAGCKVDRKSTSGTCQFLGRSLVSWSSKKQTFVALSTAEAEYVAAGQCCAQXLWM

SEQ ID NO: 281952 - protein, 274 aa, Zea mays
  unsure (1)..(274): unsure at all Xaa locations
  Clone ID: MRT4577_20240C.1.pep
MAALAPSKILGTQLNFAGSSRYATAAPTAETEXIVSLGSKEPAQKPKPAAVSSSSPDIIDELAKWYGPDRRIYLPDGLLDRSEVPEYLTGKVPGDYGYDPFGLGKKPEDFAKYQAYELIHAKWAMLGAAGAVIPEACNKFGANCGPEAVWFKTGALLLDGNTLSYFGNSIPINLGVAXLAEVVLFGGAEYYRIINGLDLEDKLHPGGPFNPLGLARDPDQAAILKGKEIKNGRFAMFSMFAFFIQAYATGKGPAKNPAKNLRNPFGXNLLTVIS

SEQ ID NO: 281953 - protein, 310 aa, Zea mays
  unsure (1)..(310): unsure at all Xaa locations
  Clone ID: MRT4577_20241C.1.pep
MAALAPSKILGTKLNFAGSSRYATAAPTAGAQKIVSLFSKKPAQKPKPSAVSSSSPDISDELAKWYGPDRRIYLPDGLLDRSEVPEYLTGEVPGDYGYDPFGLGKKPEDFAKYQAYELIHARWAMLGAAGAVIPEACNKFGANCGPEAVWFKTGALLLDGNTLSYFGNSIPINLVVAVIXGRPACEDAPQAGSDGHALLVLDFRVEXEVVLVGGAEYYRIINGLDLEDKLHPGGPFDPLGLASDPDQAAILKVKEIKNGRLAMFSMLAFFIQAYVTGEGPVENLAKHLSDPFGNNLLTVISGXAERTPSL

SEQ ID NO: 281954 - protein, 142 aa, Zea mays
  Clone ID: MRT4577_20242C.1.pep
PQEKSTLPKKIPGSLPLKPGISRAPRMRALPPCALPPPHAPFAAHPPPPLPPATPSPLHRTCCLVSPAPSPPLRNRAPTLAINPPTSSLSSHPKQNTPDKNPSAKSQATPFSTPSPLRSQCLVILGLKTVVHGSISSMSSSV

SEQ ID NO: 281955 - protein, 68 aa, Zea mays
  Clone ID: MRT4577_20243C.1.pep
MAALAPSKILGTKLNFAGSSRYATAAPTAGAQKIVSLFSKKPAQKPKPSAVSSSSPDISDELAKWYGE

SEQ ID NO: 281956 - protein, 82 aa, Zea mays
  unsure (1)..(82): unsure at all Xaa locations
  Clone ID: MRT4577_20244C.1.pep
HAQLHSAVNNSPCPGQEPLRIVPISCGTLFVVPGKMHYPSEECVVAYLXCHIIKHLVDLLYKAPHPLPDLHPMPCHIKATFP

SEQ ID NO: 281957 - protein, 303 aa, Zea mays
  unsure (1)..(303): unsure at all Xaa locations
  Clone ID: MRT4577_20245C.1.pep
ASAHAYEQDKDRSWLVSSLYQIYSRRYLLRRSALELFMVDRSNFFFDFADIDARKNAYRAIVHTKPPNLNDIFLATQRAEQILKRTQLMERWANWEINNFEYLMELNTLAGRSYNDITQYPVFPWVVADYKSRVLNLDDPLSYRDLSKPIGALNPERLKKFQERYSTFEDPIIPKFHYGSHYSSAGTVLYYLFRVEPFTTLSIQLQDGKFDHADRMFSDLSGTWDSVLEDMSDVKELVPEMFYLPEVFTNINGIDSGTTXLGGKLDSVELPPWAENHVDCVHKHRTALESEHVSAHLHEWXDL

SEQ ID NO: 281958 - protein, 76 aa, Zea mays
  Clone ID: MRT4577_20246C.1.pep
HRKPQHVTLSCSSTLTGERPHRCDDDIEPSAPPHDIPGSDDAYKNNIQLHIDRLSEIESLLRRDEAILLVTLRVRL

SEQ ID NO: 281959 - protein, 451 aa, Zea mays
  unsure (1)..(451): unsure at all Xaa locations
  Clone ID: MRT4577_20247C.1.pep
MVWSMDPQVTVHGDWVSAVVPLMKLLCLAVIGLLLANPRXQVVPRATFKLLSKLVFALFLPCLIFVHLGKSVTIDNVXHWWFIPVNVLISTAIGCALGYIVALICRPPPHLFRFTVIMTGFGNTGNLPIAIIGSVCHTNDHPFGPGCDTMGIAYVSFAQWVAVILVYTLVYHMMEPPMQFYEIVGEGNEIQQEPELVSNYSRSLLHEAEWPGMVDKETEHSKTPFIARVFMSISGSSQNTFPDIDFTEEGTSAAGPSSPKSLRCLAEPRVVRRIRVVAEKTPIQHVLQPPTIASLLAITIGMVPVLKDFVFGADAPLSFFTDSLEILAAAVVPSVMLILGGMLAEGPKDNALGMRTIIGIIVARLLVLPCIGIGVVTLADRLHLLVEENHMYRFVLSLQYSTPSAILLGAIASLRGYGVKEASALLFWQHICAVFSLSLYLVVYFKLFSFI

SEQ ID NO: 281960 - protein, 145 aa, Zea mays
  unsure (1)..(145): unsure at all Xaa locations
  Clone ID: MRT4577_20248C.1.pep
MAASTARTGKDVNPHECVKGYSAHLKRSGKMELPEWGDIVKTARGKELPPYDPDWDYIRAASVARXIYLRQGVGVGGFHNIYGGRQRNGSRPPHFCESSGAISRDILHRVREMGIIDVDPKGGRGITSHGRRDLGQVGGRGAVEP

SEQ ID NO: 281961 - protein, 356 aa, Zea mays
  unsure (1)..(356): unsure at all Xaa locations
  Clone ID: MRT4577_20249C.1.pep
MAAPMAKSLLGPQHPPILISPFKLARPLHKRPIFSFFIVSGFSNFGDLEGAAGPISHPLPRQVSLNCGSPAMAALAPSKILGTKLNFAGSSRYATAAPTAGAQKIVSLFSKKPAQKPKPSAVSSSSPDISDELAKWYGPDRRIYLPDGLLDRSEVPEYLTGEVPGDYGYDPFGLGKKPEDFAKYQAYELIHARWAMLGAAGAVIPEACNKFGANCGPEAVWFKTGALLLDGNTLSYFGNSIPINLVVAVIXAEVILVGGAEYYRIINGLDLEDKLHPGGPFDPXLGLASDPDQAAILKVKEIKNGRLAMFSMFAFFIQAYVTGEGPVENLAKHLSDPFGNNLLTVISGAAERTPSL

SEQ ID NO: 281962 - protein, 45 aa, Zea mays
  Clone ID: MRT4577_2024C.1.pep
LNPQAVANPVVTAFRQQQQWLPDGQFSLMPPALSRQQPIVGGASC

SEQ ID NO: 281963 - protein, 145 aa, Zea mays
  Clone ID: MRT4577_20250C.1.pep
MAASTARTVKDVNPHEFVKAYSAHLKRSGKMELPEWVDIVKTARVKELPPYDPDWDYIRAGSGTRKNYLRQRIGGGGFQKNYGGRQKNGSRPPHFWKNSGGILRNILPQLEEKGIIGGDSQGGRGITSQGKGDLEQVAGKGGGET

SEQ ID NO: 281964 - protein, 135 aa, Zea mays
  Clone ID: MRT4577_20251C.1.pep
LNSRAECSKIVSPILFPPTQLNSTPVQPNKCFKCSTKTAQNVITSTANGDYRQRMVFNVNLPHQWVLKRNNKQHVRPGILSLARVFFQLPPLYRVRPACSKTCLGRISASSSAAIRSPPPPGTGFPSVVLLVPLI

SEQ ID NO: 281965 - protein, 147 aa, Zea mays
  unsure (1)..(147): unsure at all Xaa locations
  Clone ID: MRT4577_20252C.1.pep
MAASTARTVKDVNPHEFVKAYSAHLKRSGKMELPEWVDIVKTARFKELPPYDPDWYYIRAASVARKIYLRQGIGVGGFQKIYGGRQRNGSRPPHFCKSSGAISRNILQQLQEMGIIDVDPKGGRRITSQXGRRDLDXQVAGRVAVEA

SEQ ID NO: 281966 - protein, 145 aa, Zea mays
  Clone ID: MRT4577_20253C.1.pep
MAASTARTVKDVNPHEFVKAYSAHLKRSGKMELPEWVDIVKTARFKELPPYDPDWYYIRAASVARKIYLRQGIGVGGFQKIYGGRQRNGSRPPHFCKSSGAISRNILQQLQEMGIIDVDPKGGRRITSQGRRDLDQVAGRVAVEA

SEQ ID NO: 281967 - protein, 147 aa, Zea mays
  Clone ID: MRT4577_20254C.1.pep
RGFFFFFFFFLQQNSLANFVPPTQLNSTPLQPNKCFKCSTKTAQNVITSTTNGDYRRRMVFNVNLPHQWVLKRNNKQHVRPGILSLSRARILSTPLYYRVRPACSKTCLGRISASSSAAIRSPPPPGTGLARQSLALTSAPSSSSLG

SEQ ID NO: 281968 - protein, 252 aa, Zea mays
  unsure (1)..(252): unsure at all Xaa locations
  Clone ID: MRT4577_20255C.1.pep
MASRPVTRALRQSARQLAAAPAQKRTFVSALSAGAKKAAPRAAVTSQFQQTRGVKTIDFAGTKETVYERADWPKEKLLEYFKNDTLALIGYGSQGHGQGLNMRDNGLNVIVGVRKNGTSWKEAEQDGWVPGKNLFDIDEAIGKATIVMNLLSDAAQSETWPAIKPRLTKGKTLYFSHGFSPVFKDXLTKVEVPKDXIDVIXLVAPKGSGRTVRTLFREGRGINSSIAVYQDVTGKAKEKAVALRVAVGSGYM

SEQ ID NO: 281969 - protein, 147 aa, Zea mays
  Clone ID: MRT4577_20256C.1.pep
MAASTARTVKDVNPHEFVKAYSAHLKRSGKVTMELPEWVDIVKTARFKELPPYDPDWYYIRAASVARKIYLRQGIGVGGFQKIYGGRQRNGSRPPHFCKSSGAISRNILQQLQEMGIIDVDPKGGRRITSQGRRDLDQVAGRVAVEA

SEQ ID NO: 281970 - protein, 81 aa, Zea mays
  Clone ID: MRT4577_20257C.1.pep
PRWDDVDVPNIKVAEPQSKRKSGGYILDEWDEEYDRGKTKKVRRSKQDFGGPNPFQEEADYVSQRRTKQKSYRGKSWNKRA

SEQ ID NO: 281971 - protein, 904 aa, Zea mays
  unsure (1)..(904): unsure at all Xaa locations
  Clone ID: MRT4577_20258C.1.pep
MAGVSMAAAPEGVLHRRIEFHLARRPHGSVAVGGGGFRMETLNPDAAGKVGPGEAVGSSEGDARRPEKGDSGGIDPELSVARIYLGRIGAGLENLGNTCYLNSVLQCLTYTEPFAAYLQSGKHTSSCRTSGFCALCALQIHVKTALESTGKTVTPFRIVKNLRCISRTFRNSRQEDAHELMVNLLESMHKCCLPSGVSTESQSAYDKSLVHKIFXGGRLRSQVKCTRCLHCSNKFDPFLDLSLEIAKATTLVRALENFTEDELLDEGQKEYECERCRQKVVAKKRLTIDKAPNVLTIHLKRFSPFNPREKIDKKVDFQSILDLKPFVSDSKGTDFKYSLYGVLVHTGWSTQSGHYYCYVRTSSGMWHNLDDKEVRQVREADVLKQKAYMLFYVRNSIGKSVVCKDNNAANLLKKKTSEKISSLNGIAQTNVRAQNLNGVSPFGDKTHGTIIGYSTISSKTKTIHCSKNEVKAEDAPASQNNALPSTQAPIARNDVGILPTKPMQFAVKNEEKTSSHQPAPFTNTCGEQTVVGRPLQEMEPKAGAGENTSVVSAVANDAATLSKADKLTSQPQTAPSSKPTANVKDTATEFATLSLSKKDSVVSNGAVLSIGCLTSGEKAMNLSESVDQANEITKALPTSQNNTAPVIAQADCGVEISSGVIMHVAVSASCNGTTEKKVNSKSKKFVRYPVVNMWLGSRHLKPGKKANRKRSKMIRRVVACKDAANLSCLSEQLTSTSSTACSETVECTSSHQKRSHASARSKDDAQSSQNKQKVDGARVGAGTSAPSCSAGVPKSDPNPSTDAKVVATQPASIRATDLMEATVPRWDDVDVPNIKVAEPQSKRKSGGYILDEWDEEYDRGKTKKVRRSKQDFGGPNPFQEEADYVSQRRTKQKSYRGKSWNKRA

SEQ ID NO: 281972 - protein, 35 aa, Zea mays
  Clone ID: MRT4577_20259C.1.pep
SPAKQRPGDNDRYVRNSPHGGSPKETKWGFHDAPV

SEQ ID NO: 281973 - protein, 88 aa, Zea mays
  Clone ID: MRT4577_2025C.1.pep
DRPVHGRVGKKKKKKKKKKKKKKKKKKKKKKKKKKKKKKKKKKKKKGKKKKKLKKGGAPQGVLIFLPLSCNFLFLLNFPQISFQGPSF

SEQ ID NO: 281974 - protein, 138 aa, Zea mays
  Clone ID: MRT4577_20260C.1.pep
SAKGKEGKKPEPKGSHSRVLGGAHQPSSGKKISSLATAGKGTKAKPPGAGKAGKPLPIEEGEGAPPKPMKGRIKILYTGLCQTDVYFWEAKGQTRVFPRILEHKAEGIGKSFEKGVTNLAQGNHFLPVLTGKAKKGPH

SEQ ID NO: 281975 - protein, 44 aa, Zea mays
  unsure (1)..(44): unsure at all Xaa locations
  Clone ID: MRT4577_20261C.1.pep
QTXHKSISGQTGKNRGANRFDYVPLNRPVSGRGSLYKTFISFIL

SEQ ID NO: 281976 - protein, 97 aa, Zea mays
  Clone ID: MRT4577_20262C.1.pep
LPAPPYHQPQLFVRRWLPLCLRFPHCHWPLGNLSVLAIHPHYLPDIFLPGGSLRQPRHTEAPFKSPPVAMQPGGTLPRPGSVHGWLRHHLYLGGSCL

SEQ ID NO: 281977 - protein, 167 aa, Zea mays
  unsure (1)..(167): unsure at all Xaa locations
  Clone ID: MRT4577_20263C.1.pep
MTEFWLISAPGEKTCQQTWEKLHAATTKNNNLAVSSKFNIPDLKVGTLDVLVGLSDELAKLDAFVEGVARKGSDMADVLEDSKDKVQENLLASGVDLVTYITRFQWDMAKYPIKQSLKNISEIIAKGVTQIDNDLXSRASAYNNLKGNLQNLERKTPGSLLTRSLAE

SEQ ID NO: 281978 - protein, 85 aa, Zea mays
  Clone ID: MRT4577_20264C.1.pep
LLPAHFWPHCPSRQAGIAGSCVGLPRVAVLVPQSRRRGSGAGGGAVARTQHPARWLHDAWAWASMLGALEVGEVRPLGAVACRLH

SEQ ID NO: 281979 - protein, 134 aa, Zea mays
  unsure (1)..(134): unsure at all Xaa locations
  Clone ID: MRT4577_20265C.1.pep
EGRXXFFFFRGGPHANSARARSDPWPARRGQAARSRCGPRPAPGSDRPSASARDGGPLRGRPRGVGAGTPDSAPPAQRLARRNRPPDGTLGTPRPGRLACLGNRRQVLRGLRELDLGLTVADVRRPAGAPVALA

SEQ ID NO: 281980 - protein, 84 aa, Zea mays
  Clone ID: MRT4577_20266C.1.pep
SGRQSAVMTTSIFLSVVSASTSPFYEKSLEMHSDPIWWFCNASSMSEMRPSMRISRAFRSPAAAPMSVEPGVSSETGPSSRYGS

SEQ ID NO: 281981 - protein, 60 aa, Zea mays
  unsure (1)..(60): unsure at all Xaa locations
  Clone ID: MRT4577_20267C.1.pep
LVRALVPXPCRVRCPARACPGARVSASLGPPVCRRRWCSGPARRAWPRGARRWWGFCRPP

SEQ ID NO: 281982 - protein, 278 aa, Zea mays
  Clone ID: MRT4577_20268C.1.pep
QSGSTRSFVAECEALRRVRHRCLIKIVTCCSSIDHRGEEFKALVFEFMPNGSLDDWLHPASGAHPLNKTLSLAQRLDIAVDVLDALEYLHNQCQPPIIHCDLKPSNILLAEDMSARVGDFGISKILSDDTSKVLLNSISFTGLRGSIGYVPPEYGEGRSVSALGDVYSLGILLLEMFTGRRPTDDVFQGSLDLHRFAEAALPDRASEIADPSIWQHDEATAKDPADAAALRSRSEECLASAIRLGVSCSKQQPRERVAMRDAAVEMRAIRDAYLRVAS

SEQ ID NO: 281983 - protein, 49 aa, Zea mays
  Clone ID: MRT4577_20269C.1.pep
EGYVKDLDLHIVLLLRKMRVALVKLTRQNPDPPCRTLAIDNINCFVKEV

SEQ ID NO: 281984 - protein, 53 aa, Zea mays
  Clone ID: MRT4577_2026C.1.pep
AYPPPAVRVRVHKVLQRGISRVSASIWQLPMPSTGTCPAASRGSRTSTAFTTP

SEQ ID NO: 281985 - protein, 82 aa, Zea mays
  Clone ID: MRT4577_20270C.1.pep
SKQVRTCPVLHEEWLDGSKLRWQGKHPKGNPPREKTPVCTGKTMVCLPSRGDISEPPRRQNKKKPRGPGKEEGHPGPGTQFP

SEQ ID NO: 281986 - protein, 52 aa, Zea mays
  Clone ID: MRT4577_20271C.1.pep
IRIWRCELLYGVGIISDLEDVINGFQLIRITLSGMISDVMIIKCCWYLIPEL

SEQ ID NO: 281987 - protein, 244 aa, Zea mays
  Clone ID: MRT4577_20272C.1.pep
GKRGKSGLVALNLDFSFLEMNPFTMVNGEPYPLDMRGELDDTAAFKNFKKWGGIEFPLPFGRVLSPTESFIHELDEKTSASLKFTVLNPKGRIWTMVAGGGASVIYADTVGDLGYASELGNYAEYSGAPNEEEVLNYSRVVLDCATADPDGRKRALLIGGGIANFTDVATTFNGIIRALREKESKLKASRMHIYVRRGGPNYQSGLAKMRKLGAELGVPIEVYGPEATMTGICKQAIECIMAAA

SEQ ID NO: 281988 - protein, 423 aa, Zea mays
  Clone ID: MRT4577_20273C.1.pep
MARKKIREYDSKRLLREHLKRLAGIDLTILSAQITQSTDFAELVSQQPWLSTMKLVVKPDMLFGKRGKSGLVALNLDFDQVKEFVKERLGVEVEMGGCKAPITTFIVEPFVPHDQEYYLSIVSERLGSTISFSECGGIEIEENWDKVKTIFLPTEKPMTSDSCAPLIATLPLEARGKIGDFIKGVFAVFLDLDFSFLEMNPFTMVNGEPYPLDMRGELDDTAAFKNFKKWGGIEFPLPFGRVLSPTESFIHELDEKTSASLKFTVLNPKGRIWTMVAGGGASVIYADTVGDLGYASELGNYAEYSGAPNEEEVLNYSRVVLDCATADPDGRKRALLIGGGIANFTDVATTFNGIIRALREKESKLKASRMHIYVRRGGPNYQSGLAKMRKLGAELGVPIEVYGPEATMTGICKQAIECIMAAA

SEQ ID NO: 281989 - protein, 45 aa, Zea mays
  Clone ID: MRT4577_20274C.1.pep
MKLQVGDAFREGNQKEVDYLIHEVSHFGGRDNGWTLHVEDFVGQL

SEQ ID NO: 281990 - protein, 70 aa, Zea mays
  Clone ID: MRT4577_20275C.1.pep
FLFGLWDQRPKFPVFMGRGNDPRALNLQGQVRARATFPASALSWSPDAASLELAPTPSCLRWPLSPKRAP

SEQ ID NO: 281991 - protein, 590 aa, Zea mays
  unsure (1)..(590): unsure at all Xaa locations
  Clone ID: MRT4577_20276C.1.pep
MPLRQRPTMGGGGGGVAKMPAGQLWLLLLGVLLLAFGVPAQASRNTHYDFVITETKVTRLCHEKTILAVNGQFPGPTIYARKDDVVIVNVYNQGYKNITLHWHGVDQPRNPWSDGPEYITQCPIQPGANFTYKIIFTEEEGTLWWHAHSEFDLEAGRGAIVIHPKRGTVYPYPKPHKEMPIILGEWWNADVEQILLESQRTGGDVNISDANTINGQPGDFAPCSKEDTFKMSVEHGKTYLLRVINAGLTNEMFFAVAGHRLTVVGTDGRYLRPFTVDYILISPGQTMNMLLEANCATDGSANSRYYMAARPFFTNTAVNVDDKNTTAILEYTDAPPSAGPPDSPDLPAMDDIAAATAYTAQLRSLVTKEHPIDVPMEVDEHMLVTISVNTIPCEPNKTCAGPGNNRLAASLNNVSFMNPTIDILDAYYDSISGVYEPDFPNKPPFFFNFTAPXPATGPLXTKRGTKVKVVEYGTVLEVVFQDTAILGAESHPMHLHGFSFYVVGRGFGNFDKDKDPATYNLVDPPYQNTVSVPTGGWAAMRFRAANPGVWFMHCHFDRHTVWGMDTVFIVKNGKTPNAQMMPRPPNMPKC

SEQ ID NO: 281992 - protein, 129 aa, Zea mays
  Clone ID: MRT4577_20277C.1.pep
SDINLYFTSIVQIDPYWNLGSIHSGRAASGAVAVLWQQGGAVAAPQQQGRRESPPRLGSTAGRGAVFAPGSRRRAWDSRAWREPPPRLGQQSLAGAVAAPGTAGERRRGTGSLDSSTAVLGHGMERNPR

SEQ ID NO: 281993 - protein, 42 aa, Zea mays
  Clone ID: MRT4577_20278C.1.pep
TCSPTISRGRAVVASFKIKLLLDVYHEIKLPKNRLIPPDPSF

SEQ ID NO: 281994 - protein, 127 aa, Zea mays
  unsure (1)..(127): unsure at all Xaa locations
  Clone ID: MRT4577_20279C.1.pep
SDDLNRVRRYNAEWALTEQLDVISGHLDYIXDXYLPKRTAHIEHVVERLLNALASAPSAYKALGGTDRGKDNMIWMLHDNEPACKKQLKNEFEHAMNTDLGGRTXYTVTVARSLGIPAFDGVKYASA

SEQ ID NO: 281995 - protein, 1191 aa, Zea mays
  Clone ID: MRT4577_2027C.1.pep
MDPKGKGMVVNNKEKESFVNDPKDDKPTDSGSSHKRKDRKKKKTRRIKEIVYYDDSDESSSSQKDDDNYEKKKTVNSNFSFDYSRIPQNTNAHLLSIPLGKPPHFDGEDYGFWSHKMRSHLFSLHPSIWEIVESGMQFDSSDSPMFINEKIHKNAQATTVLLASLCRDEYHKVSGLDNAKQIWDTLKISHEGNDVTMLTKMELVEGELGRFAMIRGEEPTQTYNRLKTLVNKIRSYGSTRWTDHDVVRLMLRSFTVLDPHLVNNIHENPRYTKMTPEEILGKFVSGRMMIKEARYVDDALNGPIQEPQTIALKATRSKEAIPSKVAQIEAVGLNDEEIALIIKRFKTALSGRKEHPNKTKTKGKRSCFKCGKIGHFIANCPDNDSDQEKGNKREKKKAYKKAKGEAHLGKEWDSDCSSSDSDNEGLAATAFNKSSLFPNEHHTCLMAREKKVSTHNTSTYASSSDEESSDDEIDYSCLFKGLDRTKVDKINELIDALNDKNRLLEKQEDLLYEEHDKYVEAQKSLALEIKRNEMLSCELSTCHDSISSLKSINDDLNAKLEIANKSTSCVEHVAICNRCKDFKVDACSEHLVSISKLNDEVASLNAQLKTSKNDFDKLKFARDAYTVGRHPSIKNGLGFKREAKNLTSHKAPISIKEKGKAPMANSVQKNHAFLYHDRRYSRNVHHDRSCNDIVSHAYDSNAMFASSSSMMYDRSLARKNVIHHVPRRNTHMPRKTSNEPSTIYHALNASFAICRKDKKIVARKLGAKCKGDKTFIWVPKAICTNLVGPNKSWVYASGGSSWIIDSGCTNHMTGEKRMFSSYVKNKDPQDSIIFGDGNQGKVKGLGKIAISSEHSISNVFLVESLGYNLLSDKSETQGTLKRFLRRAQNEFELKVKKIRSDNGSEFKNLQVEEYLEEEGIKHEFSAPYTPQQNGVVERKNRMLIDMARTMLGEFKTPERFWSEAVNTACHAINRVYLHRLLKKTSYELLTGNKPNVSYFRVFGSKCYILVKKGRNSKFAPKAVEGFLLGYDSNTKAYRVFNKSSGLVEVSSDVVFDETNGSPREQVVDLDDVDEEDVPTAAIRTMVIGDVRPQELKEQDQPSSSTMVHPPTQDDEQVHQEEACDQGGAQDDHVMEEEAQPAPTTQVRATIQRNHPVDQILGDISKGVTTRSRLVNFCEHYSFVSLRAPRGG

SEQ ID NO: 281996 - protein, 153 aa, Zea mays
  unsure (1)..(153): unsure at all Xaa locations
  Clone ID: MRT4577_20280C.1.pep
RXRDLFDLGDLRDELYFKAFVFPGPSTTGSYIVVLIHEPRSRLSFARPGDDKWTSVGQGIGYKDCTYVDGLLYTVDWTGEIDAFDFTASPVKMTVIMDSLKYPPCENLYIIQAPWGDLLHVWRTIDVPPNAPSWDPEKCLAETVKIQVHKVDL

SEQ ID NO: 281997 - protein, 130 aa, Zea mays
  unsure (1)..(130): unsure at all Xaa locations
  Clone ID: MRT4577_20281C.1.pep
PGWVHDKSARHDAFPLXVRIXAINVLRXNKLLYSTRTDRLQTVMRRAIDITHITCARLNIGYALLXPRCTDNNANHANQALRRAKVKFPVPLNIIXSRXWXFTKFRRADYLKYLPGHALAQTNSITAKRY

SEQ ID NO: 281998 - protein, 66 aa, Zea mays
  Clone ID: MRT4577_20282C.1.pep
LVLAFIHLSRVISCSFFTQPQRLSLAPFFECNYCSLLPILLFLPLKRFAFKKSLVVPSFSFIISNN

SEQ ID NO: 281999 - protein, 32 aa, Zea mays
  Clone ID: MRT4577_20283C.1.pep
RFIEAVRLRPCNIHVFLIGVLMLDSHDNGSYS

SEQ ID NO: 282000 - protein, 101 aa, Zea mays
  Clone ID: MRT4577_20285C.1.pep
PRKTPGLYTTQKGGHHPRAPGRLDPQIYARRPFGNDTVCYGCPSGGFSSILSLKGSPLLRLKMNFLICWDLFSSWRGTAVCLALKKTKGPTAKLEAQFQCS

SEQ ID NO: 282001 - protein, 90 aa, Zea mays
  Clone ID: MRT4577_20286C.1.pep
NLFKRVFVIVFPIVVFGNKFSPQTGIGPPIPKAGVALSSSLKAKFEEEKRKKSAFLGDSFENYRVAELTPPGPNIVANLALLLSLVFFSS

SEQ ID NO: 282002 - protein, 143 aa, Zea mays
  Clone ID: MRT4577_20287C.1.pep
PGGALCIRRHRRVRRLRPRHGKAQLVRRQDRRCWRGQAALRRLLQGPPRSRHRTRYVATLRVVRQRARTCLFACGSFAGPAVWPYDGVLIEGLGSSTCHGLDGVMISCLNVLCFMLVQGVAIRSRAPRSRIAPSEVVALGTQP

SEQ ID NO: 282003 - protein, 739 aa, Zea mays
  unsure (1)..(739): unsure at all Xaa locations
  Clone ID: MRT4577_20288C.1.pep
MLNGGGGGQKKRNTKIEPYRHRVETDPKFFDKSWRKLHDAIREIYNHNASGLSFEELYRTAYNMVLNKFAPQLYEKLTENMKGHLEEMRTCIEAAQGGLFLEELQRKWNDHNKALTMIRDILMYMDRTYIPTNKKTPVFEHGLELWRDTIVRSPMIQGRLFDTLLELIHRERTGDVINRGLMRTTTKMLMDLGLSVYQDDFERPFLEVSASFYSGESQQFIECCTCGEYLKQAERRLHEESERVSQYLDAKTNEKITAVVVKEMLANHMQRLILMENSGLVNMLVEDRYEDLTRMYTLFNHVPDGLATIRSVMVSHIKDTGKSLVTDPERLKDPVDFVQRLLNMKDKYDNIINVSFSNDKSFLNALNSSFENFINLNNRSPEFISLFVDDKLRKGVKEANEEDLETVLDKVMMLFRYLQEKDLFEKYYKQHLAKRLLSGKAASDDSERSMLVKLKTECGYQFTSKLEGMFTDLKTSQDTTQGFYASTSSELPADXPTMSVQILTTGSWPTQTCNTCNLPPEIVSVSEKFRSYYLGTHNGRRLTWQTNMGTADIKVTFGNGSKHELNVSTYQMCVLMLFNSADVLTYREIEQSTAIPAADLKRCLQSLALVKGKQVLRKEPMSRDIADDDSFCVNDKFTSKLFKVKIGTVVAQKETDPEKLETRQRVEEDRKPQIEAAIVRIMKSRRVLDHNSIMTEVTKQLQPRFMPNPVVIKKRIESLIERDFLERDKTDRKMYRYLA

SEQ ID NO: 282004 - protein, 475 aa, Zea mays
  Clone ID: MRT4577_20289C.1.pep
MASDTEGIAALFSMYNDDEEDEDADEPNPPSPAPLTTVTSSSPLSPQAGGEDPNPSLAPPSPPRPEESASLKTLVSPHPSPARALLPPLPSRRSSSPFAASPPSPLRGPSSAPPADLPRPPRRGALAIVDYAHDEMAMSPEQEDGEIMSHTYRFVSDAQAAEGNLEERTLSGTVHIMTPNTPAELSQHADAPEQNQLGTDMAVDITRAEIEDAQVEETTDISTNGENDDPLSRFLPPPVTTKCSAALKQKINKFLAYKRAGKSFNAEVRNRKDYRNPDFLQHAVRYQEIDQIGTCFSKDVFDPYGYDKGDYYDEIEAEMKRELERKEQEKKRNPKVEFITGGVQTPHSASIPKIPGLAGVCTLPVPTEGVQKETRPNKKSKWDKVDDDVKNHVVPSGHDNLSATASVALLTSANVGAGYAAFAYQKLNVLGQEKENSERSALLPPVTVDNYSCPKKNAPKLNAKHRQQQSLIISA

SEQ ID NO: 282005 - protein, 723 aa, Zea mays
  Clone ID: MRT4577_2028C.1.pep
MMGAKKMSTSYVKNKDSLDSIIFGDGNQGKVKGLGKIAITSEHSISNVFLVESLGYNLLSDKSETKGTLKHFLRRAQNEFELKVKKIRSDNGSEFKNLQVEECLEEEGVKHEFPAPYTPQQNGVVERKNRTIIDMARTMLGEFKMPEQFWSEAVNTDCHAINRLYLHRLLKKTSYKLLTGNKPNVSYFCVFGSKCYILVKKGRHSKFASKAVEGFLPGVEEALQDPDWVLAMQEELNNFKRNEVWSMVPRPKQNVVGTKWVFRSKQDEHGVVTRNKARLVAKGYAQVAGLDFEETFAHVARLVSIRILLAYAAHHSFRLFQMDVKSAFLNGPIKEEVYVEQPPGFEDDRYPDHVFKLSKALYGLKQAPRAWYECLRDFLIANAFKVGKADPTLFTKTCDGDLFVCQIYVDDIIFGSTNQKSCEEFSRVMTQKFEMSMMGELNYFLGFQVNQLKDDTFISQTKYTQDLLKRFGMKDAKPAKTSMGTDGHVDLNKGGKSVDQKAYRSMIGSLLYLCASRPDIMLSVCMCARYQSDPRECHLVAVKRILRYLVFTPCFGIWYPKGSTFDLIGYSDSDYARCKVDRKSTSGTCQFLGRSLVSWSSKKQTSIALSIAEAEYVAAGQCCAQLLWMRQTLRDFGYNLSNSLLCDNESAIRMADNPVEHSHTKHIDIRNHFLRDHQQKGDIEVFHISTENQLADIFTKLLDEKTFCRLRSELNVLDSRNLD

SEQ ID NO: 282006 - protein, 88 aa, Zea mays
  Clone ID: MRT4577_20290C.1.pep
SRRVPLLVFFCSCLSGLLLLAVCSRLPLCFRSPRPCFAACLRPLLLACFVGLIVTLFSFLPSNVRPPLWSPLGLPRPALASRAARGRP

SEQ ID NO: 282007 - protein, 141 aa, Zea mays
  unsure (1)..(141): unsure at all Xaa locations
  Clone ID: MRT4577_20291C.1.pep
LIINPVGGNSPHLPPGHTRKKKPGGGTKPNTPQTHPGGPPGNSGPGPKNEPTGPRGSPGKPGXEPWGEPIPPKKGDPKTRPNKRQXPEAPGEKPGPPKEXNQTNTXPKAXPGGPQGNPPPQXLNEPPXPPFKRGKPYGPPG

SEQ ID NO: 282008 - protein, 441 aa, Zea mays
  unsure (1)..(441): unsure at all Xaa locations
  Clone ID: MRT4577_20292C.1.pep
MASDTEGIAALFSMYNDDEEEEDADEPSPPSPALPAAVTSSSPLSPQAGAEDPNPSVAPPSPSRPEELASLKTLASPHPSPARGLLPPLPSRRSSSPFAVSSPSPLRGPFFAPPADLPRPPRRGALAIVDYAHDETAMSPEQEDGEITSNTYGFGSDAQAAEGNLEERTYSGTVHVMTPNTLAELSQHPDAPEQNQVGTDMAVDVTRTEIKGAQVEGTTDISTNGESDDPSNRFLPPPVTTKCSAALQQKINKFLAYRRAGKSFNAEVRNRKDYRNPDFLQHAVRYQEIDQIGTCFSKDVFDPYGYDXGDYYDEIEAEMKRELERKEQEKKRNPKVEFITGVQPPINASIPKIPGLAGVCTLPVPTEGVQKETRPNKKSKWDKVDGDVKNHVVPSGHDNLSATTAALLTSANVGAGYAGFAQQKRKEAEEKKNDHKSDRRS

SEQ ID NO: 282009 - protein, 95 aa, Zea mays
  Clone ID: MRT4577_20293C.1.pep
RNDFTFLPFFSTQGWGVWIMDWLHTTGIGTHFMNWANLERTGKVTGTNSHYSTRAILNSFSTNQIGTTFSWGGSEQNQGRPGGNTRGHLGLPYGK

SEQ ID NO: 282010 - protein, 81 aa, Zea mays
  Clone ID: MRT4577_20294C.1.pep
MAAAGKLLLLAAAILAASFVADARPCGHAQTLLESFSSVLRPNPDQSKPTPITHHSGYRIFVYGASVCNKIIITGRCDELS

SEQ ID NO: 282011 - protein, 63 aa, Zea mays
  Clone ID: MRT4577_20296C.1.pep
RTCYLSSGFNDPLDCLFVSALYTVTVQLSATGNTSLSYGLTTFCRTEQLQNHNRFTGCCSRSV

SEQ ID NO: 282012 - protein, 50 aa, Zea mays
  Clone ID: MRT4577_20298C.1.pep
VRFRLEIYIQSQRSTEETHTAMVSSVATDHQELTGTVTCEETTRIWVHSK

SEQ ID NO: 282013 - protein, 88 aa, Zea mays
  Clone ID: MRT4577_20299C.1.pep
AERREQQAPPRRGQGPASALHRRRRRREGRKPCINPKSEAQEAGEGAELENSGGLLLGNPREFFSVVHRASDLIFSCGYGAVERGWGK

SEQ ID NO: 282014 - protein, 94 aa, Zea mays
  Clone ID: MRT4577_2029C.1.pep
MTADCAVMTPAKRAAMRRFRRRYLLYTVCHDMYRYNGTVFPECDADGSERDDFHKWGESKRVSPSSRGYKSSSSSARTRPSPLPRLAGPTRGRP

SEQ ID NO: 282015 - protein, 424 aa, Zea mays
  Clone ID: MRT4577_202C.1.pep
ADCETVVFGTQHVNAQHNQRTFHFADETAQNNVWEMFDGENVPKYKQAKIRLRKAGDLYNLTKDKTDYVWYTSSFKLEADDMPIRSDIKTVLEVNSHGHASVAFVNNKFVGCGHGTKMNKAFTLEKPMDLKKGVNHVAVLASSMGMTDSGAYMEHRLAGVDRVQITGLNAGTLDLTNNGWGHIVGLVGEKKQIHTDKGMGSVTWKPAVNDRPLTWYKRHFDMPSGEDPVVLDMSTMGKGMMFVNGQGIGRYWISYKHALGRPSQQLRSFLRQKDNMLVLFEEEFGRPDAIMILTVKRDNICTFISERNPAHIMSWERKDSQITAKANADDLRARAALACPPKKLIQQVVFASYGNPAGICGNYTVGSCHTPRAKEVVEKACLGKRVCTLPVAADVYGGDANCSGTTATLAVQAKCSKRSPSAAQ

SEQ ID NO: 282016 - protein, 76 aa, Zea mays
  Clone ID: MRT4577_20300C.1.pep
IILLVLASPTLSAGDMWPVSCLAVTIAPGARPVTPWDPEKTVEADPGYCLSLHEAPVLVHLARAHDGIRLQLLRRL

SEQ ID NO: 282017 - protein, 594 aa, Zea mays
  unsure (1)..(594): unsure at all Xaa locations
  Clone ID: MRT4577_20301C.1.pep
VDPRFSHASACPRRRCWXLHLWKWELLVFVLICGRLVSGWVIRIAVFGVERNFLLRKRVLYFVYGVRSAVQNALWLGLVLASWHFLFDENVQQETNSPVLPYVTKVLFCFLVATLIRLVKTLLLKVLASSFHVSTYFDRIQEALFNQYVIQTLSGPPLVEENHVLEEVHELQRAGATIPKELRDAVPTKTVSGQRNIQLSGVMPEGQGSKQLSKEKRDGISIDALNKLNQRNVSAWNMKRLMRIVQFGTLTTMDEQIQQARGKGDESATQIRSEYEAKIAAKKIFSNVAKPGSKYIYLSDLMRFMRQEEAVKAMDLFEGAQEHSRVSKRSLKNWVVNAFRERKALALTLNDTKTAVNKLNQMVNVVVGIIVFVLWLLILGIATTHFFVFLSSQLLLAVFVFGNTLKTVFEAIVFLFVMHPFDVGDRCEIEGVQAVVEEMNIMTTVFLRYDNLKIYYPNSVLATKPIMNFYRSPDMGEAIDFSIHVATPVEKLALMKERILRYIDNKKEHWYPGAMVVLRDVDDTNKLKVSIWLRHTLNFQDMGMRFVRRELVLQEMIKVLKDLEIEYRMLPLDVNVRNAPPIQSTRMPTTWSYS

SEQ ID NO: 282018 - protein, 102 aa, Zea mays
  Clone ID: MRT4577_20302C.1.pep
QTPCATAGKEGTLAALHQPATQVEAHGLSGLGPAQNLPTNTVVIQEPSADVDNSSKKTEIVPDTLTIEETYANMKLERTIHVGLEYSLIDTCADVDTMDTHY

SEQ ID NO: 282019 - protein, 234 aa, Zea mays
  unsure (1)..(234): unsure at all Xaa locations
  Clone ID: MRT4577_20303C.1.pep
NAPFRLGGGGGGSPKDRRPAADDKEDEDEGRGGAGALTGTLIAGALLVGFVGGFGAAGYVYKDQINTFLTQFSGFLDGYGPAGYALFVLVYAGLEVLAIPAIPLTMSAGLLFGNVTGTIIVSVGGTLAAAVAFLIARYFARERILKLVEGNKKFLAIDKAIGENGFKXWLGMLPGSWAYVSAGAFGRALIQDESEIGLGGNEQLWTLGVGLLFTAIAAAYVTRLAKDAVKEIDD

SEQ ID NO: 282020 - protein, 328 aa, Zea mays
  Clone ID: MRT4577_20304C.1.pep
MRQLHLSPQLSPSPVLSSHFSPPPAEASSWRRRLHRGRAFQPPLSSLRDPNKATLRKASSNVPFRLGGGGSGSPKDRRPADDDKAEEEAEGEGGAGALTGTLVAGALLVGFVGGFGAAGYVYKDQINTFLTQFSGFIDGYGPAGYALFVLVYAGLEVLAIPAIPLTMSAGLLFGSVTGTIIVSISGTLAAAVAFLIARYFARERILKLVEGNKKFLAIDKAIGENGFKVVTLLRLSPLLPFSLGNYLYGLTSVKFLPYVLGSWLGMLPGSWAYVSAGAFGRAIIQEESEIGWGGNGQLWTLGVGLLFTAMAAAYVTRLAKDAVKEIDD

SEQ ID NO: 282021 - protein, 56 aa, Zea mays
  Clone ID: MRT4577_20305C.1.pep
PKRYPIYQPVKPTTTRLVHTLSKHGTNDKMPAVKANGSTVTLETTSEHAEVARDTL

SEQ ID NO: 282022 - protein, 127 aa, Zea mays
  Clone ID: MRT4577_20306C.1.pep
PRHFRTYFFSKKKKEKKKEDAAALPHLPLTNKQICILCQHSMPRRDLYASPSSSSLFGFLNELLSVYLYGSYTGHPSVVHIFSSIARCQAQNKQHRAPPGHIYRRHRVALACHAPKTYTPICIALAN

SEQ ID NO: 282023 - protein, 175 aa, Zea mays
  Clone ID: MRT4577_20307C.1.pep
HASADAWAAIPLTMSAGLLFGNVTGTIIVSVGGTLAAAVAFLIARYFARERILKLVEGNKKFLAIDKAIGENGFKVVTLLRLSPLLPFSLGNYLYGLTSVKFLPYVLGSWLGMLPGSWAYVSAGAFGRALIQDESEIGLGGNEQLWTLGVGLLFTAIAAAYVTRLAKDAVKEIDD

SEQ ID NO: 282024 - protein, 60 aa, Zea mays
  Clone ID: MRT4577_20308C.1.pep
GVYWVSNKIAHKFLSFLAGVLAKGKGLHHLGMLFYPFFKKNPLCLDLIFLLGKGLVHKKF

SEQ ID NO: 282025 - protein, 74 aa, Zea mays
  Clone ID: MRT4577_20309C.1.pep
MSQAQPPRSQAQWKHVKFQDNQANAMKEPGTGGYGYGTKNDKNKDVDTIASDFIKLKHKAWALQKSTTMYQPST

SEQ ID NO: 282026 - protein, 627 aa, Zea mays
  Clone ID: MRT4577_2030C.1.pep
MDPKGKGIVINNKEKESFVNEPKDDKSNDSGSGHKRKDGKKKKTRRIKEIVYYDSDESSSSQKDDDHNDYEQRKPVNSNFSFDYSRIPQSSNSHLLSIPLGKPPHFDGEDYGFWSHKMRSHLFSLHPSIWEIVDSGMHFNSSDSPIFINEQIHKNAQATTVLLASLCREEYNKVSGLDNAKQIWDTLKISHEGNDVTMLTKMELVEGELGRFAMIRGEEPTQTYNRLKTLVNKIRSYGSTRWTDHDVVRLMLRSFTILDPHLVNNIRENPRYTKMSPEEVLGKFVSGRMMIKEARYVDDALNGPIHEPQPIALKATRSKEALPSKVAQVEAAGLNNEEMALIIKRFKTALKGRKGQPSKTKTKEKRSCFKCGKIGHFIANCPDNESDQEKGDKREKKKHYKKAKGEAHLGKEWDSDCSSSDSDNEGLAATAFNKSTLFPNERHTCLMAREKKVCTRNSTYASSSEDESSDEDEVDYSCLFKGLDRSKIDKINELIDALNENNILLEKQEDLLYEEHDKFVEAQKSLALEIKRNEMLACEVSTCHDSISNLKSINDDLNAKLVEANKSNSCVEYVEICTRCKDIDINACSEHLVSISKLNDELASLNAQLKTSKSNFDKLKFARDAYT

SEQ ID NO: 282027 - protein, 74 aa, Zea mays; identical to SEQ ID NO: 282025
  Clone ID: MRT4577_20310C.1.pep

SEQ ID NO: 282028 - protein, 68 aa, Zea mays
  unsure (1)..(68): unsure at all Xaa locations
  Clone ID: MRT4577_20311C.1.pep
PPGTDTGEGLSFGVXSVGAAILHCLPAKSNLWPGGCPPCLICLTLHGSDSNLQVMVFPSGLYKNCIPL

SEQ ID NO: 282029 - protein, 74 aa, Zea mays; identical to SEQ ID NO: 282025
  Clone ID: MRT4577_20312C.1.pep

SEQ ID NO: 282030 - protein, 55 aa, Zea mays
  unsure (1)..(55): unsure at all Xaa locations
  Clone ID: MRT4577_20313C.1.pep
GRKKKERKERKKRKKKXKKKKKKKKKKKKKKKKTQKKKRKKKKKKKKKKKKKKNK

SEQ ID NO: 282031 - protein, 74 aa, Zea mays; identical to SEQ ID NO: 282025
  Clone ID: MRT4577_20314C.1.pep

SEQ ID NO: 282032 - protein, 74 aa, Zea mays; identical to SEQ ID NO: 282025
  Clone ID: MRT4577_20315C.1.pep

SEQ ID NO: 282033 - protein, 74 aa, Zea mays
  Clone ID: MRT4577_20316C.1.pep
MSQAQPPRSQAQWKHVKFQDNQANAMKEPGTGGYGYGTKNDKNKDVDTIATDFIKLKHKAWALQKSTTMYQPST

SEQ ID NO: 282034 - protein, 31 aa, Zea mays
  Clone ID: MRT4577_20317C.1.pep
EHSGKIVALATHVASASNMSREMIKVAMAYL

SEQ ID NO: 282035 - protein, 144 aa, Zea mays
  Clone ID: MRT4577_20318C.1.pep
TKEDDPYHTQTGMRENRLTERTGTNQHKTQQAAAGGGMGHRATDTGPHHHYHPAHTFFSPRYLQPGPDTFTRQSLVATYRASFDTQTPTAGDARNRSVLNKKIPCYTAIYPREGIPRHARTPIPWALAPPLLCARPHLVAFLGS

SEQ ID NO: 282036 - protein, 55 aa, Zea mays
  Clone ID: MRT4577_20319C.1.pep
TDHGQDIWLDQEVPEEAERTSVKSIILSGTEDAKSDLSLHIGAELEIQWRESPIG

SEQ ID NO: 282037 - protein, 104 aa, Zea mays
  Clone ID: MRT4577_2031C.1.pep
LIDHPFPVPPGRINDGGHDEIHPSPRNDQWPLVSCYGPLNKIPPWGHGPLHVHGSMSLPRRPCMCVLRVNQKKKKVRSKTGHALLAVWFIQIPTFEGNQNFFCG

SEQ ID NO: 282038 - protein, 71 aa, Zea mays
  Clone ID: MRT4577_20320C.1.pep
IYVPCKIIRFWYEMKPPVSCTSPSTLSMVCSAIHLQNYGILCQSPRKNMHLCRKCTRSTCVGAYVGLAIIS

SEQ ID NO: 282039 - protein, 90 aa, Zea mays
  Clone ID: MRT4577_20321C.1.pep
QGKNVHPLLKCLSIFCTFSTKKKNIGAGFSFGQVSLDHACDIIRPVKYFRPLVGYQFKISEGAGVACYLSSINPPPTHYHLPHRQILGPP

SEQ ID NO: 282040 - protein, 59 aa, Zea mays
  Clone ID: MRT4577_20322C.1.pep
IFLNYISFSNYYLQLYNFKKPFRFCLGNLRLKVHLTRLTLKLEPLKLHNCSLLQSSKLL

SEQ ID NO: 282041 - protein, 55 aa, Zea mays
  Clone ID: MRT4577_20323C.1.pep
CSGKVSSVTHTAENCGVRVGRVNRSVVVFTTPPDPIHCLHAGIEHEGVCPSSRFS

SEQ ID NO: 282042 - protein, 801 aa, Zea mays
  unsure (1)..(801): unsure at all Xaa locations
  Clone ID: MRT4577_20324C.1.pep
MPSPRQFLQLLLPTLLATCCVDGANGPHAPATARRQLHQPFFVPDQPGQPSAPPPFFPAIPVTPPPPVPTGQDQPTYPALVFPSNGSSGATPPAGNSHGSKKASPSSGEEEFYSPRGSSIKTSSSRRTLATAVQAALEARDRSRTPSPGSVLSTPSYPSSPGATLSPAPASPPAFSSPGESGRRSVKSRSESARVVVLPPVPPTPPPPPPFAPTLPPPAPPRRKPPCATPPCSPLXRRTSSLXSTTPTRARNPFAQPPSLPTSTHXHDHLRLQGPPPPPPPPPPPPVGYWESRVRKPDTSKETRSPALSPPSFRSVPAPTDAFPSRLPESSEQGDKSEDTTPRPKLKPLHWDKVRASSDRVMVWDQLKSSSFQVNEEMIETLFICNPANAPAKEATRRPVLPTPKAENKVLDPKKAQNIAILLRALNVTKEEVSDALCEGNTENFGADLLETLLKMAPTKEEEIKLREFKEESSPVKLNPAEKFLKAVLDVPFAFKRVDAMLYIANFDAEVNYLKKSFETLEAACDELRSSRLFLKLLEAVLKTGNRMNVGTNRGDAHAFKLDTLLKLVDVKGTDGHTTLLHFVVQEMIRTEGARVSGSTQTTPRTQANPLREELECKKLGLQVVAGLASELSSVKKAAGMDSDVLSSYVTKLAGGIEKVTEVVLRLKNEGTESRDGAWRFHDRMQRFLKKADDEIIRIQCQESVALSLVKEITEYFHGDSAKEEAHPFRIFMVVRDFLAVLDQVCREVGRVNERTIASSARHFPVPVNPTTPQLFPRLHALRAGFSDDDDESSAASVSSP

SEQ ID NO: 282043 - protein, 526 aa, Zea mays
  unsure (1)..(526): unsure at all Xaa locations
  Clone ID: MRT4577_20325C.1.pep
GINKAYHEDFFDNSTQQADTLWLXLGPDSMASASGADALLNGVEIFKLSKDSDLSYVLGHIDTGNQMDSSKGGKIKGLWEELGIGSASFVAVTSVVLFSWCYIRKKRKAVNKEAPPGWHPLVLHEAMKSTTDARAASKSSSARNASPIGHRMGRRFGIAEIRAATKNFDESLVIGTGGFGKVYKGEIDEGATVAIKRANTLCGQGLKEFETEIEMLSKLRHRHLVAMIGYCEEQKEMILVYEYMAKGTLRSHLYGSSLPPLTWKQRIDACIGAARGLHYLHTGADRGIIHRDVKTTNILLDDSFVAKIADFGLSRTGPTLDQTHVSTAVRGSFGYLDPEYFRRQQLTQKSDVYSFGVVLFEVACARPVIDPTLPKDQINLAEWAMRWQRQRSLEAILDPRLDGDFSPESLKKFGEIAEKCLADDGRSRPSMGEVLWHLEYVLQLHEAYRRNVVESESFGSGELGFADISSSFFSLPHVIREGEEEHHHRSKKPSSIREELDTHYQPPPPSQQKKDTEVSRVSLTTV

SEQ ID NO: 282044 - protein, 64 aa, Zea mays
  unsure (1)..(64): unsure at all Xaa locations
  Clone ID: MRT4577_20326C.1.pep
TRRSQRCXVSTHPRNHQGGSAPTMAQQAWIAMLAYLDKRKSDGSHRLRSNSGRHEPGPPAPDPA

SEQ ID NO: 282045 - protein, 29 aa, Zea mays
  Clone ID: MRT4577_20327C.1.pep
ELTGFSFIHCLSIDATQLPDSYIQTLLGS

SEQ ID NO: 282046 - protein, 105 aa, Zea mays
  unsure (1)..(105): unsure at all Xaa locations
  Clone ID: MRT4577_20328C.1.pep
ATATARPRRGARPSPRGGTPCWFHFRLRLRRQGSGRRRGSCPRPRMRSRRRHREGGGTRGGARRCGPERVRRSRPGPRGLVRPSGSQRRGTPLLFRFSRCPRLRX

SEQ ID NO: 282047 - protein, 854 aa, Zea mays
  Clone ID: MRT4577_20329C.1.pep
MSPFVLAVVSVAFLNLLFLQAHGSGLLLSCGSNSTVDADGRRWTGDITPEGNFTLSSPGLAASLVGKSSSDEIFGPLYSSARFFNAATWYTISVLPGSYCVRLHFFPSTFGNLSANNSVFDVTANDFKLVSKFNASEEIAWRASVSNSVTSAVVKEYFLVVGARGLSIEFDPRPGSFAFVNAIEVMLTPDNLFNDTVSKVGSAGTQLPLGLSGRGVETMYRLNIGGPALKSPSDQYLHRPWYTDEAFMFSTNAAQTVSNASSIVYVSSNDSSIAPIDVYETARIMGNNMVVDKRFNVSWRFYVHPNFDYLVRLHFCELVYDKPSQRIFKIYINNKTAAESYDVYARAGGINKAYHEDFFDNSTQQADTLWLQLGPDSMASASGADALLNGVEIFKLSKDSDLSYVLGHIDTGNQMDSSKGGKIKGLWEELGIGSASFVAVTSVVLFSWCYIRKKRKAVNKEAPPGWHPLVLHEAMKSTTDARAASKSSSARNASPIGHRMGRRFGIAEIRAATKNFDESLVIGTGGFGKVYKGEIDEGATVAIKRANTLCGQGLKEFETEIEMLSKLRHRHLVAMIGYCEEQKEMILVYEYMAKGTLRSHLYGSSLPPLTWKQRIDACIGAARGLHYLHTGADRGIIHRDVKTTNILLDDSFVAKIADFGLSRTGPTLDQTHVSTAVRGSFGYLDPEYFRRQQLTQKSDVYSFGVVLFEVACARPVIDPTLPKDQINLAEWAMRWQRQRSLEAILDPRLDGDFSPESLKKFGEIAEKCLADDGRSRPSMGEVLWHLEYVLQLHEAYRRNVVESESFGSGELGFADISSSFFSLPHVIREGEEEHHHRSKKPSSIREELDTRENF

SEQ ID NO: 282048 - protein, 104 aa, Zea mays
  unsure (1)..(104): unsure at all Xaa locations
  Clone ID: MRT4577_2032C.1.pep
RRLQAAVAIGGKQNAXRKKRKNDLGRQPANTKXESXTTLMRGRVLLENVKWTSLRLDTGNYSWRSEVVTRKTLLLREVYNGSNIEMGRTQTLAKSVIVQNDVAL

SEQ ID NO: 282049 - protein, 95 aa, Zea mays
  Clone ID: MRT4577_20330C.1.pep
IRKDGQRPWPRRRVVLQPVRVRSSVTVAMPVPVRGRGVLLLVTAAAATSPVVMMRLLLRARALLLLVVLRRRLELPPQVVRRAAATLPHETAHAS

SEQ ID NO: 282050 - protein, 200 aa, Zea mays
  Clone ID: MRT4577_20331C.1.pep
DKPFTGTHILLLSPSDIKLQTIHDNGQWISSIETSKSRPTKSLAANHAVASDNPHQLLFNFWGKEVGRSGDVPEVGDGGWLTLEGPCTEISRACSSSKGDVNVDAIPTPLLRRAPLHPGKTAAAAVGVRARWARLGAGAPAGAAGGVGGARSSERGGRGRGRELRRARQARPRARAPADRPRACSTVGARNERERKVRGV

SEQ ID NO: 282051 - protein, 76 aa, Zea mays
  unsure (1)..(76): unsure at all Xaa locations
  Clone ID: MRT4577_20332C.1.pep
XIVFFFFFFFLCVLFFFFFRNLTLLMLHFETQQPLKKPNFGKGPRVKKRGHQKGHGGTISKPEKKQIEGTLRGGLL

SEQ ID NO: 282052 - protein, 197 aa, Zea mays
  Clone ID: MRT4577_20333C.1.pep
MLPTPWSSTFPSPATGFLLLLALLPVASGTSVPTLGGFDRGEAAGADAYSILTFHDYTPPPPPVLPPPPAAPAATCAGDLHGVGDLDTQCVVHESVRLGGGVFISGNGSLLILDGVAVTCERPGCVVSANLSGDLLLGNRSRVVAGWVSLAAANITLGEDAVIDTTALGGDPPDQTSGVPTGTYGDGGGHGRRGASC

SEQ ID NO: 282053 - protein, 95 aa, Zea mays
  Clone ID: MRT4577_20334C.1.pep
VAVARFVFFFNYQILCKENRRCVSCLPIWKIVACIANIPILDRSCRFSKSASVRHCAKKTKLYILSIIYQYGKIAGCIDSMPVLGIEAACCPIRC

SEQ ID NO: 282054 - protein, 66 aa, Zea mays
  Clone ID: MRT4577_20335C.1.pep
GPKKKSLKQCKRGKRKGESIKTSRPLNYFLFFLHFFFILFFFFFYFFFFFFFFFFFFFFFFRNAWT

SEQ ID NO: 282055 - protein, 288 aa, Zea mays
  unsure (1)..(288): unsure at all Xaa locations
  Clone ID: MRT4577_20336C.1.pep
KDLRLISLVHSFAMLITKIFANRLASRLHGMVSFNQSAFIKGRFIQDNYMLVQQTTCFLNQQKQPRLLLKLDISKAFDSVSWPFLLEVLQHLGFEQIWRDIIFGLLLISSXKICYNPLASRMVQHRFSLYAGDVVIFLGPTAMEIKVVVDIIDLFGXASGLRTSVQKSSLFPIRCEEQDLALLQNLMPCEVAEFPCRYLRLXLSIKRLTKGQVQPIIDKXANQLQGXKADLMTKAGRXIQVQAVLTGMVIYLAMTVDLPVWALEAIDKIRRGFLWRDRKEAKGGRCLP

SEQ ID NO: 282056 - protein, 137 aa, Zea mays
  Clone ID: MRT4577_20337C.1.pep
PYYQQQQFFPFNHLFTLNPAVYLRHQFFPFSRVGFAYFHQQQFFPFNQLAALNPAVFLQQQIFFPFSQLVAASRVSFLTQQQLLPFYQQFGANPAPLFQLHQLLPFVHLVLANPAASSHQPIMGGALLLDCFLVVIQ

SEQ ID NO: 282057 - protein, 85 aa, Zea mays
  Clone ID: MRT4577_20338C.1.pep
FPFNQLAALAPPGYLRQQIFLPFSQLVAASRVSFLPQHQLVPFYQRFGGNPAPLFQLQQLLPFVHLVLANPAASSQQHIIGGALF

SEQ ID NO: 282058 - protein, 85 aa, Zea mays
  unsure (1)..(85): unsure at all Xaa locations
  Clone ID: MRT4577_20339C.1.pep
FPFNQLAPLNPAXFLQQQIFLPFSELVPPSCVSFLTQQQLFPFYKQFGANPPTLLQLQQLLPFVQLVLTNPAASSQQHIIGGALF

SEQ ID NO: 282059 - protein, 57 aa, Zea mays
  Clone ID: MRT4577_2033C.1.pep
GPGETLTLATPACRAGLGLPASLSPPPRGPHERSGIRGPANSHTHDGRGPRADSARH

SEQ ID NO: 282060 - protein, 106 aa, Zea mays
  Clone ID: MRT4577_20340C.1.pep
LRHHLFPFSRLVFAYFHQQQLFPFNQLAALNPAAYLQQQIFLPFSQLVAATRASFLTQHQLLPFYQRFGANPAPLFQLHQLLPFVHLVLTNPAASSHQPIIGGALF

SEQ ID NO: 282061 - protein, 135 aa, Zea mays
  unsure (1)..(135): unsure at all Xaa locations
  Clone ID: MRT4577_20341C.1.pep
SSFGNLFPYYKQHXFFPFNQLFPLTPAVYLQQPLFPFSQVGTAYFHQQQFFPFNQLAALNPAVFLQQQIFLPFSQLVAATRVSFLTQQQLLPFSQRFGANPAPLLQLQQLLPFVHLVLTNPAASSQQHIIGGALF

SEQ ID NO: 282062 - protein, 136 aa, Zea mays
  Clone ID: MRT4577_20342C.1.pep
YYQQQHFFPFNQLFTLNPGGYLQQQLFPFSRVGFAYFHQQQFFPVNQWAALNPAVYLQQQIFFPFSQLAAASRVSFLTQQQLLPFYQRFGGNPATLLQLQQLLPFVQLVLTNPAASSQQHIIGGALLLDCFLVVIQ

SEQ ID NO: 282063 - protein, 147 aa, Zea mays
  Clone ID: MRT4577_20343C.1.pep
QLQQLVLPVINQVVLANLFPYYQQQQFFPFNHLFPLNPAVYLQQQLFPFSQLGIAYFHQQQFFPFNQLAALNPAVFLQQQIFLPFSQLVAASRVSFLTQQQLLPFYQQFGANPAPLFQLQQLLPFVQLVLTNPAASSQQPIIGGALF

SEQ ID NO: 282064 - protein, 45 aa, Zea mays
  Clone ID: MRT4577_20344C.1.pep
QHPIMTISTISTKLMGKTTAGQTPAETLIPQRSTGRAPRIYKTTG

SEQ ID NO: 282065 - protein, 82 aa, Zea mays
  unsure (1)..(82): unsure at all Xaa locations
  Clone ID: MRT4577_20345C.1.pep
PCQGHLVGQWERLSKLGKTCSKQSLRWXMEDHCHHNDRQQQCPLPETPWTTQPFGQKFPPPKAWVIKKKTHLNQTVCPYQIP

SEQ ID NO: 282066 - protein, 87 aa, Zea mays
  Clone ID: MRT4577_20346C.1.pep
DHGLKNLVFETSVKRNGNCVRPDDFFSLRLCQKEQVTPTILIVSQQISVCYRTQYISVQLIKSETLVRQKTKTTRPQVRGGRTGATG

SEQ ID NO: 282067 - protein, 95 aa, Zea mays
  unsure (1)..(95): unsure at all Xaa locations
  Clone ID: MRT4577_20347C.1.pep
EVYSGARPLLETTMKIVVEGLFXDSFSSVIHENXTSDFRLLDANGFCQLMLELEYCETVLHTYFSPEAQHAMKSLHENLLEKACESVAEAMENPG

SEQ ID NO: 282068 - protein, 112 aa, Zea mays
  Clone ID: MRT4577_20348C.1.pep
MKFVAAYLLAVLAGNASPSAEDLTAILESVGCEVDNERMELLLSQLSGKDITELIAAGREKFASVPCGGGGVAVAAASPAAGGAAPTAEAKKEEKVEEKEESDDDMGFSLFD

SEQ ID NO: 282069 - protein, 112 aa, Zea mays
  Clone ID: MRT4577_20349C.1.pep
MKVVAAYLLAVLAGNASPSAEDLTGILESVGCEVDNERMELLLSQLSGKDITELIAAGREKFASVPCGGGGVAVAAGAPAAGGAAPAAEAKKEEKVEEKEESDDDMGFSLFD

SEQ ID NO: 282070 - protein, 37 aa, Zea mays
  Clone ID: MRT4577_2034C.1.pep
YIFSKISLILNHLTLFTYPKPISFYPPNLITQLTKHP

SEQ ID NO: 282071 - protein, 96 aa, Zea mays
  Clone ID: MRT4577_20350C.1.pep
MTDAFRKDTHTKLGESLQPQSTKSTGTKIKESLTGTADKVAREAQPDSSKTHTQSTMDKLGRSKDNNVHGSTGGSIVDKTKNALGLGHHGNTHSGL

SEQ ID NO: 282072 - protein, 129 aa, Zea mays
  Clone ID: MRT4577_20351C.1.pep
TCRHSSRTRWSDLDSYRLIRSCCSCRIMFLQSPFYRIGGMCSAAVLYASSRTRATRRLRQGVTHRLHAYPQEDLCTAIDVAADVLFRGISGAICLGVNDWGDLRRSDDRVHIWPDVGRRARGREDRRWR

SEQ ID NO: 282073 - protein, 109 aa, Zea mays
  Clone ID: MRT4577_20352C.1.pep
KVVMYFSSIWWRIWLIEPVVKEACGGLLVHQYHESLIISRRKPSYDKGNTTLVEEFPSAPCPVLGNAISARAPPSAAPPPKPLLAGDGGGGMGLDATSPRRRRRRCYGD

SEQ ID NO: 282074 - protein, 112 aa, Zea mays; identical to SEQ ID NO: 282069
  Clone ID: MRT4577_20353C.1.pep

SEQ ID NO: 282075 - protein, 112 aa, Zea mays; identical to SEQ ID NO: 282069
  Clone ID: MRT4577_20354C.1.pep

SEQ ID NO: 282076 - protein, 163 aa, Zea mays
  Clone ID: MRT4577_20355C.1.pep
KSLGRNPLSDAPYQNPGMVLNEQGPGRHPLSDAPSLDLEPVISEQGSGRRILSGALHRRPGVVENEQGSLHLPRRVRRVRKLVEPARVRVGSWNVGSLTVKLREIVDVAVRRRVNILCVQETKWKGQKAKEVEGTGFKLWYTGTAANKNGVRRLDRQEALKMG

SEQ ID NO: 282077 - protein, 112 aa, Zea mays; identical to SEQ ID NO: 282068
  Clone ID: MRT4577_20356C.1.pep

SEQ ID NO: 282078 - protein, 44 aa, Zea mays
  Clone ID: MRT4577_20357C.1.pep
CVAVLVSLRCGYFWLILELERRLVVDPQWRNKLALVVKREMVKL

SEQ ID NO: 282079 - protein, 117 aa, Zea mays
  Clone ID: MRT4577_20358C.1.pep
MLGNGMKFVAAYLLAVLAGNASPSADDLTAILESVGCEVDNEKMELLLSQLSGKDITELIAAGREKFASVPCGGGGVAVAAAAPAAGGAAPAAEAKKEEKVEEKEESDDDMGFSLFD

SEQ ID NO: 282080 - protein, 104 aa, Zea mays
  unsure (1)..(104): unsure at all Xaa locations
  Clone ID: MRT4577_20359C.1.pep
MAAADVEYRXFVGGLAWATINESGENALVFYGERLDLEVINHPDTVRVHPHRHGRLQVHLSMLDAIENMNGKELDGRNITVNQAQSRGGGGGGSRGGYSGGRRG

SEQ ID NO: 282081 - protein, 98 aa, Zea mays
  Clone ID: MRT4577_2035C.1.pep
HVSSLHGSRGQRRPELERPHAMVGAEHSRGRCCAALTPARWAPKVEAERGLYGAVHAMEMEQGLGAEYHVRRWPVQEKLVVRCQRSTQHQSGYRSPAG

SEQ ID NO: 282082 - protein, 61 aa, Zea mays
  unsure (1)..(61): unsure at all Xaa locations
  Clone ID: MRT4577_20360C.1.pep
LGMRRKRGWRCWVKRGNAXXRRQVEQVGCVLREVRGGGRSKSQVHRNHLRGEQLWQMGRLS

SEQ ID NO: 282083 - protein, 67 aa, Zea mays
  Clone ID: MRT4577_20361C.1.pep
ECFKLHTGPKATPLLLVTETMPRVSVSSPPSPIVGKIKKQKNRGNQIKPGWGLVIPSPGREKKNPPK

SEQ ID NO: 282084 - protein, 141 aa, Zea mays
  unsure (1)..(141): unsure at all Xaa locations
  Clone ID: MRT4577_20362C.1.pep
PVVPGVAPPKKAAPXFVKAAAGSGKAAPGCSCGGNCKFVPCCLLFTSIAAPGFASFLFGLWWWLPNNKRGRPGCPPSVLFGVCPFFAPGVPPFAPPLCLFGARLCALVRPCAPPPLCFPLCLSFPPFFFGPPSFFFFLYIN

SEQ ID NO: 282085 - protein, 282 aa, Zea mays
  Clone ID: MRT4577_20363C.1.pep
MARHAGTALLDLVAGQVDPGAPGFWRDFLVGMLKPAAATAVVAMAVGLSFSQRLGLEGEMLYAIARAFLQLSAIGFVLQFIFAQKNALWILLAYLFMVTVAGYTAGQRAGQVPRGKRIACVSILVGTGVTMLLLVLLDVFPFTPRYIIPVAGMMVGNAMTVTGVTMKKLREDVKIQRNLVETALALGATPRQATLQQVKRSLVIALSPVIDSAKTVGLIALPGAMTGLIMGGASPLEAIQLQIVVMNMLMGASTVSSILSTYLCWPAFFTKAFQLDDRVFAD

SEQ ID NO: 282086 - protein, 129 aa, Zea mays
  Clone ID: MRT4577_20364C.1.pep
VAPTPQRPGQTRQVIDTQYDKTTLEELNRRFANQSVESDSDSDYDSDEGSDVPSLTSRSTNSSSPSSVSSGSSCCTCERFGITRSGDRVKLDCGGARCGYSDDSSDCSSEDEYVYEEKTTRRQGIVVRS

SEQ ID NO: 282087 - protein, 55 aa, Zea mays
  Clone ID: MRT4577_20365C.1.pep
EPFYYRTWPAPYSYNTTTEDTLPWPKAAHILLVQHMFPLPGRQFNPADHTLPPYT

SEQ ID NO: 282088 - protein, 175 aa, Zea mays
  unsure (1)..(175): unsure at all Xaa locations
  Clone ID: MRT4577_20366C.1.pep
MRPQLQLMCVVIFIGTNGQTYFITASLVTSIQNFPKSRGPTVGILKGFMGLTSAILTQVYTVMHTPDHAALIFMVAVGPSLVAIGLMFVIRPVGGHRQIRPSDKNSFMFIYTVCLLLASYLVGAMLIQDFLXTSYDVVGFLTVILFVLLISQSHPCDCVVHAEKAQHLMEMLSYL

SEQ ID NO: 282089 - protein, 244 aa, Zea mays
  unsure (1)..(244): unsure at all Xaa locations
  Clone ID: MRT4577_20367C.1.pep
PIPVASVCCDPAPLRLHHLSRLSPPPRLQLHPRWFRAAAGRVTSAAVGFRRASVCGQRARPPPPPHQPWRSPCLPLYXRSMCVVIFIGTNGQTYFITASLVTSIQNFPKSRGPTVGILKGFMGLTSAILTQVYTVMHTPDHAALIFMVAVGPSLVAIGLMFVIRPVGGHRQIRPSDKNSFMFIYTVCLLLASYLVGAMLIQDFLQPSYDVGXVFXTVILFVLLISPIAFPVIGSFMPEKAQHLM

SEQ ID NO: 282090 - protein, 481 aa, Zea mays
  Clone ID: MRT4577_20368C.1.pep
MCVVIFIGTNGQTYFITASLVTSIQNFPKSRGPTVGILKGFMGLTSAILTQVYTVMHTPDHAALIFMVAVGPSLVAIGLMFVIRPVGGHRQIRPSDKNSFMFIYTVCLLLASYLVGAMLIQDFLQPSYDVVVFLTVILFVLLISPIAIPVIVSFMPEKAQHLMEDALLSEPLTGEASSSRQKEDQPEVILSEVEEEKSKETDSLPPSERRKRIAELQAKLVEAAARGGVRIKRRPHRGDNFTLMQALVKADFWLIWLSLLLGSGSGLTVIDNLGQMSQAIGYKNAHIFVSLVSIWNFLGRVGGGYFSEIIVRERTYPRHIALAVAQIVMAAGHFLFAMAWPGTMYIASLLVGLGYGAHWAIVPAAVSELFGVKHFGAMYNFLILANPAGSLIFSELIVSNLYEHEAEKQASQHQMSALLSPRLLRDTGFLADDALKCEGPACFFFSSLIMSVFCAVAAGLSLLVVQRTRQVYPRLYSSVRT

SEQ ID NO: 282091 - protein, 112 aa, Zea mays
  unsure (1)..(112): unsure at all Xaa locations
  Clone ID: MRT4577_20369C.1.pep
MALQYVEAQRQARPDLADWYASLADLYQQKLWHQLTLKLDQFLQLQAAQTGDTIIQLYNNFITDFETKINLLKLAHFAXVIASRQFPDXVAAITFLEGXITKLRDTRESRIN

SEQ ID NO: 282092 - protein, 42 aa, Zea mays
  Clone ID: MRT4577_2036C.1.pep
SRQQTEWRFSLWSFGDSFFGKLSAARRSCLLSRGAVVLLAHP

SEQ ID NO: 282093 - protein, 75 aa, Zea mays
  Clone ID: MRT4577_20370C.1.pep
PQSLHPPPDSSSFSTLNTSTGKQHPSTNLDASPSSCGTHQFFVRCLWSREIKVFSLSTGMDPAASRHLESPLQLR

SEQ ID NO: 282094 - protein, 58 aa, Zea mays
  Clone ID: MRT4577_20371C.1.pep
KTTQQEMGELKCKPVVHNERAILDELGRAHCQMNRRGICLADMINDIKQCAERGGLSM

SEQ ID NO: 282095 - protein, 385 aa, Zea mays
  Clone ID: MRT4577_20372C.1.pep
MALQYVEAQRQARPDLADWYASLADLYQQKLWHQLTLKLDQFLQLQAAQTGDTIIQLYNNFITDFETKINLLKLAHFAVIASRQYPDKDAAITFLEGVITKLRDTRESRINEPILYVKMQIAAINLEKGNQKECKNSLEDGKTTLDSMTDVDPTVHASFYWISSQYHKSCQEFAEFYKNALLYLAYTTVESLSESFKLDLAFDLSLAALLGDNIYNFGELLAHPIINSLIGTKVEWVYHMLQAFNTGNLAFYQELCRVHNAALTAQPALVQDERKLLEKINILCLMEIIFSRPSEDRTIPLSVIAEQTKLSISDVEYLLMKSLSVHLIEGIIDEVDSTVHVSWVQPRVLGIPQVKALRDRLDAWVGKVHTTLLSVEAETPDLVAA

SEQ ID NO: 282096 - protein, 385 aa, Zea mays
  Clone ID: MRT4577_20373C.1.pep
MALQYVEAQRQLRPDLSDWYASLADLYQRKLWHQLTLKLDQFLQLQVAQTGDTIIQLYNNFIVDFETKINLLKLAHFAVITSRQYPDKDAAITFLEGVITKLRETRESRINEPILYVKMQIAAINLEKGNKKECKNLLEDGKTTLDSMTDVDPTVHASFYWISSQYHKACQEFAEFYKNALLYLAYTTVESLSESFKLDLAFDLSLAALLGDNIYNFGELLAHPIINSLIGTKVEWVYHMLQAFNTGNLAFYQELCRVHNAALTAQPALVQDERKLLEKINILCLMEIIFSRPSEDRTIPLSVIAEQTKLSISDVEYLLMKSLSVHLIEGIIDEVDSTVHVSWVQPRVLGIPQVKALRDRLDAWVGKVHTTLLSVEAETPDLVAA

SEQ ID NO: 282097 - protein, 58 aa, Zea mays
  Clone ID: MRT4577_20374C.1.pep
PGGGVYGDGPRNAGYGAGEGYAVRLKGGVAVYENGGDYPGRQKGVGEDYVGGGGALRN

SEQ ID NO: 282098 - protein, 62 aa, Zea mays
  unsure (1)..(62): unsure at all Xaa locations
  Clone ID: MRT4577_20375C.1.pep
SRRQHAAPPPLPTXGHASRTTAVTTTTTTTTTCWLRSDERVAHTGRRSTIYFYLLGCSCHML

SEQ ID NO: 282099 - protein, 143 aa, Zea mays
  unsure (1)..(143): unsure at all Xaa locations
  Clone ID: MRT4577_20376C.1.pep
MARSSKXMVAEALLALALAGITGEARNMTTTTTXKKDNAVVQPETFPTFDRLPXGPSPPFGXLPERSISGXSSFPGSACPXIGSSLPRFSLSGRSSMPLFGGGSPYFSMLLWMPGSSTAGCCPEHASKPCKPTSMVVRRSYCY

SEQ ID NO: 282100 - protein, 56 aa, Zea mays
  unsure (1)..(56): unsure at all Xaa locations
  Clone ID: MRT4577_20377C.1.pep
DHRRTLMIXTAXQVAAAPDXAXPPARTRTSTKPRTRRRTSSMATTAHRRVCPSCRI

SEQ ID NO: 282101 - protein, 69 aa, Zea mays
  Clone ID: MRT4577_20378C.1.pep
MASPSSSSSSALVVLAVVLAAAEACSATRPVPARQRAVAVEEEGETAGPPARGHGAEPGDGALRDREPL

SEQ ID NO: 282102 - protein, 51 aa, Zea mays
  Clone ID: MRT4577_20379C.1.pep
YALAQAIGFPQPTGKCSLPMSTQPFFGRAGSWMCINSDRLCSNRVVDFFHK

SEQ ID NO: 282103 - protein, 100 aa, Zea mays
  Clone ID: MRT4577_2037C.1.pep
GEGSCLGPTSPLQGSRVCMKVPGGRSIDARVQLKEQREHARRDPWAGQHLGDHCSDGSCDRPIKTSTPSDLDRSGDDRGRGQNMGAAPPPLFSSAFPPSL

SEQ ID NO: 282104 - protein, 67 aa, Zea mays
  Clone ID: MRT4577_20380C.1.pep
LCLMGLVLLAFNKCQRCMSSIQNYEKIKGTPNPHKGMHDMITIDAFTDTKPDPHASLEQTNMRLVIA

SEQ ID NO: 282105 - protein, 88 aa, Zea mays
  Clone ID: MRT4577_20381C.1.pep
PPDLELDRRPPPREGWVSHGSEAPAHALAGSRRRGAGAAGAGTAHGTGASTGPRRAWEALGTGSKSAAPRFVRFSARHERDREQRGRG

SEQ ID NO: 282106 - protein, 125 aa, Zea mays
  Clone ID: MRT4577_20382C.1.pep
LCIPTSTKSYGVAFHSYQLGSAKISTAPRPPFSITKRTTASTQGDNDGVMCAAAMDVCLHHPLGPSVGSGGIHPILADVFMASSGGLDSLHQLNCSPPCQLRREAAACRGPARPYFDRGTRFQVT

SEQ ID NO: 282107 - protein, 61 aa, Zea mays
  Clone ID: MRT4577_20383C.1.pep
RSSRRITPRTRCSTTTASDLQARDRSAGRGPDRQWPLDLRPARHHHNARGAAPAPEEQGNL

SEQ ID NO: 282108 - protein, 188 aa, Zea mays
  Clone ID: MRT4577_20384C.1.pep
MWSAAWMYYVVANSFIAALYADYMEAVNVPGWYCGPNFMTTNDLREFARSQINYILGDNPKKMSYVVGFGSKYPRHVHHRGASTPHNGVKYSCTGGYKWRDSKKADPNLLGGAMVGGPDKNDGFKDSRNTFGQNEPTLVGNAGLVAALVALTSSGRGVGVTAVDKNTMFSAVPPMFPAAPPPPSSWKP

SEQ ID NO: 282109 - protein, 154 aa, Zea mays
  unsure (1)..(154): unsure at all Xaa locations
  Clone ID: MRT4577_20385C.1.pep
PNFMTTNDXLREFARSQINYILGDNPKKMSYVVGXGSKYPRHVHHRGASTPHNGVKYSCTGGYKWRDSKKADPNLLGGAMVGGPDKNDGFKDSRNTFGQNEPTLVGNAGLVAALVALTSSGRGVGVTAVDKNTMFSAVPPMFPAAPPPPSSWKP

SEQ ID NO: 282110 - protein, 85 aa, Zea mays
  Clone ID: MRT4577_20386C.1.pep
EFLALMHGIGVMDILINISLIFRNTNRTRPTTRQPTSSSIPVHSSMPCGGKVGGSGERSNRVQRRNPCCHQRQLDQHHFVCYLLG

SEQ ID NO: 282111 - protein, 28 aa, Zea mays
  Clone ID: MRT4577_20387C.1.pep
TAVDKNTMFSAVPPMFPAAPPPPSSWKP

SEQ ID NO: 282112 - protein, 120 aa, Zea mays
  unsure (1)..(120): unsure at all Xaa locations
  Clone ID: MRT4577_20388C.1.pep
FSPPEKSPRHLFFFPPPIKCVGPKFPMEGGDPXKGVPTPIGPPPPPXPPXVWPPKRGGGPFLTPPRSPDLFSPPRKRAPPFFFRGLAIRPVPPPEKNGGRLGTRPPDFKXGLPPPPPPGY

SEQ ID NO: 282113 - protein, 625 aa, Zea mays
  unsure (1)..(625): unsure at all Xaa locations
  Clone ID: MRT4577_20389C.1.pep
MYSANHWGGSFEIADGAAEDDHSRNMDLDRGALSARQHHELDETQQSWLLGPPEAKKKDKYVDLGCVVVKRKLLWWALWCVVAAFVLIGLPIIIAKSIPHKKPGPPPPDQYTEALHKALLFFNAQKSGHLPKNNGIKWRGNSGLSDGSDAKDVKGGLVGGYYDAGDNIKFHFPMAFSMTLLSWSVIEYSAKYKAMGEYDHVRELIKWGTDYLLLTFNSSASTIDKLYAQVGAAKINGSRPDDHYCWNRPEDMAYPRPSLSVSSAPDLGXGEVAAALAAASIVFRDNAAYSKKLSQGAATVYKFARQSGRRTPYSLRQPDIEYYYNSTSYWDEYMWSAGWMYYATGHSSYITFRTDPRLPKNAKAFFSILDFSVFSWDNKLPGAQLLLSRLRMFLNPGYPYEESLAGYHNATSLNMCMYFPRFAAFNFTKGGMALFNHGRGQPLQYVVANSFIAALYADYMEAVNVPGWYCGPNFMTTNDLREFARSQVNYILGXDNPKKMSYVVGFGSKYPRHVHHRGASTPHNGVKYSCTGGYKWRDSKKADPNLLAGAMVGGPDKNDGFKDSRNTFGQNEPTLVGNAGLVAALVALTNSGRGAGVTTVDKNTMFSAVPPMFPATPPPPSSWKP

SEQ ID NO: 282114 - protein, 133 aa, Zea mays
  Clone ID: MRT4577_2038C.1.pep
STLSGLGGPGTSSASFSCTGHRLTWYSAPSPCSISMAWTAPYRPRSASTFGAQRAGVRAAQHLPLACSAPAMACGRSSSALLWPLLPWYEPLFHGAPHHRVLVPCEGREKSGVYSWLACGSGHQFRPNCAPAC

SEQ ID NO: 282115 - protein, 56 aa, Zea mays
  unsure (1)..(56): unsure at all Xaa locations
  Clone ID: MRT4577_20390C.1.pep
RRLRHPXIILFMKRCDFTSTSVXCNRVSRTRNTSXSDKRRRVHMALDVARGVHYLH

SEQ ID NO: 282116 - protein, 72 aa, Zea mays
  Clone ID: MRT4577_20391C.1.pep
VKTNQGWPDGDAVDLLLTQIPSLLTQTKTFHWYVHTNAWESVMPCCYTFIICYKSDARRTYLSILSRLRACL

SEQ ID NO: 282117 - protein, 66 aa, Zea mays
  Clone ID: MRT4577_20392C.1.pep
IHNLSFLLATDSMFFSITPQKGETKQKIVPIKNAPSARGKHSPNLIVPVPGKWPQGDIPSSPILCK

SEQ ID NO: 282118 - protein, 96 aa, Zea mays
  Clone ID: MRT4577_20393C.1.pep
RPLRLSTMRTRITKGLVHRPSTFRWWAPAIARALSLSFFCPVQWALYINKYKCDQCLVTRFVLFCFFFLPKFVHLYLPVFTGRLWLCPRTNDRLRL

SEQ ID NO: 282119 - protein, 73 aa, Zea mays
  Clone ID: MRT4577_20394C.1.pep
IPTVGAALMYGGVASSLINCYYNKLLDLFYPIVMNHVLWLHGYNFFMECESKHSTSIGVRELWFVLVHNTRFI

SEQ ID NO: 282120 - protein, 50 aa, Zea mays
  Clone ID: MRT4577_20395C.1.pep
PNDSPGNVIALWLFLSPVVTFWRVIRKRSTEDFSGVPYNMTLLNCLLSAW

SEQ ID NO: 282121 - protein, 461 aa, Zea mays
  Clone ID: MRT4577_20396C.1.pep
MEKAVDRQRVLLRHLNPAAAASPAPHAISASACAAGDSAAYHRRPAFADDVVIVAAYRTAICKAKRGGFKDTFAEDLLVPVFKALVDKTKLDPSEVGDIVVGTVLAPGSQRAIECRMAALYAGFPDTVPLKTVNRQCSSGLQAVADVATAIKAGLYDIGIAAGLESMTVNKVSLDGQANPKVELFSQARDCLLPMGLTSENVAHRFGITRLEQDQAAVESHRKAAAAAAAGKFKEEIVPVHTKIVDPKTGEEKKIVISADDGIRVDTSLAVLSKLKPAFSKDGSTTAGNASQVSDGAGAVLLMRRDVAMKKGLPVLGVFRTFAAVGVDPAVMGIGPAVAIPAAVKAAGLQMDDIDLFEINEAFASQYVYCCKKLELDPAKVNVNGGAMALGHPLGATGARCVSTLLNEMKRRGKDCRFGVISMCIGSGMGAAAVFERGDGVDELTNARGISTHNWLSKDAM

SEQ ID NO: 282122 - protein, 76 aa, Zea mays
  Clone ID: MRT4577_20397C.1.pep
LFRLDCRISRVKNGELCEREIDQGRLSRSFCLPCVRYVCSILSGQESVGGSVIGAYTHQCIYNWEEDRRRYVLFII

SEQ ID NO: 282123 - protein, 328 aa, Zea mays
  unsure (1)..(328): unsure at all Xaa locations
  Clone ID: MRT4577_20398C.1.pep
ERTSCFPRSSELFSQARDCLLPMGLTSENVAHRFGITRLEQDQAAVESHRKAAAAAAAGKFKEEIVPVHTKXCRLIYLCKVTMLAIDDFQHIKRXFSYELYANTMLLYXIVDPKTGEEKKIVVSADDGIRVDTSLAVLSKLKPAFSKDGSTTAGNASQVSDGXAGAVLLMRRDVAMKKGLPVLGVFRTFAAVGVDPAVMGIGPAVAIPAAVKAAGLQMDDIDLFEINEAFASQYVYCCKKLELDPAKVNVNGGAMALGHPLGATGARCVSTFLNEMKRRGKDCRFGVISMCIGSGMGAAAVFERGDGVDELTNARGISTHNWLSKDAM

SEQ ID NO: 282124 - protein, 64 aa, Zea mays
  unsure (1)..(64): unsure at all Xaa locations
  Clone ID: MRT4577_20399C.1.pep
KNPSNWGAFKHPFKGPNWPXKGSRIKINGPSXLKRRDWKNPGLPKLNRFEGNPPLKNWRKNKKA

SEQ ID NO: 282125 - protein, 172 aa, Zea mays
  unsure (1)..(172): unsure at all Xaa locations
  Clone ID: MRT4577_2039C.1.pep
PLSFPFWYPEKKKSGFLLIFCRSSIISSICSHFALHFDTFWAGLQKYSLHTRRPXRRRWRSRAAAPAXAPPTAPQFVVVGGIWVPPPEYAAAAAAHPQQVHVHLADDASGTTTTAADKVYAPVATTLTPAPRPRPRPGPERQSSSCSGARRNGDACSGSPAVSSSSSQTASA

SEQ ID NO: 282126 - protein, 618 aa, Zea mays
  unsure (1)..(618): unsure at all Xaa locations
  Clone ID: MRT4577_203C.1.pep
HASEQTKAPSDVIPTCNGRNCGDTWPGPMNKSMPLLWTENWTAQYRVFGDPPSQRSAEDIAFAVARFFSVGGTLTNYYMYHGGTNFXGRTSAAFVXPKYYDEAPLDEFGLCKEARWGHLRDLHLALKLCKKALLWGKTSTEKLGKQFEARVFEIPEQKVCVAFLSNHNTKDDVTLTFRGQSYFVPRHSISILADCKTVVFGTQHVNAQHNQRTFHFADQTTQNNVWQMFDEEKVPKYKQSKIRLRKAGDLYNLTKDKTDYVWYTSSFKLEADDMPIRRDIKTVLEVNSHGHASVAFVNTKFVGCGHGTKMNKAFTLEKPMDLKKGVNHVAVLASTMGMMDSGAYMEHRLAGVDRVQITGLNAGTLDLTNNGWGHIVGLVGEQKQIYTDKGMGSVTWKPAVNDRPLTWYKRHFDMPSGEDPVVLDMSTMGKGMMFVNGQGIGRYWISYKHALGRPSQQLYHIPRSFLRQKDNVLVLFEEEFGRPDAIMILTVKRDNICTFISERNPAHIKSWERKDSQITVTAADLKPRATLTCSPKKLIQQVVFASYGNPMGICGNYTIGSCHTPRAKELVEKACLGKRICTLPVSADVYGGDVNCPGTTATLAVQAKCSKRSPRAAQ

SEQ ID NO: 282127 - protein, 57 aa, Zea mays
  Clone ID: MRT4577_20400C.1.pep
KRRKTNGWYGVAFIHLKKDLFFGKFFFLGGGFKIPNFWCLSRCFLGKITRFPGVFPP

SEQ ID NO: 282128 - protein, 64 aa, Zea mays
  Clone ID: MRT4577_20401C.1.pep
LLDSTSLQISQRVRPARSISGWQAQQRDFSRGAADVRLLMQIKVANDDVAIWETNLTLMGAARG

SEQ ID NO: 282129 - protein, 74 aa, Zea mays
  Clone ID: MRT4577_20402C.1.pep
FEIHMIVHVIWNMDDTLGQRPMSPCCSVVIVYSFLHIEPISVNSLPEDCKLSWRAGLLLFNVNVLLDRTMCFHL

SEQ ID NO: 282130 - protein, 99 aa, Zea mays
  Clone ID: MRT4577_20403C.1.pep
IGVGIFLWELGPPEKALEQNRVDQILKNTKSQGGLSQITRTPLTKERSCNPFSSNNHKTRPPPKGGTNPRLKKNGAHASRDTWANPRAKRWGHPEIPDR

SEQ ID NO: 282131 - protein, 162 aa, Zea mays
  Clone ID: MRT4577_20404C.1.pep
PRGRPGLSSPRFAHSLQPLHRAATATARMPFKRFVEIGRVALVNYGKDYGRLVVIVDVVDQNRALVDAPDMVRCQVNFKRLSLTDIKIDIKRVPKKTTLIKAMEEADVKTKWENSSWGKKLIVQKRRASLNDFDRFKVMLAKIKRGGAIRQELAKLKKASTA

SEQ ID NO: 282132 - protein, 40 aa, Zea mays
  Clone ID: MRT4577_20405C.1.pep
LSKKLGPVAFFIVSKLFHLSRKTRNRPYKPPFFGPCNTND

SEQ ID NO: 282133 - protein, 203 aa, Zea mays
  unsure (1)..(203): unsure at all Xaa locations
  Clone ID: MRT4577_20406C.1.pep
GTLEAGRDLPLRFAHTLQPLHRAATATARMPFKRFVEIGRVALVNYGKDYGRLVVIVDVVDQNRALVDAPDMVRCQVNFKRLSLTDIKIDIKRVPKKTTLIKAMEXLVTIELMLWTSLAPPHFIHLLYSRXAXENGDTYLISCYSFXDVKTKWENSSWGKKLIVQKRRASLNDFDRFKVMLAKIKRGGAIRQELAKLKKASTA

SEQ ID NO: 282134 - protein, 87 aa, Zea mays
  Clone ID: MRT4577_20407C.1.pep
RSLMYLLVVSFDTKFIGGRLNLVVCWVFRRENSNLSLSLSLSLYILNIMSHVLSITKESSGQTVSSSRARPGPGVYKRRPGVLEFSF

SEQ ID NO: 282135 - protein, 41 aa, Zea mays
  unsure (1)..(41): unsure at all Xaa locations
  Clone ID: MRT4577_20408C.1.pep
IDFVPALARLDLQGVXANFGASTASSTASSPICWSSTPRLP

SEQ ID NO: 282136 - protein, 49 aa, Zea mays
  unsure (1)..(49): unsure at all Xaa locations
  Clone ID: MRT4577_20409C.1.pep
QCHSQRPDRLGYPSHFGXKVHTLECLRCRCICIRYTECTPCTANLHHIT

SEQ ID NO: 282137 - protein, 88 aa, Zea mays
  Clone ID: MRT4577_2040C.1.pep
SGFKLILYTVICAGRVQGLCLRAQHRSLRLEEPGLCSYIPCVQLATLPYLTDIFVSITIHGRSSVIENWEWCSRLLLFFAQKCVLKLL

SEQ ID NO: 282138 - protein, 68 aa, Zea mays
  Clone ID: MRT4577_20410C.1.pep
AQILQVLQWKHDNLQEKDSRIINRASEERWIQQNYSVAHAKSFHTQSMKILSNIESCRHKVVHIINRP

SEQ ID NO: 282139 - protein, 74 aa, Zea mays
  Clone ID: MRT4577_20411C.1.pep
GPWRGPLNLVSSDLEAPLVGRHCSTACCFFVLELQRGYPGRPVARLDSLLLPCRLPHHAPALCHPALSGDRLYS

SEQ ID NO: 282140 - protein, 94 aa, Zea mays
  Clone ID: MRT4577_20412C.1.pep
GKQTQFVFMTCGTTQVQKLQALGKFFVQCPDRGKNWAGKGKKVKKKFFGKTGGHTNGAFGLKPKFWGWKVDKSPRAGAGAPANGLQAAHFTWQG

SEQ ID NO: 282141 - protein, 59 aa, Zea mays
  unsure (1)..(59): unsure at all Xaa locations
  Clone ID: MRT4577_20413C.1.pep
HRRASRDRSAKYKFSRERASREESWESGRXERGPPDWRLESSNGKMASRRSEEKEAGEI

SEQ ID NO: 282142 - protein, 221 aa, Zea mays
  Clone ID: MRT4577_20414C.1.pep
MASHLDFRYLDEGLGGERGKRKRREEEADAADSMDLDADAPRSSKLRAVASQSDPSKPAAFGSPTYDGVIAGRVSGRTWKEPRTRRSSALMVSRKPVPLEQRARDKSLKKAYQARVAELKDEIRQNKVAKRKQKEEREKRKKENVLRTGSKLQKVTNPKTIQKIAKSKNRGQAQGSSPTTSSAARSPRPPAACRCPAWRTESQLIFAICNANFCSNAFQLL

SEQ ID NO: 282143 - protein, 73 aa, Zea mays
  Clone ID: MRT4577_20415C.1.pep
LIYGWIANLFTLTVTKQTSPDYKTLKTRTKWKKKQDQRAQNRSITCTLVEVETDSHSKGAQVHKIPGTLFFSY

SEQ ID NO: 282144 - protein, 403 aa, Zea mays
  unsure (1)..(403): unsure at all Xaa locations
  Clone ID: MRT4577_20416C.1.pep
FDGPDEKNFSNPFEVTNHWWASRWVYHLSSVDGGSSFDGPDDNSLDMSESDGHTRKDSKSFSREIPIFLSYATPDEFLESMIKADAPLNVKYLRTLVQCLSMLGKVAAAGAVICQRVRPTIHDVITSKIKACSEDASKSSMGKAAKTNDVLHSNGPTPRFQMFTQKXQGASVMAAQLVVSPISPTMAPTGDAQRAATQLLRSIFECLVEILENHIIVGELLEQKSSEVDNVNTPHIANGDASWNPDSESFQATGGFSVAFSLSVVQSECQQLLCEILRATPEAATADAAVQTARLANKDPVKEKRDGSEGLSFAFRITDAATPASNEGQGWRRNSNVPQEGYGTASVIPDQGIFLAASVYRPVFEFMNKIGXMLPQKYSQLSDGLLAFVNNFLKEHFLPAIFV

SEQ ID NO: 282145 - protein, 213 aa, Zea mays
  Clone ID: MRT4577_20417C.1.pep
VNAPIRHKCLSIIGKLMYYSSAETIQSLLGTTNISSFLAGILAWKDPQVLIPALQIAEIMMEKLPETFSMLFVREGVVHAVESLICSESSNKMPSQVPPQDKDKDSAMPSRSRRQRRRAGAVAAENSSLDESNSSNLGVMCSTATASEAPNTSLRFTVSDHAKSFKDKYFPADTDSSDIGFTDDLLKLRALCAKLNTVSENVKKKKKGRPLAI

SEQ ID NO: 282146 - protein, 630 aa, Zea mays
  Clone ID: MRT4577_20418C.1.pep
GRASPTMAPTGDAQRAATQLLRSTGECLVEILENHIIVGELLEQKSTSEVDNVNTPHIANGDASWNPDSESFQATGGFSVAFSLSVVQSECQQLLCEILRATPEAATADAAVQTARLANKDPVKEKRDGSEGLSFAFRITDAATPASNEGQGWRRNSNVPQEGYGTASVIPDQGIFLAASVYRPVFEFMNKIGLMLPQKYSQLGSDGLLAFVNNFLKEHFLPAIFVDYRKCVQQAISSPAAFRPRVHATSAYSSSVELGRPVLQGLLAIDIIAKEVLGWVQLMPNYATELVEYVRTFLERAHERCRASYMEAVLEKQSYILLSRNDIESLMRLEPANISLQNSTGEHDNNATGAEAVEVEIELSDLLLDMCPIKQENLIHDDQKLILLASLSDSLEYLADSVERLGESFISPPTTSESINHSHGRHARSSSAIPKSLASLANEYRRLAVDCVRVLRLEMQLEAIYHMQEMTKREYVEDQDAEDPDDFIISLTTQIARRDEEMAPYITESERNYIFGGISSVAANASIKALAQMKSINLLGVQQICRNSIALEQALAAIPSIDSEAVQQRLDRVRTFYELLNLPFESLLGFIAEHEYLFSAKEYLSVLKVNVPGREIPADAERRISQILGH

SEQ ID NO: 282147 - protein, 90 aa, Zea mays
  Clone ID: MRT4577_20419C.1.pep
LGGAPPPLSLFFFPPFCLWNAFHPPHRGRGTFSPQGNPRLGLVLTALLTPFPIIVFKIWFPLRPVNLEPRAFFFPSVSWDGPYIKCPPSP

SEQ ID NO: 282148 - protein, 117 aa, Zea mays
  Clone ID: MRT4577_2041C.1.pep
KNLKKKKKKKKGKKKKKKKKKKEKEKKKKSLKKRGGRFGGPRFPSAGLQRHAFGLGSPNWGGGAPFFHRRAGETPGVPHLNRLAAHPLFPGWRFPKGARPDRLSHQCPTLIGKGAPP

SEQ ID NO: 282149 - protein, 42 aa, Zea mays
  Clone ID: MRT4577_20420C.1.pep
GRLDWWFPVWLSALAYIPLTHTEPDPSSARKIPARPAARYPS

SEQ ID NO: 282150 - protein, 83 aa, Zea mays
  Clone ID: MRT4577_20421C.1.pep
IWDSFKQRGVKNRPAPPPYSPPSGSFRVGQLSLAGSLYTFTTGNQSNLQGGNKDPHTRGPKAGGVICTGRAGPTLEKTGEGQR

SEQ ID NO: 282151 - protein, 83 aa, Zea mays
  unsure (1)..(83): unsure at all Xaa locations
  Clone ID: MRT4577_20422C.1.pep
MREGGAALALLALSASATYTHTNSRCGWQPPTAVHLPTAVHVSATXDLPATVHVSPTVHLPAAVHLPATVHVPAAVDLSAASK

SEQ ID NO: 282152 - protein, 112 aa, Zea mays
  unsure (1)..(112): unsure at all Xaa locations
  Clone ID: MRT4577_20423C.1.pep
MADHKEEPVPESEMDKITEKFHGGDSSSGGGDSHDDKKXSSLASAAEAMKAKVYRLFGRKRPVHCLLGGAKPADLIVWENMKISGGVLSGATVIWLLFEDRQSHLAPLVHHC

SEQ ID NO: 282153 - protein, 423 aa, Zea mays
  Clone ID: MRT4577_20424C.1.pep
MASRSSSAEGAGRTLPVNLKLITVLSIDGGGIRGIIPATILAFLEAKLQELDGPDARIADYFDVVAGTSTGGLLTAMLTAPDTNERPLFAAKDLARFYIQHSPKIFRQKNAMGSKLVGKLRMACGPKYDGKYLHAQLRRLLGNMRLDRTLTNVVIPTFDIAYMQPMIFSSFELKHRPSTNALLSDICMSTSAAPTYFPPHYFQTRDENGRRKAFNLVDGGIAANNPTLCAMGQVSKDIILADDDFFPVMPADYGKFMVISLGCGSNRNRRYCAKAAARWGVFSWLFKDGSAPIIDMFNSASADMVDIHLCVLFRALRSSENYLRIQYDQLTGSAGSIDDSSRKNMDRLVRIGNKLLDMNVSRVDMETGRNVEVPGAGTNAERLAKFARQLSDERRRRSQNELIMNSEQVFQIQHQAWYYGGDA

SEQ ID NO: 282154 - protein, 97 aa, Zea mays [sequence omitted]

SEQ ID NO: 282155 - protein, 85 aa, Zea mays
  Clone ID: MRT4577_20426C.1.pep
ANFFIIVFQKSGIDRAENFLPILSKGTMLGINDVHGAYILSPLSPRGSRQRKLKRKLAVLGLQSYLEPGGRRAKKNPKGKKNLPS

SEQ ID NO: 282156 - protein, 109 aa, Zea mays
  unsure (1)..(109): unsure at all Xaa locations
  Clone ID: MRT4577_20427C.1.pep
YIAYLYXKMDPIDDQEHIEINLTDSLQYTLQPLMDNLESYTYETFDKDADKYTQPENFPSTMFSEQDAQKVISCNDAAMKNVPNVPSMISFHIVLSILLKTMMISHNCS

SEQ ID NO: 282157 - protein, 48 aa, Zea mays
  Clone ID: MRT4577_20428C.1.pep
IVFFSDPFMYGFFPNIGQCIGWRGSWISQLCTLGSLFHSYKQQHVMLD

SEQ ID NO: 282158 - protein, 152 aa, Zea mays
  Clone ID: MRT4577_20429C.1.pep
TSIICQFPKHRSVGIATTSLRIATDVDGHYTGGPAIRIQGSKGEIQVTGPAYRPTEYKVIKSDANGNVEVVTCPIPTDPKRNNWGHGMFWEADECARCLRDGKKESASMPWSESIAIMEVMDSALKQGGVTYPELITTDVFDANSPLNTGRK

SEQ ID NO: 282159 - protein, 99 aa, Zea mays
  unsure (1)..(99): unsure at all Xaa locations
  Clone ID: MRT4577_2042C.1.pep
FPFNQLPPLTPPAYLHPQIPLPFSELPAASRASFLTQQQFSPFSKRFSAYPPPLFEPHQXFPFVPRDFSNPKAPYRMXILGGPPFSYIFKCWALTKFFL

SEQ ID NO: 282160 - protein, 87 aa, Zea mays
  Clone ID: MRT4577_20430C.1.pep
FHPRQGGRQVPRDELLENRTPQKKRPAPETSGGSGSSIWEKVLFFLKKRLGLVLAHVPSQMVLDFTHPHKARNFPPFWGASPWFTKE

SEQ ID NO: 282161 - protein, 63 aa, Zea mays
  Clone ID: MRT4577_20431C.1.pep
PDVSIQRTRHIGCHVRCLPPGCDTTIHRMATRGAKAFRAEYWLKHYTVLPLTVRWVKPLELPS

SEQ ID NO: 282162 - protein, 229 aa, Zea mays
  Clone ID: MRT4577_20432C.1.pep
GRDAPLSPSAPCAPRELAVPELHCIAPAPSASQLGRSSLLHIASGRARLRPLLVLLLLAHGSRFLYARAPCFPVQSSMVSGSLRALPSALPASCSPSSASSSYLPCRGTPLCAARRARPALGFHLPACVPVCARRAPTARSCVYSFLALVPARVELSCRALAPSNRLLAVCAVEVPSPCALTSAAADSAIKFASAPCLARFAVGNFSTFQICATWSRLVVELLNPSSLA

SEQ ID NO: 282163 - protein, 256 aa, Zea mays
  Clone ID: MRT4577_20433C.1.pep
MVDEAWERAVEAALHAGGEGSSSPARSLTLDGAVKCTHGRLPAAEILERHQSLEHLSIAGVGVTSLEGFPRLRNLTRLTLSDNRIAGGLDHLVAAGLSSLLLAHGSRFLYARAPCFPVQSSMVSGSLRALPSALPASCSPSSASSSYLPCRGTLLRAARRARPALGFHLPACVPVCARRAPTASYARSCVYSFLALVPARVELSCRALAPSNRLLAVRAVEVLSPCALTSAAADSAIKFASAPCSARFAVGNFSTF

SEQ ID NO: 282164 - protein, 81 aa, Zea mays
  Clone ID: MRT4577_20434C.1.pep
EQRETSSASSHTDVGVSTGANKQPRPGMEMKKIACAVLIAGSATVALAAEAPATNYTSGCFTVRASIVGAARGSFSADYSD

SEQ ID NO: 282165 - protein, 85 aa, Zea mays
  Clone ID: MRT4577_20435C.1.pep
YAGALCCAISFSGRVGQNEVFQRLPGSVYQSIEFASNTLTYDSCCKQGSAGHSNLKVENTEGAGISVLLQKSSSNKWPVIEGRPL

SEQ ID NO: 282166 - protein, 48 aa, Zea mays
  Clone ID: MRT4577_20436C.1.pep
CTLATPNRYPFDELKTHCLLALPWEVYIVYIKHWLLYIDTCHCHIDIK

SEQ ID NO: 282167 - protein, 125 aa, Zea mays
  unsure (1)..(125): unsure at all Xaa locations
  Clone ID: MRT4577_20437C.1.pep
RGVQPNPFKFVPSKDSPDGFLFGPLDPPLFFSKIGLGQGRSINPVKEDVKRGFLPALGLGGTIWPSVQIPNFRFVSGRDQLLYVNLFCLLGNCFLLWIXQQGDPSWKRGFPLFPKIEDPKGKGFF

SEQ ID NO: 282168 - protein, 135 aa, Zea mays
  Clone ID: MRT4577_20438C.1.pep
MAAMASLGALALLLLSSLSRCSAEACLEPQITPSYYTTSDAVISTETVFIVEISLTCKNRVQNMALYADVGGKQFPVTRGQDVGRYQVSWSLDHKSAHAGTYEVRFFDEESYSLLRKAQRNNEDISIIPPLVTVS

SEQ ID NO: 282169 - protein, 96 aa, Zea mays
  Clone ID: MRT4577_20439C.1.pep
SIPVGEQVAPVGFRQLIPPTRPSRLSPFSPRGRFLKKGPARPIFTPWGPPFYVPVICFPKSQRWLSFGTRQSFTNVTSKPKWVRHLLSGMLTPSPY

SEQ ID NO: 282170 - protein, 84 aa, Zea mays
  unsure (1)..(84): unsure at all Xaa locations
  Clone ID: MRT4577_2043C.1.pep
LHVICSQKKIKTDKPYRIGGGLTVVLHANXHKGLGQXLYHFFDQYCPNVDGFSLIYNEDDWAPTGHIYLWGTTGLLIWAVTLYG

SEQ ID NO: 282171 - protein, 112 aa, Zea mays
  unsure (1)..(112): unsure at all Xaa locations
  Clone ID: MRT4577_20440C.1.pep
MKGKGNLDRQGPAVWSKNSCTKKYDCEIFLKSLVIDILNKGEVSWVILRNTTIFHXSCYXCNDDMMIDVIVMAPRDNPNTDGIHIGDSSGMIIINTIIGVVDDCIIISAGRT

SEQ ID NO: 282172 - protein, 43 aa, Zea mays
  Clone ID: MRT4577_20441C.1.pep
LINISQANNIKKYKLTYILTSKELTYKRVYTFIPFTFLHSTTL

SEQ ID NO: 282173 - protein, 141 aa, Zea mays
  Clone ID: MRT4577_20442C.1.pep
NPAGYFQQQLFPFCQLGNAFFLQQQVFPFNQLAALNPAVFLQQQILLPFSQLVSANRGFFLFQQQLVPFFPQFLANPATLFQVQQLLPFVQPALANPAASCQQHIIGGALFLIAYLMLFHNKGFLDDGCGPPEIKSFLSRF

SEQ ID NO: 282174 - protein, 165 aa, Zea mays
  unsure (1)..(165): unsure at all Xaa locations
  Clone ID: MRT4577_20443C.1.pep
KRKKNKREEQKEKKRRESGRKAPPAGPTPQDPXTPQXATPRQGPSPPGXPATPHRRPPGRSSKARPAESPEKRGAEPPAPXFFSPKRGPGGGXRKXKERGADEKKKKKTARGGKPKGAEKKPPHSGEEAGPHHEPNQGRAATKAPKGPGSPPGKEGAAPPGGQTP

SEQ ID NO: 282175 - protein, 73 aa, Zea mays
  Clone ID: MRT4577_20444C.1.pep
SFRSWLCSVFVASFPSWQVYGTPVCTPSMALIITGLLPFISTGILANASPPQTSVSSRAAMGIASIIYAGREY

SEQ ID NO: 282176 - protein, 595 aa, Zea mays
  Clone ID: MRT4577_20445C.1.pep
MHGDGEVRRGGSLERRGALRLKRGCDGRRTGVKVAEVTASALVAEVTASALVGNADRGITAAGVHSPLGMGGGETGPTKEEKKRKRVGCVQPTPTLARHTGLSGGASDSVRCARLVGARDDDDDDSSSKKKTVNQNYSFDYSRMPYNSNAHLLSIPLGKPPHFDGEDYSFWSHKMHSHLFSLHPSIWEIVENGMHFDSIDNPVIINEKIHKNAQATTVLLASLCRDGYNKVSGLDNAKQIWDTLKISHEGNDATMITKMELVEGELGRFVMIRGEEPTQTYNRLKTLVNKIRSYESTRWTDHDVVRLMLRSFTVIDPHLVNLIRENPRYTKMTPEEILGKFMSGRMMVKEARYVDDALNGPLPVYEPQPVALKATSSREALPSKVAQVEASGLNEEEMAQERYGKKEKKKNYRKAKGEAHLGKEWDSNCSSSDSDDEGLAASAFDKSSLFPNEHHTCLMAKEKKVRIRDTPKYTSSSDEESSDDEVDYSELFKGLDRAKVEKINELIDALNEKGRLLEKQEDILYEEHDKIVSVQKSLALEIKRNEMLLSELSTCHESVSSLKSLNDELNAKLEEANAPRSCVEHVVICNRCKDF

SEQ ID NO: 282177 - protein, 245 aa, Zea mays
  Clone ID: MRT4577_20446C.1.pep
MATRIQFENNCEIGVFSKLTNAYCLVAIGGSENFYSAFEAELADAIPVVKTSIGGTRIIGRLCVGNKNGLLLPHTTTDQELQHLRNCLPDQVVVQRIDERLSALGNCIACNDHVALTHPDLDKETEEFIADVLGVEVFRQTIAGNILVGSYCAFSNRGGLVHPHTSVEDLDELSTLLQVPLVAGTVNRGSEVIAAGMTVNDWTAFCGSDTTATELSVIESVFKLREGQPTAIVEDMRKSLIDSYV

SEQ ID NO: 282178 - protein, 55 aa, Zea mays
  Clone ID: MRT4577_20447C.1.pep
ARRVAPSLLGNGYGATQPNQSTGRCLATLLASPKLLAGPGRVPGTEGRTHGRSDE

SEQ ID NO: 282179 - protein, 126 aa, Zea mays
  Clone ID: MRT4577_20448C.1.pep
RAACHCVDRRRATCPLSIKCVSSHPLAGGVKVIQQAARLLGLLANSAPVPGSALCYPFYKKLPLHAEDTQISDDRTQAISPAANIYSPKCYILYVPGPTCRGSVPLCMPPFSYKRGGMRRYKIDPS

SEQ ID NO: 282180 - protein, 87 aa, Zea mays
  unsure (1)..(87): unsure at all Xaa locations
  Clone ID: MRT4577_20449C.1.pep
ASKLTDVSVRDKLEGFRDKSXNLKGLSVPTISSVGSNAAAIHYRPEANTCSDMVAVKIYHCDSGAXYLDGTTDITRXTVDFGPPSAY

SEQ ID NO: 282181 - protein, 43 aa, Zea mays
  Clone ID: MRT4577_2044C.1.pep
SERSFSNPTPTPSTAWIPWAILKAPRGPVLIDAWIRSSTNLGR

SEQ ID NO: 282182 - protein, 95 aa, Zea mays
  Clone ID: MRT4577_20450C.1.pep
SKILLSSLIHRNSLWKFLFQAKICFGSTILAGQGPFFFICLKLGCVASFFKLGIFRCFFSLFCCIFSFLCMCNILVAEGFPIHGNIVVVPRQCTR

SEQ ID NO: 282183 - protein, 88 aa, Zea mays
  Clone ID: MRT4577_20451C.1.pep
MRPIPSAGRRRQGHPAGGAPAGSAGEQYARAKQRTVLSLLQETSPARRRYTRSRTTGHKGIAPAANIYSPKCYILYVPGPTCRNSVPL

SEQ ID NO: 282184 - protein, 86 aa, Zea mays
  Clone ID: MRT4577_20452C.1.pep
MDGVAQILGNPMATEFGPSPVGGVGVWSGGVGAATEAAVTDSEYGSEPGYRGDVELGYGDEIDEKEEDGRQQLFWGGVIGATDGQS

SEQ ID NO: 282185 - protein, 92 aa, Zea mays
  Clone ID: MRT4577_20453C.1.pep
PPAQGGPGPWGPGFPWFPCPLWAPVPGSQGPPCCPSHIEPLGGGPLPGIFFPLLPVFGPLGLFFPFSPFFWGFFFLGLKKFLKPAPLIFFFF

SEQ ID NO: 282186 - protein, 42 aa, Zea mays
  Clone ID: MRT4577_20454C.1.pep
SRLMNLLHSPAKPHAPHCTYSSIASFRYNPHTCCLLHYMTSR

SEQ ID NO: 282187 - protein, 75 aa, Zea mays
  unsure (1)..(75): unsure at all Xaa locations
  Clone ID: MRT4577_20455C.1.pep
LVHLFIGDEYRYCPHYHVCQREQCFFFFFXXXLGGGGGFSXXPAGTFRGGGWCPPYWLLVXASVVAGLPGRWALR

SEQ ID NO: 282188 - protein, 122 aa, Zea mays
  Clone ID: MRT4577_20456C.1.pep
PPSAIEGTARDRKKKLPSRQPGDPWDLAKEPRQPKSEDYMLHTTQPQKYTPAPKNLKMPYWASRHAPESKSSNGTGGKKPKFTQTIRRKVRINGLKGWKDAKPSKKEQTNCLIGLEVCWSSK

SEQ ID NO: 282189 - protein, 115 aa, Zea mays
  Clone ID: MRT4577_20457C.1.pep
PRPFSPRSKFFKRGPPTPWEGCFFFFPPQVFFFFPIFVIFGAKHTFFFFRGGRPPGFLDGPFWGVFFGRNPFARAVSCRFRSSKKGVVLVEKVFWGFFYLTEKKRSLSLTPTVEW

SEQ ID NO: 282190 - protein, 49 aa, Zea mays
  unsure (1)..(49): unsure at all Xaa locations
  Clone ID: MRT4577_20458C.1.pep
XPHAFPAFQPSPXLRLPSAPLQXHGLXLPRPLLHWPFDQSSLLFSLSPS

SEQ ID NO: 282191 - protein, 78 aa, Zea mays
  Clone ID: MRT4577_20459C.1.pep
SETGLAYGREYPSPSAASPQRHQGLICRGQTHLAMHMGALATYAYTKETCINPLRDDLLPHTSGRKISSSISFSDPEE

SEQ ID NO: 282192 - protein, 131 aa, Zea mays
  Clone ID: MRT4577_2045C.1.pep
LLSILLRPVRLFCFARQYPQGPCRNPFPRTYFPPLGPCTTTSWFWLSALWTCSASGWSFSRSSGPTGLRSRRSSSFGKALFCAFAPGCCRTSGPWPSGPPCPWRKSSRCSCLAALTKTLSFASALLPPEGC

SEQ ID NO: 282193 - protein, 83 aa, Zea mays
  Clone ID: MRT4577_20460C.1.pep
GCLLPDQAPPASSTLTQGTRSSWPPHRPPPPSCPRRQKDGLRLAPSPGRTRKSFRAAPADERRNRTGQAELNSELKINLSKGE

SEQ ID NO: 282194 - protein, 74 aa, Zea mays
  Clone ID: MRT4577_20461C.1.pep
SPSRRDPRCGSAQFHFSFPRVSASPFPCHGWFLSNSQSHVAPVSSPAGWLRVSSVGTPRPPPFTPCLSAKKKKI

SEQ ID NO: 282195 - protein, 72 aa, Zea mays
  Clone ID: MRT4577_20462C.1.pep
LVFLCMKRLANARLVRDNNKTHSLSGSPKRDAKSTALCLDGRILNIVVYRSGVSYPETAASVQRTADSYKAN

SEQ ID NO: 282196 - protein, 268 aa, Zea mays
  unsure (1)..(268): unsure at all Xaa locations
  Clone ID: MRT4577_20463C.1.pep
GNRFMVYLTCKAIEMRRRPFSRGEQDPYYHEQDMTSQTVEDKARKQKELAKKHFKPRMIVHPHFQNLTAEEAMQFLSDKEHGEKLIRPSSRGPSFLTLTLKIFDGVYAHKEIAESGKDHKDITSLLRLGKTLTIDNETFEDLDEVIDRYVDPLVGHLKSMLSYRKFRKGLKNEVDEMLRAEKAENPMRIVYSFGISHEHPGTFILSYIRSTNPHYEYIGLYPKGFRFRKRDFDNIDRLVSYFQKDIDKPPPDAGPSMXNVAAMVPMKN

SEQ ID NO: 282197 - protein, 86 aa, Zea mays
  Clone ID: MRT4577_20464C.1.pep
NTAIPFLRKKKLLGKITKKGILFPILFILFSQIHGRNAHHCIKKNVIQTTRPSQVRRLQMHQEQKNTTTPKQIKTTSSNSNDQGSK

SEQ ID NO: 282198 - protein, 109 aa, Zea mays
  unsure (1)..(109): unsure at all Xaa locations
  Clone ID: MRT4577_20465C.1.pep
GNVPTIVVMEFVAIALSEHQRTMEKDPEKKKYRAGAFEQLGFSKGVSKLEEYKLKEIKNDCLDILAFDGFXVQQXAYPGPGLMENLAYHLXMQWHNYIAVIIILRTISP

SEQ ID NO: 282199 - protein, 59 aa, Zea mays
  Clone ID: MRT4577_20466C.1.pep
RLANWLYVLPFRGRMNCLRDRSVIVTRRLYNVDPNHTFDNTAVLTKRLLNSGIPVGGPC

SEQ ID NO: 282200 - protein, 946 aa, Zea mays
  Clone ID: MRT4577_20467C.1.pep
MAEIVTGAMGTLLPKLANLIKEEYNLQKKVRGEIMFLEAELKSMEAALIKVSEAPIDHPPDIQVKLWTREVRELSYDLEDSIDRFMVRVGDGKPHKFKGRIDRSLHLLTRGRIQHSIGIDIKEIRSRIKDVSERRDRYKVDLVPSKPVGRSIDNLRLSALYRKATELVGAEEKSSDLVRRLMEGDKEASKQPVVLSIAGFGGLGKTTLANLVYEKIKGQFGCGAFVYVSHNPDVVKVFKNMLYQLDGDKYRDINQGTWSEEQLIWELRKFLLHKRYFIVIDDIWNTSVWETIQCSLMHNECGSIIIITTRNIDVAKQAGSVYQMEPLSLSDSTKLFCQRIFGSEDKCPPHNLAEVAGKILQKCGGVPLAIITMASMLADKTGKEINTHNYWSHVYQSMGSGLNGSTNVKNMRRILSVSYYDLPSHLKTCLLYLSLFPEDYRIKTRGLIWKWIGEGFVHEEQGKTLYEVGEDYIEELINRSMLEPVDIGRDGKTVSCRIHDMVLDLISFLSNEEHFLTKVGEQQPISLDLPKKIHRLSLQISQEEEVKQLATMSFSHVRSLTVSTKVFQLMPKLSAFLVLRVLNLKKCKGVRNHHFKDICNMFHLRYLSLNAEFITEMPREIQNLQFLQVLDISNLGHKVKMPTIIHLRQLLRLCFRPMWGIRLPDGFGKLTSLQEVKGIITIKLPSMLHNLGCLTNLRTLAIDFCDWDESYEEPFIQCLSNLVSLKSMEIKGTIVSSLCSECDKLYPGPQHLCSIDIESTAVPRWMSSLCFLSSINIELLALGAQDFHVLGSIPSLRCLSIHVKETRDERLVIGKCYPFRCLTEMQIDYESMAVVFAPGSMQNLKELHLVFGVKEVMHKYGDCNFGLEHLMSLEHVSVKTMYSIMPEEVEAVKDEFQKSLDMNPGKPTLIVDYKYPIKRKIRSHAQAIRAAILFANAGRIPATEGL

SEQ ID NO: 282201 - protein, 230 aa, Zea mays
  Clone ID: MRT4577_20468C.1.pep
MRLVGLTGGIASGKSTVSNLFRDSGVPVVDADVIARDVVQKGTRGWKKIVKAFGNDILLESGEINRALLGQIVFSDPSKRQLLNRLLAPHISYSIVWEIAKLWMKGCKVIILDIPLLFETKMDRWTNPIIVLWVDPKVQIERLISRDGCSEGQAQNRINAQLALDWKKSEADIVIDNSGSLDDTKQQFQEVLMKVSEPLTWKERLRSRDGLISVVVFTAVGVLLAQKNLL

SEQ ID NO: 282202 - protein, 77 aa, Zea mays
  unsure (1)..(77): unsure at all Xaa locations
  Clone ID: MRT4577_20469C.1.pep
HWVXDAHVQVLLPPSARTALHPLHGRVRALRELLLLGQDRHAHLPARALRQCPQSGRGSTERSSSTVRCCYSTTPSK

SEQ ID NO: 282203 - protein, 44 aa, Zea mays
  Clone ID: MRT4577_2046C.1.pep
FLLLRHYPIPGACPPSRVPRSNLPPLVTYGAQPLAAQLLAHRPL

SEQ ID NO: 282204 - protein, 78 aa, Zea mays
  unsure (1)..(78): unsure at all Xaa locations
  Clone ID: MRT4577_20470C.1.pep
MRLELLTGGIASGKSTVSNLFRDSGVPVEDADVIARDVVQTGTTRWKKMVIAFANDILLESXHTTELYCXRIVFSDPS

SEQ ID NO: 282205 - protein, 135 aa, Zea mays
  Clone ID: MRT4577_20471C.1.pep
MWEIAKLWMKGCKVIILDIPLLFETKMDRWTNPIIVLWVDPKVQIERLISRDGCSEGQAQNRINAQLALDWKKSEADIVIDNSGSLDDTKQQFQEVLMKVSEPLTWKERLRSRDGLISVVVFTAVGVLLAQKNLL

SEQ ID NO: 282206 - protein, 59 aa, Zea mays
  Clone ID: MRT4577_20472C.1.pep
MGIDLVAGGRTKRTKRTAPKSDDVNLKLLVKLYRFLVRRPKSNFNADILKRLYMRKTNR

SEQ ID NO: 282207 - protein, 113 aa, Zea mays
  unsure (1)..(113): unsure at all Xaa locations
  Clone ID: MRT4577_20473C.1.pep
MQLHISPIQSPKSNSLTLVFQRLDWKNPAFPQLNLLPLHPPFTTCLXSXQAHSNLPFQQFRTLNFEWDSPFIGSLIPSLFIVXTPTFTFSLSTSLSPSPYXFFPFFFSTFSQF

SEQ ID NO: 282208 - protein, 116 aa, Zea mays
  unsure (1)..(116): unsure at all Xaa locations
  Clone ID: MRT4577_20474C.1.pep
LSCCPNFHVSTPNGSVAGCKKDLQKQHRPQLTEGRSTSQGSRRGTTSRREQQQTKEMVDMEQQLTANQSPSMASGQRCQQIVHVGNDNHQNFEEGLEQFVDSXRSIPARCAGQGPN

SEQ ID NO: 282209 - protein, 54 aa, Zea mays
  Clone ID: MRT4577_20475C.1.pep
NQSVGLHEEFEEHAKKAKTLPESTSIENKLILYGLYKQATVEDLITNRPALFYQ

SEQ ID NO: 282210 - protein, 58 aa, Zea mays
  unsure (1)..(58): unsure at all Xaa locations
  Clone ID: MRT4577_20476C.1.pep
TYLRKIIISQQLFQKKKKKKKKKKKKKKKKXKKXKKKKKTQKPKKKKKKKNPRGFPPV

SEQ ID NO: 282211 - protein, 75 aa, Zea mays
  Clone ID: MRT4577_20477C.1.pep
KFFFPYDLYRFVQLNPSPLSILFQGGGPRPKKFCFGGGILRAGGKGSQKKKKKKKKKKKKKKKKKKKKKKKKKKK

SEQ ID NO: 282212 - protein, 201 aa, Zea mays
  unsure (1)..(201): unsure at all Xaa locations
  Clone ID: MRT4577_20478C.1.pep
MSEEVYEGAIGIDLGTTYSCVANYEGTNVEIIANEQGSFTTPSFVSFASEERLIGEAAKNQAAMNPENTVFDVKRLIGRRFEDETVTKDIKSWPFKVIDQNGSPMVEVEYLGEKKQFSPQEISAMVLVKMKEVAETKLGKKVEKAVITVPAYFNDNQRQATKDAGAIAGXHVLRIXHEPTAAAIAYGLGXGXSDRERNVLI

SEQ ID NO: 282213 - protein, 119 aa, Zea mays
  Clone ID: MRT4577_20479C.1.pep
IFFLGGFFFFFFFFFFGMGRNHRPITHLEKRRYHTIPPFLTGPGGGGSLFSVQFGRGSKSKVTTGKNKLGRAHTKNNGPLPTVWPPAPTKTPWQSVPWGWRESTWPPRSPAPLRVQPPC

SEQ ID NO: 282214 - protein, 341 aa, Zea mays
  unsure (1)..(341): unsure at all Xaa locations
  Clone ID: MRT4577_2047C.1.pep
WLLHFTASTARINPLFIDGPEIFXEENQKVAVISQVSSPGELDLVQPDNAEAENIVIDFRGGWQVIPAENIVATFQGCKGNVLAVSTNTTEAQVFLEVIIQRLQHMTPSPCIQCWYHFXALEQGLDGVVLKVDDMDDIIKLKDYFDRRNEAKSQLPLTKATVTKVEVVGMGDRVCVDLCSIMRPGEGLLVGSYARGMFLVHSECLETNYIASRPFRVNAGPVHAYVTVPGGKTSYLSELGSGKEVIVINQSGLWRTAIVGRVKIESRPLILVEAKDHSGDETYSIFLQNAETVALITPNTGSSGRTAIPVTSLKVGDEVLVRKQGAARHTGIEIQEFIVER

SEQ ID NO: 282215 - protein, 218 aa, Zea mays
  unsure (1)..(218): unsure at all Xaa locations
  Clone ID: MRT4577_20480C.1.pep
MVKKSGASLPVGAGVGRKTGWLSRWVSSCSDDAKTVFAAVTVPLLYKSSLAEPRSIPSRSMFPTFDVGDRILAEKISYIFREPEILDIVIFRAPPVLQALGYSAGDVFIKRVVAKGGDIVEVSXIPMVRDGNLIVNGVVQEEEFVLEPADYEMDPLTVPEGYVFVLGDNRNNSFDSHNWGPLPFKNILGRSVLRYWPPSRITDTIYEHDMVQHTAVAS

SEQ ID NO: 282216 - protein, 83 aa, Zea mays
  unsure (1)..(83): unsure at all Xaa locations
  Clone ID: MRT4577_20481C.1.pep
GVPNLLTPTSRYSRLAPFCANATTSGRVTISWVWMPLHPHPAHLNGSSSGNFVFYSMVLATGPQNFQRVKEVDVYXHCRLAIL

SEQ ID NO: 282217 - protein, 93 aa, Zea mays
  unsure (1)..(93): unsure at all Xaa locations
  Clone ID: MRT4577_20482C.1.pep
PTVKIEAPEASSLFXLERPKRDGDGHDXIXVDATHKADYAERICXYSNQNSXPKVTALNXQCQSGVHTLRPIAEGVDITNDYNPIPESKERHD

SEQ ID NO: 282218 - protein, 64 aa, Zea mays
  Clone ID: MRT4577_20483C.1.pep
IGSTEPKAVIFITRDNGSDDLFIHEAYIKDDGFRSLNDGDDVEYTVRSGCYCLSSGSSMSLVPG

SEQ ID NO: 282219 - protein, 50 aa, Zea mays
  Clone ID: MRT4577_20484C.1.pep
SCNGVLIVEAQAHLQQPFFGFAEAEVDEPKGISFPRTGGVDFKESRLRKA

SEQ ID NO: 282220 - protein, 77 aa, Zea mays
  Clone ID: MRT4577_20485C.1.pep
KATNDPQVCFFFKKKIHCEMRRGFVTTKQPLLYRVIILESLGNLCFSVLQLTTPLIDWWRKSGLIVKVTIEPFLPSL

SEQ ID NO: 282221 - protein, 258 aa, Zea mays
  unsure (1)..(258): unsure at all Xaa locations
  Clone ID: MRT4577_20486C.1.pep
MHDTGLSARTAGASSSSPATNAGDDVDESKTRKAQPAFVAAAYARLHSPYYAAASAALLLLALAAAAFLAGRAFPRTDCPPLRLDARFLSLPDAAAASDFGSLGVPSCRSKTGKTVEWTSKDLLNGLEEFVPIYQTRPMKNNMHGMRFDHSFGLWFMARWLKPDLMIERGAFKGHSTWVLRQAMPNTRIISLTPRHPEKYLKKGPAYVDGNCTYLAGKDFIDFGSVDWEXLLMKHGISDXQKVLGFFDXHQSELKEVS

SEQ ID NO: 282222 - protein, 117 aa, Zea mays
  Clone ID: MRT4577_20487C.1.pep
SLPIETTYHHSKPFCEPTIAVRLLGLFMLFGRSASAATVTIAPKCSQAPIASLFPPDLSPAVSSVCENPLLQPFRIQQAITAGVLLLSPLFLQQSSALLHHLPSEHLLAQKTTAHHL

SEQ ID NO: 282223 - protein, 126 aa, Zea mays
  Clone ID: MRT4577_20488C.1.pep
YLKSPELAGWTFKTPRTHFAKTGTQKGASYIHVCPGGRIHLKTASPARITAFTFEPFLRGSINRSNTFLTNQTQVHPFLFLVHKKKREPPPHCSVIKETLAPITSNNKTIPLGLLVFWLGVKGWLL

SEQ ID NO: 282224 - protein, 33 aa, Zea mays
  unsure (1)..(33): unsure at all Xaa locations
  Clone ID: MRT4577_20489C.1.pep
XLLFSSLHPVFDVISILCIKXYILXVIHKVKRP

SEQ ID NO: 282225 - protein, 1631 aa, Zea mays
  unsure (1)..(1631): unsure at all Xaa locations
  Clone ID: MRT4577_2048C.1.pep
MDPKGKGIVINDKEKESFVNEPKDDKPTDSGSGHKRRDGKKKKTMRINEIVYYDDSDGSSSSQKDNDDNDYDKRKTIHKNAQATTVLLASLCRDEYHKVSGLDNAKQIWDTLKISHEGNDVTLLTKMELVEGELGRFAIIRGEEPTQTYNRLKTLINKIRSYRSTQWTDHDVVRLMLRSFTVLDPHLVNNIRENPRYTKMSPEEVLGKFVNGRMMIKEARYVDDALNGPINEPQPFALKATRSKEALPSKVAQVEAAGLNDEEMALIIKRFKTTLKGHKGQLSKTKTKGKRSCFKCGKIGHFIANCLDNDSDQEQGNKREKKKAYKKAKGEAHLGKEWDSDCSSSDSDNEGLAATTFNKSSLFPNEHHTCLMAKEKKVCTRNNATYDSSSDEEIDYSSLFKGLDRTKIDKINELIDALNEKDKLLQKQEDLLYEEHDKFVEAQKSHALEVKRNEMLSCELSSCHETISSLRSINDDLNAKLVIASKSNSCVEHVMICNRCKDFDIDACSEHLVSISKLNDELASLNAQLKTSKNEFDKLKFARDAYTIGRHPSIKDGLGFKREAKDLTSYKAPISAKEKGKAPMASSAKRNHAFMYHDRRQSYRSCNANDAFVSHAMFASSSSYRHDRDMSRRNAVHMPRRNVVNIPRKVNEPSTIYHVLNASFAIYRKDRKIVARKLGAKCKGDKTCIWVPKDICTNLVGPNKSWVYASGGSSWIIDSGCTNHMTGEKKMFTSYVKNKDSQDLIIFGDGNQGKVKGLDVSVFRRSDGSLAFKGVLDGKLYLVDFAKEEAGLDACLIAKTSMGWLWHRRLAHVGMKNLHKLLKGEHVIGLTNVTFEKDRPCAACQAGKQVGGAHHSKNVMTTSRPLEPLHMDLFGPVAYLSIGGSKYGLVIVDDFSRFTWVFFLQDKTETQGTLKRFLRRAQNEFELNVKKIRSDNGSEFKNLQVEEYLEEEGIKHKFSAPCTPQQNGVVERKNRTLIDMARTMLGEFKTPECFWSEAVNTACHAINRVYLHRLLKKTSYELLTGNKPNVSYFRVFGSKCYILVKKGRNSKFAPKAVEGFLLGYDSNTKAYRVFNKSSGLVEVSSDVVFDETNGSPREQVVDFDDVDEEDVPTAAIRTMAIGDVRPQEQGERDQPSSSTMVHPPTQDDEQEVCDQGGAQDDHVIEEEAQPAPPTQVRAMIQRDHPIDQILGDISKGVITRSRLVNFCEHYSFVSSIEPFRVEEALLDPDWVLAMQEELNNFKRNEVWTLVPRPKQNVVGTNWVFRNKQDKHGVVTRNKARLVAKGYAQVAGLDFEETFAPVARLESIRILLAYAAHHSFRLFQMDVKSAFLNGPIKEEVYVEQPPGFEDERYPDHVCKLSKALYGLKQAPRAWYECLRDFLIANAFKVGKADPTLFTKTCDGDLFVCQIYVDDIIFGSTNQKSCEEFSRVMTQKFEMSMMGELSYFLGFQVRQLKDGTFISQTKYTQDLIKRFGMKDAKPAKTPMGTDGHTDLNKGGKSVDQKAYRSMIGSLLYLYASRPDIMLSVCMCARFQSDPKECHLVAVKRILRYLVATPCFGIWYPKGSTFDLIGYSDSDYAGCKVDRKSTSGTCQFLGRSLVSWSSKKQIXVALSTAEAEYVAAGXCCVQLLWM

SEQ ID NO: 282226 - protein, 84 aa, Zea mays
  Clone ID: MRT4577_20490C.1.pep
AGSWNPPGQRWRPTGGPAPEGGWERIPKERRPPPKKIVGEKKKKPGPNPWSGVKKKKKKKKKKKKKKKKKKKKQKKKKKKKPTT

SEQ ID NO: 282227 - protein, 126 aa, Zea mays
  Clone ID: MRT4577_20491C.1.pep
RIPSLNLLSYIPQVIRFRRLSYSGGISPSQLALVQLHVLESGKSTELWQVGVGSVGVVPVQSGVAFTLFCVEMWILVQGVASVGSPLCSTTLRVPIYRMPQPVERVPLLGGLPRGHWYADEAEVEA

SEQ ID NO: 282228 - protein, 132 aa, Zea mays
  Clone ID: MRT4577_20492C.1.pep
QDRQAFLMGNNPLAKDLTLKELYSIQSRLAQEKARETTYRQRFQIPELQGLIQEQNPPIDLCGLHISEAMHVLNYELNNRRKIVRSTGRRLQAMIISSARTPARLTAAVEQYLMEHGLQYTQAQPGLFRDLL

SEQ ID NO: 282229 - protein, 197 aa, Zea mays
  unsure (1)..(197): unsure at all Xaa locations
  Clone ID: MRT4577_20493C.1.pep
MAPPRPLLAAVFLAAAVLLLLSPAEAGTVGVNYGRVANNLPNPAAVVQLLKQQGXSYALLWVRRNVAAYHPATQIQGXIAVGNEVXFASAKNVTAQLVPAMANVHAALARLGLDGAVKVSSPIALTALASSYPSSAGAFREDLAQAVMKPMLDFLAQTGXSYLMVNAYPFFAYXGMREXISLXYALFRPRPXVLDAG

SEQ ID NO: 282230 - protein, 254 aa, Zea mays
  Clone ID: MRT4577_20494C.1.pep
MAPPRPLLAAVFLAAAVPLLLSPAEAGTVGVNYGRVANNLPNPAAVVQLLKQQGVAQVKLYDADPTVLRALANTGIKVVVALPNEQVAAAASRASYALLWVRRNVAAYHPATQIQGIAVGNEVFASAKNVTAQLVPAMANVHAALARLGLDGAVKVSSPIALTALASSYPSSAGAFREDLAQAVMKPMLDFLAQTRSYLMVTAYPFFAYSGNARDISLDYAAPESMPTLSNFLNRCSCSFDSSRSDAVERTSLY

SEQ ID NO: 282231 - protein, 153 aa, Zea mays
  Clone ID: MRT4577_20495C.1.pep
MAPPRPLLAAVFLAAAVPLLLSPAEAGTVGVNYGRVANNLPNPAAVVQLLKQQGVAQVKLYDADPTVLRALANTGIKVVVALPNEQVAAAASRASYALLWVRRNVAAYHPATQIQGIAVGNEVFASAKNVAAQLVPGMANVHAGLARLGLGGA

SEQ ID NO: 282232 - protein, 385 aa, Zea mays
  unsure (1)..(385): unsure at all Xaa locations
  Clone ID: MRT4577_20496C.1.pep
MAPPRPLLAAVFLAAAVLLLLSPAEAGTVGVNYGRVANNLPNPAAVVQLLKQQGVAQVKLYDADPTVLRALANTGIKVVVALPNEQVAAAASRASYALLWVRRNVAAYHPATQIQGIAVGNEVFASAKNVTAQLVPAMANVHAALARLGLDGAVKVSSPIALTALASSYPSSAGAFREDLAQAVMKPMLDFLAQTGSYLMVNAYPFFAYSGNAGDISLDYALFRPNAGVLDAGNGLKYYSLLDAQLDAVFAAVSRLGEGYNGVRVVVSETGWPSKGDANEAGASAANAAAYNGNLARRVLSGNAGTPRRPDADIDVYLFALFNENQKPGPTSERNYGVFYPNQQKVYDVEFVLGGXAAPARATAASGGRRTAAGRAAPAPTRRAG

SEQ ID NO: 282233 - protein, 42 aa, Zea mays
  unsure (1)..(42): unsure at all Xaa locations
  Clone ID: MRT4577_20497C.1.pep
RAGDRQRPRPEASMFGPFTGYEHHQVRIPLLXRSFCTSTLTL

SEQ ID NO: 282234 - protein, 90 aa, Zea mays
  unsure (1)..(90): unsure at all Xaa locations
  Clone ID: MRT4577_20498C.1.pep
MSWAAPDDIFFSTSLAAYLDKKLLVLLRDGRKLMGLLRSFDQFXDVEKEELPAHMVQVPEAEIKRAQKAEKEEMLLKGTMRKRMEFLDLD

SEQ ID NO: 282235 - protein, 70 aa, Zea mays
  Clone ID: MRT4577_20499C.1.pep
DEMAWTHNNLATAHHLSLIKAKVCIIAPNLVSLPFYPCCPHILVIFVLPILKKKIIFFLFLIKINKSFLN

SEQ ID NO: 282236 - protein, 63 aa, Zea mays
  Clone ID: MRT4577_2049C.1.pep
LGNVGHLLPPREPTLYAYGRPVLTIARQACLEPAMPSPCVDPHLDLAPVWSGNEPSPKASPAK

SEQ ID NO: 282237 - protein, 160 aa, Zea mays
  unsure (1)..(160): unsure at all Xaa locations
  Clone ID: MRT4577_204C.1.pep
RALRLLWYSCSVCSCSTTAGTALPTSGHGAPSSFLLCKTLLRQAEAARSXFAERAAADPDRPNCMPGDTPAPWLDGSLPGDFRFDHCGLGSDPQSLHWNVHAELVHCRRTMLGAQGICITEILTKIGVLNTPFWYTVDEQLYFTDTTTLFIIALILIGWA

SEQ ID NO: 282238 - protein, 91 aa, Zea mays
  Clone ID: MRT4577_20500C.1.pep
RVRLSNRGGAAAGQHSGVDTGAVDDSSEPRNAQKRRPDASSVASVLDKYRREFAVVVPFAINHDREQHDYGSTTNEDGDKSVEFEDFLQVN

SEQ ID NO: 282239 - protein, 55 aa, Zea mays
  Clone ID: MRT4577_20501C.1.pep
EVVKRGVAHPDKIAVGGHSYGACMTANLLAQAPHLFCCRIARSGAYKRTLTSFGI

SEQ ID NO: 282240 - protein, 51 aa, Zea mays
  Clone ID: MRT4577_20502C.1.pep
DFWSLMGSSCGTLSTTAGEEHLELHPAIIRSYKLTWLKRFCDPSRLVIALS

SEQ ID NO: 282241 - protein, 150 aa, Zea mays
  Clone ID: MRT4577_20503C.1.pep
MDKLRQFGRKAWFIVRVLSGYEEKRIRSYRLQLQKRIEMAQARKEELQKLPEKVILSEVRLAVQKMQAVNQQLDEADPAIDEYFKPIDKNAKIIADMQLEKEEKPTKEMTKLMQEQMKMRREIMMTRAEAASVESSDTKAGGKVANIPPK

SEQ ID NO: 282242 - protein, 132 aa, Zea mays
  Clone ID: MRT4577_20504C.1.pep
PAGTTSTCLRQNLAAAAPPADLPCRLLSADRRAPAGRSTLLASLDAAGRWPLDGVDASQPPSTRRRWPLDGVGASVTASGNQCQCGGVVGRGSHLGRRVRDEADPAGFAQLAAGSPIPLDERMERREGHPHF

SEQ ID NO: 282243 - protein, 57 aa, Zea mays
  Clone ID: MRT4577_20505C.1.pep
FVHREAAEKIVATRIAFCIGGFQLNLLEIFIHVRFRFHKQIVPRTQLVPSSTCLNVA

SEQ ID NO: 282244 - protein, 83 aa, Zea mays
  Clone ID: MRT4577_20506C.1.pep
CDDKVNVKKKKKKKKKKKKKKKKKKKKKKKKKKIKKKKKKKKNKNKKKNNKIKKGGVLLSDQILNTLVYRKIFFFWVTKKLSK

SEQ ID NO: 282245 - protein, 118 aa, Zea mays
  unsure (1)..(118): unsure at all Xaa locations
  Clone ID: MRT4577_20507C.1.pep
KKRSLQYWGHPTFLPSSLAATLNSFLLGPLFYIVWAWGNPWRGPGLNRXLATHPLFPSWRPPLEARPDRPSPQSGGLSGQWAPPCGGASGPGGGAFTRGVSAPLAXDPPPVPFAFSPS

SEQ ID NO: 282246 - protein, 56 aa, Zea mays
  Clone ID: MRT4577_20508C.1.pep
LPTSALCNLSISICRPLQVYLRILNDAEPINNSAMESFRDVLEKELSVLNLRSDYD

SEQ ID NO: 282247 - protein, 53 aa, Zea mays
  Clone ID: MRT4577_20509C.1.pep
SYHCHWGPGPPTLMTGLRTSQNTYRHRPLHISPNLTNPYRTIAVQSLSSAIGL

SEQ ID NO: 282248 - protein, 641 aa, Zea mays
  unsure (1)..(641): unsure at all Xaa locations
  Clone ID: MRT4577_2050C.1.pep
MDPKGKGIVINDKEKESFVNEPRDDKSNNSGSGHKRKDGKKKKTRRIKEIVYYDSDESSSSQKDDDNDYRKTVNSNFSFDYSRIPHSSNSHLLSIPLGKPPHFDGEDYGFWSHKMRSHLFSLHPSIWEIVENGMKFDSSDSPMFINEQIHKNAQATTVLLASLCREEYNKVSGLDNAKQIWDTLKISHEGNDITMLTKMELVEGELGRFAMIRGEEPTQTYNRLKTLVNKIRSYGSTRWTDHDVVRLMLRSFTVLDPHLVNNIRENPRYTKMSPEEILGKFVSGRMMIKEARYVDDALNGPIHEPQPIALKASRSKEALPSKVAQIEAAGLNDEEMALIIKRFKTVLKGRNGQPSKTKTKGKRSCFKCGKLGHFIANCPDNESDQEKGNKREKKKHYKKAKGEAHLGKEWDSDCSSSDSDNEGLAATAFNKSTLFPNERHTCLMAREKKVCTRNSTYASSSEDESSDEDEVDYSCLFKGLDRSKIDKINELIDALNEKNILLEKQEDLLYEEHDKFVEAQKSYALEVKRNEMLSFELSTCHETISTLKGVNNDLNAKLEVANKSNSCVEHVEICTRCKDFDINACSEHLVSISKLNDELASLNAQLKTSKNDFDKLKFARDAYTIGRHPSIKXGLGFKREA

SEQ ID NO: 282249 - protein, 110 aa, Zea mays
  Clone ID: MRT4577_20510C.1.pep
ILIKSWLVLKPVSLAAPWTGRLHSGSLLSMSGSSPAPNRGRAQSSFRLVCKWHVARFKLFVVHEPVGKPWAFFSECFVVSPCDAGSEDFGVMYRWCMSIVRRMPCTSVVM

SEQ ID NO: 282250 - protein, 403 aa, Zea mays
  Clone ID: MRT4577_20511C.1.pep
MSFRSIEQLLRRNSKTKISRNIVDRNHDQKEEQLVQSLRELLLASKQLPDKFDDYYVLLRFLKMRGFNILKAKEMFLNMLKWREDCSVDAIANDFKFEEYDAVKRCYPHGFHGVDRFGRPLYIERVGSVDLSKLMQVTTIDRYVKYHISEQEKTISLRYPVCSLVAKKHIASTTAIFDVKGLGLNNFSKSAREMFAEIQKIDSNYYPETLNQLYIINAGTGFRALWKVLKTFMEARTLAKIQVLGTNYLNTVLEAVDPSNLPEFLGGTCTCPTGGCLLQDKGPWTDPEMIRASKEAFGKGQKSFNELAATIACESFTGCQEPSAKQVDSTSRKRRTLGMLFKDDQVGFDTGENILRKQVDEQILEKIRELEHCAAKSGETLQILICKQQELTGHIEQLRKILQ

SEQ ID NO: 282251 - protein, 451 aa, Zea mays
  Clone ID: MRT4577_20512C.1.pep
MALSRRLLPLFLRRGAPIPARALSTAVAPAAVASEEDEAAVTVKGVRISGRPLYMDMQATTPVDPRVLDAMLPFYLSRYGNPHSRTHLYGWESDAAVEDARARVASLVGADPREIFFTSGATECNNIAVKGVMRFYRERRRHVITTQTEHKCVLDSCRYLQQEGFEITYLPVRKDGLVDLAQLEDAIRPDTGLVSIMAVNNEIGVVQPLEEIGRICKEKGVPFHTDAAQALGKIPIDVNRMGIGLMSLSGHKIYGPKGVGALYLRRRPRIRVEPQMNGGGQERGIRSGTVPTPLVVGFGAACEIAAQEMDYDHRRVSALQQRLLDGIRAQVDDVVINGSMEHRYPGNLNLSFAYVEGESLLMGLKEVAVSSGSACTSASLEPSYVLRALGVEEDMAHTSIRFGMGRFTTDEEVDRAIELTVHQVKKLRDMSPLYEMAKAGIDLKSIEWSQH

SEQ ID NO: 282252 - protein, 97 aa, Zea mays
  Clone ID: MRT4577_20513C.1.pep
EGGEGVCHWAFNVGKGGDFPGVWVWRQGRGVVLGMVLRVYGVVFRSGLAWVVWCGRPVSVLCLLCEYVPVLMFESLRMSVWFLLGVETVNVSLFFLF

SEQ ID NO: 282253 - protein, 48 aa, Zea mays
  Clone ID: MRT4577_20514C.1.pep
LATGSSRVAWALHYSSSLAHPTKSKLNFATEFLKCRLGLALQPKAHPN

SEQ ID NO: 282254 - protein, 429 aa, Zea mays
  Clone ID: MRT4577_20515C.1.pep
NSNNCGVKDRTSVTARANITESLVIQKASAGAGNDGRLSIEHTRSVAPSSLTPCSALSIHVINKNGNEDALPVCLEAKPVERGAGDMIGVGALSTKETEIKCIKGTKTLWSDRVSGKVTVLAGNANFWAVGCEDGFLQVYTRCGVRAMPAMMMGSAAVFIDCDDSWKLLLVTRRGLMYIWNLYDRTCILQDSLAALVASPDESSAKDAGTVKVISATFSRCGSPLVVLASRHAFLYDMSLKCWLRIADDCFPASNFASSFSFPQGGELGKLQIDIGKFMARKPIWSRVTDDGLQTRAHLENQLASSLALKSAQEYRQCLLSYVRFLAREADESRLREVCESFLGPPMGMVGSASPTDPKNLAWDPDVLGMKKHKLLKEDILPSMASNRKVQRLLNEFMDLLLEYETDVTLIPQPGTEGNGNGNDKVMTS

SEQ ID NO: 282255 - protein, 213 aa, Zea mays
  Clone ID: MRT4577_20516C.1.pep
PNPDLFSAFLWHRLMGKGGFSVGINAPRQIRAFAPCWEQPPGLPVFLVNLGHPSGYKGPFPEGIKVNLGKRPGLGKGSFFSPRVRETVSWVGGEPPSPPRGGGGVPFSPKGGGFPGKKIFLHGGPLGLGGPGSLPTMGPGVVPVGFPGEVAPTTLAFGGLPQFGGQGCFLPQGFWKQFFFGGEKKKKKKKKKKKKKKKKKKKKKIKKKKKRPL

SEQ ID NO: 282256 - protein, 67 aa, Zea mays
  Clone ID: MRT4577_20517C.1.pep
MAGFSDLHTADGLKSLEAQLAGKTYVSGDSITKDEITVFAAVPSKPGAEFRNAARWYETVSTAVSSR

SEQ ID NO: 282257 - protein, 53 aa, Zea mays
  Clone ID: MRT4577_20518C.1.pep
PPGDSYAWSSGPHWPPGTHNAHACCSGTWLPCPRSTACFLTRPLQPVGDSCGL

SEQ ID NO: 282258 - protein, 82 aa, Zea mays
  Clone ID: MRT4577_20519C.1.pep
ARNSARGKFQPLFSPPNHREPRGGLLKTRGLFNHERDQPTTTTDARPNNRRSHAPCTAHCARTTKMTPSSKDDITLNTHPQT

SEQ ID NO: 282259 - protein, 333 aa, Zea mays
  unsure (1)..(333): unsure at all Xaa locations
  Clone ID: MRT4577_2051C.1.pep
FSCRDAVVAPAPSRSRRASVRMRASAAXPAEPKKTVWVWTESRQVMTAAVERGWSTFLFGSKDLGKDWSSTARINALFIDGPGIFDEENQKVAVISQVSSPGELDLVQPDDAEAENIVIDFRGGWQVIPAENIVAAFQGCKGNVLAVSTNTTEAQVFLEALEQGLDGVVLKADDMDDIIKLNRSFVRGLILVHSECMKTKHIASRPFRVNAGPVHAYVTVPGGKTSYLSELGSGKEVIVINQSGLWRTAIVGRVKIESRPLILVEAKDNSGDETYSIFLQNAETVALITPNTGSSGRTAIPVTSLKVGDEVLVRKQGAARHTGIEIQEFIVER

SEQ ID NO: 282260 - protein, 192 aa, Zea mays
  Clone ID: MRT4577_20520C.1.pep
MRVTQTWGALLSTALIASAAPIAENCTAEADYDVIIIGSGPAGIIVADRMSEAGKKTLLLEQGGPSYYITGGRERPGWLNGNELSRVDVPGLYKSIFSVTGNLTCASDVVNAFQGCTVGGNTAINAGLFFQPPASDWDLYFPTGWKNSDMQTAIAKVHAKQPSTDNPSADGKRYLQSGFEAAKEWLVEGAGY

SEQ ID NO: 282261 - protein, 83 aa, Zea mays
  Clone ID: MRT4577_20521C.1.pep
HLKRLCLSSGPRFSKLYGKKGPSKSFDPAGGGFWPRLLGCKRNQKLFFPWRSWVFVLSMKDGRFFLSGKSRASSTLKWARDIS

SEQ ID NO: 282262 - protein, 67 aa, Zea mays
  Clone ID: MRT4577_20522C.1.pep
AQRGQKHATPPPKKWEGNKKTTTSFPRHPSCATRPHCVHTNSTLIRRKGHTVKFFGNLPPPPPPRAA

SEQ ID NO: 282263 - protein, 148 aa, Zea mays
  unsure (1)..(148): unsure at all Xaa locations
  Clone ID: MRT4577_20523C.1.pep
MARTASWLRRLPRRARRRHGHKHHHSQGTGGAXSRARSWKFHGWGGQVEKHXRTDWVSSMLGPGMRGGSRHGRGSWVGAQGRRLEAGLEDAAARHGLESTEQRGQGAEARKLGQVLGRAREERAEGARHESRRAXQGSSGQGDEARRG

SEQ ID NO: 282264 - protein, 46 aa, Zea mays
  unsure (1)..(46): unsure at all Xaa locations
  Clone ID: MRT4577_20524C.1.pep
MFPLLTADMKHAAXHAGLTSHLAGPNNESFSWHHLPSSSPQSSKRR

SEQ ID NO: 282265 - protein, 34 aa, Zea mays
  Clone ID: MRT4577_20525C.1.pep
STRPGSSGACAGAIVATYAVNTVIRTRASSQTLP

SEQ ID NO: 282266 - protein, 54 aa, Zea mays
  Clone ID: MRT4577_20526C.1.pep
MRILCYITVQKNIFVYLLDDLQFWTGLHSIADLLCFQKKKKKKKKKSTLRCYHC

SEQ ID NO: 282267 - protein, 50 aa, Zea mays
  Clone ID: MRT4577_20527C.1.pep
FPCSTHFFLVPFYSHSSFYSTPTSSSQNSIKSSPPIQNHHPHIKHQHNIQ

SEQ ID NO: 282268 - protein, 56 aa, Zea mays
  Clone ID: MRT4577_20528C.1.pep
RAHVACSQWQRAIRGNVACQYLLGFSLSPTQRMDVRLVIIIFWPFDRLTTLQSAAV

SEQ ID NO: 282269 - protein, 44 aa, Zea mays
  unsure (1)..(44): unsure at all Xaa locations
  Clone ID: MRT4577_20529C.1.pep
DPYQGSLQHLAKDPSIQFRCHHQAYMCHLNIXDLVYHNDHGRCG

SEQ ID NO: 282270 - protein, 882 aa, Zea mays
  Clone ID: MRT4577_2052C.1.pep
MGYNCLFTNVDVSVFRRSDGSLAFKGVLDGKLYLVDFSKEEADLDACLIAKTSMGWLWHRRLAHVGMKNLHKLLKGEHVLGLTNVCFEKDRPCADCQAGKQVGSTHHNKNVMTTSRPLELLHMDLFGPVAYLSIGGSKYGLVIVDDFSRFTWVFFLQDKTETQGTLKRFLRRAQNEFELKVKTIRSDNGAKFKNLQVEEYLEEEGIKHEFSAPYTPQQNGVVERKNRTLIDMASTMLGEFKTPERFWSEAVNTACHAINRLYLHRLLKKTSYELLTGNKPNVSYFRVFGSKCYILVKKGRNFKFAPKAVEGFLLGYDSNTKVYRVFNKSSGLVEVFSDVVFDETNGSPREQVDLDDIDEGDVPTVAICTMAIGDVRPQEQQEQDQPSSSTMEALNNFKRNEVWSLVPRPKQNVVGTKWVFRNKQDEHGVVTRNKARLVAKGYAQVAGLDFEETFAPVARLEFIRILLAYAAHHSFRLFQMDVKSAFLNGPIKEEVYVEQPPGFEDDRYPDHVFKLSKALYGLKQAPRAWYECLRDFLIANAFKVGKADPTLFTKTCDGDLFVCQIYVDDIIFSSTNQKSYEEFSRVMTQKFEMSMMGELNYFLRFQVKQLKDGTFISQTKYTQDLLKRFGMKDAKPAKTPMGTDGHVDLNKGGKSVDQKAYRSMIGSLLYLCASRPDIMRSVCMCARFQSDPRECHLVVVKQILRYLVATPCFGIWYPKGSTFDLIGYSDSDYAGCKVDRKSTSGTCQFLGRSLVSWSSKKQTFVALSTAEAEYVAAGQCYAQLLWMRQTLRDFGYNLSKVPLLCDNESAIRMAENPVEHSRTKHIDIRHHFLRDYQQKGDIEVFYISTENQLADIFTKPLDEKTFCRLRSELNVLDSRNLD

SEQ ID NO: 282271 - protein, 105 aa, Zea mays
  unsure (1)..(105): unsure at all Xaa locations
  Clone ID: MRT4577_20530C.1.pep
NLHLEKPQQTRDLPIQRREATASLYNGRSGLLVHRRTRXIATAQASKQRRQHHARAKHRRLPRRRGRVQVVECEERGATTPRRSAVATCSRRAEGPIGACGYFRG

SEQ ID NO: 282272 - protein, 126 aa, Zea mays
  Clone ID: MRT4577_20531C.1.pep
WVNPCFNIYHLTDFCPFLWDEMGFPSDALGPNDYFNQSDVQAALHAPPTDYSVCGEANIFPNGDGSAPSALGPLPGVIEATNNVLIGHGWYDYLLFMNGSLATIQNMTWNGAKGFQSPPTEELFVP

SEQ ID NO: 282273 - protein, 151 aa, Zea mays
  unsure (1)..(151): unsure at all Xaa locations
  Clone ID: MRT4577_20532C.1.pep
ASVRGRLGSRAGENAENYCRGCLGCDAFPGPLMHAXDSARSRGFAGKXSQLVVGFCNSCMVIAYDSCSXTASVILXLLRGELHFVTMXIWNLXITLHPYLPVWVIDMLVLLMCAVVFRNTSCLGLWRLVLGALTIKLINPYLSVWDVCTYA

SEQ ID NO: 282274 - protein, 102 aa, Zea mays
  unsure (1)..(102): unsure at all Xaa locations
  Clone ID: MRT4577_20533C.1.pep
VILMGLVEGFRIKGLEGVGEGNNLYPGGQXFDPLGLAEDPVPFAELKVKEIKNGPLPMFSMLGFLVQAIVPGKGPLENLFAPLEDPVANNAWVYAPKFAPGF

SEQ ID NO: 282275 - protein, 52 aa, Zea mays
  Clone ID: MRT4577_20534C.1.pep
IEHFFPCPPFTFLNNISPNFFLNLFYLNKFFPPNPLIPTFSSKPFYFSKKKH

SEQ ID NO: 282276 - protein, 54 aa, Zea mays
  Clone ID: MRT4577_20535C.1.pep
SSTRRRSAPRHSSWCYKESWSVFSVIMADGCRPTYMAASPHSWVLRPVVCAYAC

SEQ ID NO: 282277 - protein, 89 aa, Zea mays
  Clone ID: MRT4577_20536C.1.pep
QGTSSDRGSSGEGSPCRRIWPLASSSDCHQIPCAHSSGHPRANSLESPSPTSAAHRAMLYPFPSRVPCSGRPAAGSKPDQGLSSGTHAR

SEQ ID NO: 282278 - protein, 53 aa, Zea mays
  Clone ID: MRT4577_20537C.1.pep
TESVMKSRDVSELHIGVKHKPESCPVHAHTGDKKLVYYGNTLPDGSGTDPRYY

SEQ ID NO: 282279 - protein, 124 aa, Zea mays
  Clone ID: MRT4577_20538C.1.pep
CTRTSGLIYSDVGGPTRVAVAPRETRLLSSSIEQLHTVIHATRSSRSEFQIKREQNGAQVQSGQSWQKPKERSRRRRAADSLLNTRTGRRRPTTPTPTPRARSTPLPRAPARRRPPSTAWRSGP

SEQ ID NO: 282280 - protein, 67 aa, Zea mays
  Clone ID: MRT4577_20539C.1.pep
FNFFEYFFFFLQNRTPTNHYKRSRLIITEQGGSYCYPVTTAFSPRFKYTQTLFGKKICYNTPNAHCI

SEQ ID NO: 282281 - protein, 401 aa, Zea mays
  unsure (1)..(401): unsure at all Xaa locations
  Clone ID: MRT4577_2053C.1.pep
MASSSSLASAKALARSHASLLAPQTQRTVVAPAPSRSRRTSVRMRASAAAPAEPKKTVWVWTESRQVMTAAVERGWSTFLFGSKDLGKDXTARINALFIDGPGIFDEENQKVAVISQVSSPGELDLVQPDDAEAENIVIDFRGGWQVIPAENIVATFQGCKGNVLAVSTNTTEAQVFLEALEQGLDGVVLKVDDMDDIIKLKDYFDRRNEAKSQLPLTKATVTKVEVVGMGDRVCVDLCSIMRPGEGLLVGSYARGMFLVHSECLETNYIASRPFRVNAGPVHAYVTVPGGKTSYLSELGSGKEVIVINQSGLWRTAIVGRVKIESRPLILVEAKDNSGDETYSXFLQNAETVALITPNTGSSGRTAIPVTSLKVGDEVLVRKQGAARHTGIEIQEFIVER

SEQ ID NO: 282282 - protein, 205 aa, Zea mays
  Clone ID: MRT4577_20540C.1.pep
MKRQPPHPRGGGGAAVGESGSGGGFHKGEGKGKGRWGGGCRRRNEQRLGVGGGGGALSLAAFASAKSRTTGYNPAVIKKQKEFYKNAKLISKYKRTKKQQSQSNDHPQIPIHEDGGDNAQYVPKPRYQGKKRTAHSLKEEYEKKRAEDEKAKKEQDAAVQAKREHREKSEAKRRELREKMFKKTRSGQPVMRYRIEHLLETALSK

SEQ ID NO: 282283 - protein, 36 aa, Zea mays
  unsure (1)..(36): unsure at all Xaa locations
  Clone ID: MRT4577_20541C.1.pep
QHYXRNDTCSLKPLSASTDKXHRNLLXEYTRTLRYT

SEQ ID NO: 282284 - protein, 140 aa, Zea mays
  unsure (1)..(140): unsure at all Xaa locations
  Clone ID: MRT4577_20542C.1.pep
NLVTSTPXTTIYEFFXGXHPLCEVLDLTNSLTQIAHGRKFSYFGPGGLTGRTANFRIRDIHPMHYGRICPIDTSEGINAVLIASLSTHAKICDCGSVESSFYELFEKSKKARIRMLFLSPSXDEYYMIAAGNPLALNRSI

SEQ ID NO: 282285 - protein, 86 aa, Zea mays
  unsure (1)..(86): unsure at all Xaa locations
  Clone ID: MRT4577_20543C.1.pep
YAENKSGGRPVHPESGQVLHKSFHSPPPLGQIRWLIWGVRLAFXCLWKXCSFVXKKKKKKKKKKKKKIKKKKKKKKKSTLRCYHCF

SEQ ID NO: 282286 - protein, 55 aa, Zea mays
  Clone ID: MRT4577_20544C.1.pep
PSECLCVMTWHLLQHSADRSLRPLVESSDCILSLLHAGLDKYSCNTTPQLPSHEE

SEQ ID NO: 282287 - protein, 78 aa, Zea mays
  Clone ID: MRT4577_20545C.1.pep
IVLNHPLQRITEKQNRVSITDRMWARLLSSTNQPSFLCNKVIEEAKKEQERAAQLLDGSPSHRKVDDEVAASNLGRTK

SEQ ID NO: 282288 - protein, 88 aa, Zea mays
  unsure (1)..(88): unsure at all Xaa locations
  Clone ID: MRT4577_20546C.1.pep
HQINILXKTCFIINLIIYTSVTPAELGAKTSRNDRTGKRTIHHLAYHKPQASLRKCLVSGSRSITKIPYLQNKPSKIQHPKHTHTDIQ

SEQ ID NO: 282289 - protein, 136 aa, Zea mays
  unsure (1)..(136): unsure at all Xaa locations
  Clone ID: MRT4577_20547C.1.pep
VLTQLVPTPPATLARTACATRPLPCVGFDCTPSGVEFGDVSSYVPASSTFMKGSXVNATFYSACPMNDLVTDGTFALVEKLDCFNSWVPAYDYYDWSLRFKWSRPSKLIPRSFTTLEWTIPVDSPSCVYRFKHFGA

SEQ ID NO: 282290 - protein, 87 aa, Zea mays
  unsure (1)..(87): unsure at all Xaa locations
  Clone ID: MRT4577_20548C.1.pep
GGGWGGFKKIFCGVFFFFFFFFFFFFFFFFPTWGFFPYWIIFPCPGLNPTPGVRGVTLKPTXIPTLTGTITTYNTTNKTFKPQDGLG

SEQ ID NO: 282291 - protein, 179 aa, Zea mays
  Clone ID: MRT4577_20549C.1.pep
LVDIPSSSGEPAAVPPPPSPPRVSTWEFLDPFGTYESYYEQPTATAAPYSPGRSLKDVREEEGIPDLEDEDMEVVKEAYGDEKHPMKGYMGNGKATKEDGRSSTRDELPRKSKSSEASSSGSSLEHDVHVVEKSVVGEQVQHSEPQQHVAGLPPTGSDKIYIDDTEVVVEIRTNLSGAY

SEQ ID NO: 282292 - protein, 1773 aa, Zea mays
  Clone ID: MRT4577_2054C.1.pep
MVINDNEKSIFNEPRDDKANDSGSSQKKKDGKKKRRIKKIVYYDSDESSSSQKDDEYEEKKKTVNSNFSFDYSRIPQNSNTHLLSIPLGKPPHFDGEDYGFWSHKMCSHLFSLHPSIWEIVENGMQFDSSDNSMFINEQIHKNAQATTVLLASLCRDEYHKVSGLDNAKQIWDTLKISHEGNDVTMLTKMELVEGKLGRFAMIRGEEPTQTYNRLKTLVNKKRSYGSTRWTDHDVVRLMLRSFTILDPHLVNSIRENPRYTKMTPEEILGKFVSGRMMIKEARYIDEVLNGPIHEPQTVSLKATSSREALPSKVAQVEAVGLNEDEMALIIKRFKTALKGRKEHPNKSKTKGKRSCFKCGKIGHFIANCPDNDSDQEQGKSGKWEKKKAYKNAKGEAHLGIEWDSDCSSSDSDNEGLAASAFNKSALFPNEHHTCLMAKEKKVSTRSTIMYASSSDDESSDDEVDYASLFKGLDKTKIDKINELIDALNEKNRLLEKQEDLLYEEHDKFVSAQNSLALEVKRNEMLSCELSTCHESISSLKSINNDLNTKLEIANKSISCVDHVVICNRCKDFNVDACSEHLISISKLNDEVAILNAQLKTSKNEFDKLKFARDAYTIGRHPSIKDGLGFRREAKNLTSHKAPIFNKEKGKAPMTSNSQKNHAFMYHDRKFSRNVHHDRSCNVYDSNAMIASSSSFVHGRDMPRKNVTHHMPRTNVVNHMPRKVYNRLTTVFHACNTKFVLSCRNEKVIAKNVGAKCKGDKTCIWVPKAIVTNLVGPNKSWVYASGGSSWIIDSGCTNHMTGEKKMFTSYVKNKDSQDSIIFGDGNQGKVKGLGKIAISSEHSISNVFLVESLGYNLLSVSQLCNMGYNCLFTNVDVSVFRRSDGSLAFKGVLDDKLYLVDFAKEEAGLDACLIAKTSMGWLWHRRLAHVGMKNLHKLLKGEHVLGLKNDKSETQGTLKRFLRRAQNEFELKVKKIRSDNGSEFKNLQVEEYLEEEGIKHEFSAPYTPQQNGVVERKNRTLIDMARTMLGEFKTPERFWSEAVNTACHAINRVYLHRLLKKTSYELLTGNKPNVSYFRVFGSKCYILVKKGRNSKFAPKAVEGFLLGYDSNTKAYRVFNKSSGLVEVSSDVVFDETNGSPREQVDPNDVDEYDVPTDVIHTMAIGDVRPQEHQEQDQPSSSTMVHPPIQDDEQVHQEEACDQGGAQDDHVIEEEAPQAPPTQVRATIQRKHPVDQILGDISKGVTTRSRLVNFCEHYSFVSSIEPFRVEEALLDPDWVLAMQEELNNFKRSEVWTLVPRPKQNVVGTKWVFRNKQDEHGVVTRNKARLVAKGYAQVAGLDFEEIFAPVARLESIRILLAYAAHHSFRLFQMDVKSAFLNGPIKEEVYVEQPPGFEDERYPDHVCKLSKALYGLKQAPRAWYECLRDFLIVNAFKVGKADPTLFTKTCDGDLFVCQIYVDDIIFGSTNQKSCEEFSRVMTQKFEMSMMGELNYFLGFQVKQLKDGTFISQTKYTQDLIKRFGMKDAKPAKTPMGTDGHVDLNKGGKSVDKKACRSMIGSLLYLCASRPDIMLSVCMCARFQSNPRECHLVAIKRILRYLVATPCFEIWYPKGSTFDLIGYSDSDYAGCKVERKSTSGTCQFLGRSLVSWSSKKQTSVALSTAEAEYVAAGQCCAQLLWMRQTLRDFGYNLSKVPLLCDNESAIRMADNPVEHSRTKHIDIRHHFLRDHQQKGDIEVFYVSTENQLVDIFTKPLDESTFCRLRSELNVLDSRNLD

SEQ ID NO: 282293 - protein, 58 aa, Zea mays
  unsure (1)..(58): unsure at all Xaa locations
  Clone ID: MRT4577_20550C.1.pep
HTPTNPQQQHAXQTPITTPGRNMIACQTDSYTDAAHIXPYRRVKQIVSHKFQGRNIFR

SEQ ID NO: 282294 - protein, 203 aa, Zea mays
  Clone ID: MRT4577_20551C.1.pep
PRSRAPTRRSTTSWSASWGVNVQPYSGSPANFAAYTALLNPHDRIMGLDLPSGGHLTHGYYTAGGKKISAASIYFESLPYKVSAATGYIDYEKLEEKALDFRPKLIICGGSAYPRDWDYARLRAVADKVGALLLCDMAHISGLVAAQEAANPFEYCDVVTTTTHKSLRGPRAGMIFYRKGPKPPKKGQPEGAVYDYEDKINFA

SEQ ID NO: 282295 - protein, 213 aa, Zea mays
  unsure (1)..(213): unsure at all Xaa locations
  Clone ID: MRT4577_20552C.1.pep
MDPVATWGLTPLAGADPEIYDLLEREKRRQRRGIELIASENFTSFAVMEALGSALTNKYSEGMPGARYYGGNDVIDEIENLCRSRALAAFRLDAASWGVNVQPYSGSPANFAAYTALLNPHDRIMGLDLLSGGHLTHGYYTAGGKKISATSIYSESLPYKVSAARGYIDYEKLEEKALXFRPKLIICGXGRAYPRDWEYPRLRAVARQVRGPW

SEQ ID NO: 282296 - protein, 95 aa, Zea mays
  Clone ID: MRT4577_20553C.1.pep
KPQKIMEGNSLHQPEIESMQLEQNDETTEEERKHFNQERKIITLPTSEQTTIAEPASTARYDAYAEICELKKKVVSLEEHNKEQAAEIATLRQDV

SEQ ID NO: 282297 - protein, 147 aa, Zea mays
  unsure (1)..(147): unsure at all Xaa locations
  Clone ID: MRT4577_20554C.1.pep
HAYADEELRVPEYLXFKEQLVLXRPQYXFVLDLDSEPCNACFHRPYVLKFIGYGGXFLSRHLSSXLLHDKESLYRLLNFLWSYIYKGMTXLFNYRSRCLSALXGALRNADEHLCTLQADTRYCECHQRFQXLGMEKGWSDCSKRAQG

SEQ ID NO: 282298 - protein, 520 aa, Zea mays
  Clone ID: MRT4577_20555C.1.pep
MCTRALLPSTTAIYPGAPSSLPRPSLRLRPRPLLAATTPVTSSRADAAAMDPVATWGLTPLAGADPEIYDLLEREKRRQRRGIELIASENFTSFAVMEALGSALTNKYSEGMPGARYYGGNDVIDEIENLCRSRALAAFRLDAASWGVNVQPYSGSPANFAAYTALLNPHDRIMGLDLPSGGHLTHGYYTAGGKKISATSIYFESLPYKVSAATGYIDYEKLEEKALDFRPKLIICGGSAYPRDWDYAKLRAVADKVGALLLCDMAHISGLVAAQEAANPFEYCDVVTTTTHKSLRGPRAGMIFYRKGPKPPKKGQPEGAVYDYEDKINFAVFPSLQGGPHNHQIAALAVALQQTMSPGFKAYAKQVKANAVAIGNYLMSKGYKMVTDGTENHLVLWDLRPLGLTGNKVEKLCDLCHITLNKNAVFGDSSALSPGGVRIGAPAMTSRGLLEKDFEQIGEFLHQAVTICLNIQKEYGKLLKDFNKGLVNNKDIENLKVQVEKFADSFDMPGFTLESMKYKE

SEQ ID NO: 282299 - protein, 256 aa, Zea mays
  unsure (1)..(256): unsure at all Xaa locations
  Clone ID: MRT4577_20556C.1.pep
SARPGRGRKQRAACTAGCCSYPFSPNSSPRPGARKVREPPSSLVGSLSLSPRSRSRSCTIRQYVRAPAALVRGRQHVLGGGRWIRGRRRGASAPVAGAXAAGAGQLYHVPQHSRREKLRFPPDDAADSPPPTAWPAPPPFYSYASSSTSSYYSPHSPTLAHAQLVAHALPAGAGVQIPSQNFALSLSSAPSNPPPAPRRQLAAGVATGPYGPFTGYAXVLGRSRFLGPAQKLLEEICNVGGRPPHLDLSTRVSAWS

SEQ ID NO: 282300 - protein, 527 aa, Zea mays
  unsure (1)..(527): unsure at all Xaa locations
  Clone ID: MRT4577_20557C.1.pep
MCTRAHLPSTTAIYPGAPSSLPRPSLRLRLRPRPRPRPLLAATTPVTSSRADAAAMDPVATWGLTPLAGADPEIYDLLEREKRRQRRGIELIASENFTSFAVMEALGSALTNKYSEGMPGARYYGGNDVIDEIENLCRSRALAAFHLDAASWGVNVQPYSGSPANFXAAYTALLNPHDRIMGLDLPSGGHLTHGYYTAGGKKISATSIYFESLPYKVSAATGYIDYEKLEEKALDFRPKLIICGGSAYPRDWDYAKLRAVADKVGALLLCDMAHISGLVAAQEAANPFEYCDVVTTTTHKSLRGPRAGMIFYRKGPKPPKKGQPEGAVYDYEDKINFAVFPSLQGGPHNHQIAALAVALQQTMSPGFKAYAKQVKANAVAIGNYLMSKGYKMVTDGTENHLVLWDLRPLGLTGNKVEKLCDLCHITLNKNAVFGDSSALSPGGVRIGAPAMTSRGLLEKDFEQIGEFLHQAVTICLNIQKEYGKLLKDFNKGLVNNKDIENLKVQVEKFADSFDMPGFTLESMKYKE

SEQ ID NO: 282301 - protein, 579 aa, Zea mays
  unsure (1)..(579): unsure at all Xaa locations
  Clone ID: MRT4577_20558C.1.pep
MSSAAGGGYGAAGGAEHQHLLLGQASGQLYHVPQHSRREKLRFPPDPADSPPPTAWPAPPPFYSYASSSTSSYSPHSPTLAHTQLVAHALPAGAGAQIPSQNFALSLSSASSNPPPAPRRQLAAGVAAGPYGPFTGYAAVLGRSRFLGPAQKLLEEICDVGGRPPHLDRRSDDEGMLDMDAAGGVDHEMDGGDSCATAEAGXPVSGAEQQWRKTRLISLMDDVCRRYKQYYQQLQSVISSFETVAGLSNAAPFAFMALRTMSKHFKCLKGMVMSQLRNTSKVIANHGIIAKDDMANFALMGGGAGLLRGNSVNAFSQPHNIWRPQRGLPERAVSVLRSWLFEHFLHPYPTDSDKQMLAKQTGLTRNQVSNWFINARVRLWKPMVEEIHNLEMRQLHKTTSVDQNQLGMQQQNHHSSDGSGRPSSDPSNSQRGQSSGMTRNLSSRAPRHIQDDELSQMPHDMAGQVSFAYSGLPPAHHGLALSHHHHPQQAQAEAVGVGGVAASSGGGVSLTLGLHQNNNNNNRAYIAEPLPAALPLSLPHRFGLEDVSDAYVMGPFGGQDRHFSKGIGGGHNLLHDFVG

SEQ ID NO: 282302 - protein, 205 aa, Zea mays
  Clone ID: MRT4577_20559C.1.pep
MRFTTLIQSLLALSASTWAKNSTYYNPVLPGWHSDPSCTPVNGTFFCVTSTFISFPGLPIYASKDLVNYKLISHVWNRESQLPGYSYATDSQQQGMYAATIRHHQGTFYVICECLGTTGNRTNGVLFKTTDPFNEASWSNPVLFRAPKIDPDIFWDDDGKVYVATQEIRIQEINIDTGAMGPVINLWTAPAAFGPRPSHLQEGRM

SEQ ID NO: 282303 - protein, 57 aa, Zea mays
  Clone ID: MRT4577_2055C.1.pep
TINKYFLFLFLNFFFFFFFFFFFFFFFFFFLRVEMDSLILRANSSAKKHYSSHLILV

SEQ ID NO: 282304 - protein, 37 aa, Zea mays
  Clone ID: MRT4577_20560C.1.pep
GIGATRLHPGADILSSPQALTFSAFSELLPCGSPHLS

SEQ ID NO: 282305 - protein, 116 aa, Zea mays
  unsure (1)..(116): unsure at all Xaa locations
  Clone ID: MRT4577_20561C.1.pep
MAGKVDGSAIVLDLDMSHYCGTCWYQNLVXEIIDNDHLIRPTPSHFSHTDCERLMGYASLKRLALNPISTVLDANCILGKRMSAPSEMREFKLCSLNGMRVPGENSMIVLQHPAEA

SEQ ID NO: 282306 - protein, 107 aa, Zea mays
  unsure (1)..(107): unsure at all Xaa locations
  Clone ID: MRT4577_20562C.1.pep
HLTESTRPSLHDALYTWRIATPLVRSTXPSIPFPLHPITITTDPTSLRSPSTHTAASSFTPASSMGRTHARSSTLSIATYYLRSPLAIPIRRTTTTNSRIKSKRHLN

SEQ ID NO: 282307 - protein, 69 aa, Zea mays
  Clone ID: MRT4577_20563C.1.pep
LCIEIILSIMTHCQSQVAKAKDLLAAVQVKEQSHTCKSEALFRMAVVAAFSMHTENANLWDDSMDTNAI

SEQ ID NO: 282308 - protein, 59 aa, Zea mays
  Clone ID: MRT4577_20564C.1.pep
ARRSCVPYIGIVWCVTYRKNHSSSVCKNTLCMLGVSLCVHVRVATCMLVDPIASAVTIY

SEQ ID NO: 282309 - protein, 59 aa, Zea mays
  Clone ID: MRT4577_20565C.1.pep
MGSDSKELLGIEPLELRFPFEFMKQISCSMELTNKTDDYLAFKVKATSPKKYCVRPNSG

SEQ ID NO: 282310 - protein, 51 aa, Zea mays
  Clone ID: MRT4577_20566C.1.pep
VGVGLVAQVALLASSWLSPTASGPDFLAPSSPPVELLLVGCRWRRAIIPRA

SEQ ID NO: 282311 - protein, 101 aa, Zea mays
  Clone ID: MRT4577_20567C.1.pep
RAPATLGPPIKPHPTESAPLPRWAPQSNPTQPSPEPRGPSRQLHRLPRHNHPCRTSPSNCHHISWGDRRINPTRSPPAHPSFHYTSPSHLARLHHCLPSLS

SEQ ID NO: 282312 - protein, 136 aa, Zea mays
  unsure (1)..(136): unsure at all Xaa locations
  Clone ID: MRT4577_20568C.1.pep
CQNVQYDVLRVIFNKCHSVISDKPTVGTILTAEGAEIEAEPGGKMGGLYSHESEGLETQAEILPNLAGSQFSCVMYNGALENACLELGARLIAMDSSSRNAVHMLDSCTLTYDRTRYGFIPHSLLXIISGALDFEG

SEQ ID NO: 282313 - protein, 64 aa, Zea mays
  Clone ID: MRT4577_20569C.1.pep
KQKLNLFSFIPKKQKKPPQLTITYIFLTQKIIIHCTTHKTAHGIFHPSYISTTIDANKRNHLLQ

SEQ ID NO: 282314 - protein, 86 aa, Zea mays
  Clone ID: MRT4577_2056C.1.pep
FSCRDAVVAPAPSRSRRASVRMRASAAAPAEPKKTVWVWTESRQVMTAAVERGWSTFLFGSKDLGKDWSCQSSQQCFPSFAVPASR

SEQ ID NO: 282315 - protein, 43 aa, Zea mays
  unsure (1)..(43): unsure at all Xaa locations
  Clone ID: MRT4577_20570C.1.pep
DYTVLRRXYXXXXGXALLCXYXMKDALTKVLQTSHNLPSEIAI

SEQ ID NO: 282316 - protein, 230 aa, Zea mays
  unsure (1)..(230): unsure at all Xaa locations
  Clone ID: MRT4577_20571C.1.pep
AGRAGAALHRRSALPSPAPRAVVRSTQSQSQTSRFSLLSPGPGEERMAGRSSLSMVASHRLFTPVNPVGGADHGVELDEADVIWGGVGGGGGYPASSSPSSSPFLSSAVDPYARSPPVAXAVQAEAAWGGGRRSGAGVGARQHPGXGPRSWAPSTPGAGGRXARRPRGRRRGGLRRXAGGRRWVPPHEVLQGRERAAASFSVREGAGRTLKGRDLRRVRNAIWEKTGFQD

SEQ ID NO: 282317 - protein, 61 aa, Zea mays
  Clone ID: MRT4577_20572C.1.pep
VEPLAQCLPHPFIFLRCSCSRQPRIGLPHLLHSVVPLPVESAERPPGRIGGPDGGGGQKTG

SEQ ID NO: 282318 - protein, 114 aa, Zea mays
  Clone ID: MRT4577_20573C.1.pep
MNVVKLKKMAGAERTGGKGSVRTKKKASHKTTTTDDKRLQSTSKRIGVNSIPGVEEVNIFQDDVVIQNENANVQATVGANTWVGSGTPRTKNLHELLTWIVNQLGPDNLDNLRR

SEQ ID NO: 282319 - protein, 47 aa, Zea mays
  Clone ID: MRT4577_20574C.1.pep
TSRGSLVSLVRGLEVARMGEVMPGSHSRGLQAIVSIMNYLLFAKGFT

SEQ ID NO: 282320 - protein, 167 aa, Zea mays
  Clone ID: MRT4577_20575C.1.pep
MKDKGFTIEKDIYDPFLLYLMDTGMFEEFEVFSAFFKEANPKSFSRIAYYEMLLCIRVQDEEKIQELCHSVEDYDEKVHYDLAESYMLAFAESGRKEDLVALLDLVDLSKVSGSKYITNIFKSLGKLELENYVEKLLERMMSKGCADHDISSLILEYTANIPNIMTC

SEQ ID NO: 282321 - protein, 34 aa, Zea mays
  Clone ID: MRT4577_20576C.1.pep
TYLIPQWNVQKGAYPIKVYLRLKWKLFSRSSGNT

SEQ ID NO: 282322 - protein, 264 aa, Zea mays
  Clone ID: MRT4577_20577C.1.pep
YPRVRPGTARRSGNSGPPPQHSPVAPRASLPPPQSQPSTETPAVARPAPGLPPVPQTDAAPFNDFSRYAEAQKPYDPFTQHPAQTQAQAQEPFSHQAPTQAAATTGSEYSPFYAADQQRLPYNYYGYPSQDTTGQRASGFATSGAEGQAQATQTPSRYGHTEAPGSGQNTPQPTLPGATQSQQPSGQHIPGGQGAHAANYGYGYPYYSNPHYAQTYMNMNQQHQYGRNRPMYDDARRYEDHYMPHSNQYAYSNQYAPYGGKGAM

SEQ ID NO: 282323 - protein, 74 aa, Zea mays
  unsure (1)..(74): unsure at all Xaa locations
  Clone ID: MRT4577_20578C.1.pep
MATVNLSRVGVAVDGIQESMFALHLALYNLLLRPDCKLFVLHVQPLSNIATXLNPAPIRLSGPSGLEVPAFTLA

SEQ ID NO: 282324 - protein, 62 aa, Zea mays
  Clone ID: MRT4577_20579C.1.pep
GKKIRFLSKKGLEGPLWEFSKYEPRLTEGFAEPLGPSGWGGGPNLMGPNKTVTVTCLHKRYR

SEQ ID NO: 282325 - protein, 1179 aa, Zea mays
  Clone ID: MRT4577_2057C.1.pep
MDPKGKGIVIKATRSKEALPSKVAQVETAGLNEEEMALIIKRFKTALKGRKEHPNKNKTKGKRSCFKCGKIGHFIANCPDNDSDQEKKSGKWENKKNYKKAKGEAHLGKEWDSDCSSSDSDNEGLAATAFNKSSLFPNEHHTCLMAREKKGLDRTKVDKINELIDALNDKNRLLEKQEDLLYEEHDKFVEAQKSLALEIKRNEMLSCELSTCHETISTLKGANDDLNAKLEVAIKSNSCVEHVMICNRDAYMIGRHPSIKDGLGFKREVKNLTSHKASISAKEKGKAPMGSSAQKNHAFMYHDRRHSRNGYRSYDTFDSHAMIASSSSIMHDRNLARRNVVHVPRKTNSEPSTIYHALNASFAIYRNDRKIVARKLGAKCKGDKTCIWVPKDIVTNLVGPNKSWVYASGGSSWIIDSGCTNHMTGEKRMFSSYVKNRDSQDSIIFGDGNQGKVKGLGKIAISNEHSISNVFLVESLGYNLLSISQLCNMGYNCLFTNIDVSVFRRSDGSLAFKGVLDDKLYLVDFAKEEDKSETQGTLKRFLRRAQNEFELKVKKIRSDNGSEFKNLQVEEYLEEEGIKHEFSAPYTPQLNGVVERKNRTLIDMARTVLGEFKTPERFWSEAVNTACHAINRVYLHRLLKKTSYELLTGNKPNVSYFRVFGSKCYILVKKGRNSKFAPKAVEGFLLGYDSNTKAYRVFNKSSGLVEVSSDVVFDETNGSPREQVVDLDDVDEEDVPTAAIRTMAIGDPFRVEEALLDPDWVLAMQEELNNFKRNEVCTLVPRPKQNVVGTKWVFRNKQDEHGVVTRNKARLVAKGYAQVAGLDFEETFAPMARLESIRILLAYAAHHSFRSFQMDVKSAFLNGPIKEEVYVEQPPGFEDERYPDHVCKLSKALYGLKQAPRAWYECLRDFLIANAFKVGKADPTLFTKTCDGDLFVCQIYVDDIIFGSTNQKSCEEFSRVMTQKFDMSMMGELSYFLGFQVKQLKDGTFISQTKYTQDLIKRFGMKDAKPAKTPMGTDRHTDLNKGDSDYAGCKVDRKSTSGTCQFLGRSLVSWSSKKQTSVALSTAEAEYVAAGQCCAQLLWMRQTLRDFGYNLSKVPLLCDNESAIRIADNPVEHSRTKHIDIRHHFLRDHQQKGDIEVFHVSTENQLADIFTKPLDEKTFCRLRSELNVLDSRNLD

SEQ ID NO: 282326 - protein, 63 aa, Zea mays
  unsure (1)..(63): unsure at all Xaa locations
  Clone ID: MRT4577_20580C.1.pep
VLRLGLLLLFLSPCFSWGCLVWLAWLRFFRVLSPPLSRLVSCLCWVLPSFLRSRGSARLFXSG

SEQ ID NO: 282327 - protein, 208 aa, Zea mays
  Clone ID: MRT4577_20581C.1.pep
RPGKRNAMAAPFEQAYKEHYALKEEASKFTSEDAPQGIREGGEVKAIHYREEEAIYVKASHDRVTVIFSTVFREETDRVFGKVFIQEFVDARRRAIQNAPQVLFRNDAPLELQGVPGIQNTGSGDIGYVTFVLFPRHLTPQRMTDVISHIQTFRDYFHYHIKASKAYIHSRMRKRTADFLQVLRRARPENEEKERKTASGRTFKVQGN

SEQ ID NO: 282328 - protein, 68 aa, Zea mays
  unsure (1)..(68): unsure at all Xaa locations
  Clone ID: MRT4577_20582C.1.pep
MEGGIGXDIGVVILSRGGVRVPRVQGLEVEGYLVRXADDLSSEGPLGAVRLDHDEGDVHCGGCQGALA

SEQ ID NO: 282329 - protein, 81 aa, Zea mays
  unsure (1)..(81): unsure at all Xaa locations
  Clone ID: MRT4577_20583C.1.pep
TRPLQLGATADTLADRPARTRTRRITTEDGSFIIMTSTTLPCNYDSRPSMLASKQWVPLANQANLLCQEPRLSLAENXSRP

SEQ ID NO: 282330 - protein, 92 aa, Zea mays
  unsure (1)..(92): unsure at all Xaa locations
  Clone ID: MRT4577_20584C.1.pep
APPFCPRSPGGCCAXRIRGPCCPKGRFFGGASGGNPRAVCGVFCAPWPAGVGFMHLFSPAQGKTKLCTYVDRTPLCRMIDFVSRAELVSKKI

SEQ ID NO: 282331 - protein, 116 aa, Zea mays
  unsure (1)..(116): unsure at all Xaa locations
  Clone ID: MRT4577_20585C.1.pep
MSSPRPHFLVLTFPFQGHIAPALRLARQLLAAAPDALVTFSTTEVAHRRMFPAKPNDGAKDSDEDGRLEFLPFSDXGTEAGYVRSADLGSFNAYMTSFHAAGARSAAEIVDALAAR

SEQ ID NO: 282332 - protein, 114 aa, Zea mays
  Clone ID: MRT4577_20586C.1.pep
PHGPLRCSTCTSPQASPEAVSKPTNIVNFCDSLRSPLDCKSTSGTLDLRCYRDTSSTSVGSDDVCIKQYFTWGGHTLTSSPTMSPRLAWDKHNESGERLASHKQASVDFHICTK

SEQ ID NO: 282333 - protein, 226 aa, Zea mays
  unsure (1)..(226): unsure at all Xaa locations
  Clone ID: MRT4577_20587C.1.pep
MTGQAPSLLFRFTDTEVAKMEEVLRDLNAMPKHHVIQGLTDNLNASPDRSGDGKVPVQYNQVRNWFQNRMSVQSRKMMVPPVAEEHHPVAGSYSGNSSSDGGHVQFEAKSARNGAWYDVAAFMSHRFIETRDPEVLVRFTWLGPEEDEWVDVCKCVRVRSLQCVDVLPXDLIMCFKEGKEQARYFDAHVLQXQRRRHDXVRGCRCRXLGWYDHDHSXEEFVPLSNV

SEQ ID NO: 282334 - protein, 85 aa, Zea mays
  Clone ID: MRT4577_20588C.1.pep
LRKRLRLLCLAVLFALFVYDWTYAFDFLATQCHFFSSFTFLFAPSRIDPFFFFCVLPFSQPLHVYMMLRIRTFCISQQHVCCLSH

SEQ ID NO: 282335 - protein, 147 aa, Zea mays
  Clone ID: MRT4577_20589C.1.pep
DLCARDREEENRDRKGGAADDRPAQCSERGEETGEGELEGERRRQSLTSTAAAARGTLARAPGEDRGGCEDPGSNPSARSRRGGCASSRRGEAAARAPRQDTGKGPERASGRPRANHYFDRLSWAWMRWLFCTSVVWPRCLNKQPNT

SEQ ID NO: 282336 - protein, 62 aa, Zea mays
  Clone ID: MRT4577_2058C.1.pep
LCMIMHRLLENYLSDDYKTCQYMMLTTADYLCYSNLTSMIMSKLRTNTHHHSHLGMVTIPLG

SEQ ID NO: 282337 - protein, 82 aa, Zea mays
  Clone ID: MRT4577_20590C.1.pep
HAFADTWSLYKQERAHSGVLSHSGGRKNSKKEINVPEDWAAFTGKLQPFFKEEVFVPVFNGTFSCTAKQFLIIFLNEYSNYL

SEQ ID NO: 282338 - protein, 98 aa, Zea mays
  unsure (1)..(98): unsure at all Xaa locations
  Clone ID: MRT4577_20591C.1.pep
MASLSSAAITAPSFTVAPGRALVSMRSFTVLASRRKAQXTAAVAVAASVLLAGCGAMAQEVLLGACDGRLVFEPSQFIVNAGDTSTLKIDAGFTRNVV

SEQ ID NO: 282339 - protein, 58 aa, Zea mays
  unsure (1)..(58): unsure at all Xaa locations
  Clone ID: MRT4577_20592C.1.pep
ALTAHVHSTPSPKQSTIINTQHRSLKDLAPTLLVFHNFLNSNKTTSLXFLSNNPLLAH

SEQ ID NO: 282340 - protein, 134 aa, Zea mays
  unsure (1)..(134): unsure at all Xaa locations
  Clone ID: MRT4577_20593C.1.pep
MARTTYTTSDSTXGKAPSNQMXATKAACKFARGTGGVNKPTAFVPDTVELREILQYHRSTELLIRXLTLRRLVRXYAHDFHTDLHFYMCAVYALLEAVEDYLAXIFERSHLCAIPLSSAITIMPIDIQVARRIH

SEQ ID NO: 282341 - protein, 50 aa, Zea mays
  Clone ID: MRT4577_20594C.1.pep
KRDPLVVLFVVLFIYFILFFFYFFFFFSFFFFFFFFFFFFFFFNFFFFKP

SEQ ID NO: 282342 - protein, 132 aa, Zea mays
  unsure (1)..(132): unsure at all Xaa locations
  Clone ID: MRT4577_20595C.1.pep
RRVGPTTPPVYSRPAVFVIRTHVTLQLDITRHTQTERYIEKRKKISDEEDHPCAIGEAVDXTGCDCYILLNSADHIIDSNGQHMDHLYMIALVKRDTTNVRXSKMDISEIIWHRIHDLLPANDDSSSSAVNG

SEQ ID NO: 282343 - protein, 82 aa, Zea mays
  Clone ID: MRT4577_20596C.1.pep
TLTELQTDIIAGDAQAQTPTVHDGKQHCAFHAARRRSMSRLRAGRGLIVRGYELCEQEHFCRFPGGEPGADPIFVDPRTTLG

SEQ ID NO: 282344 - protein, 129 aa, Zea mays
  unsure (1)..(129): unsure at all Xaa locations
  Clone ID: MRT4577_20597C.1.pep
SAPYPPRPPEPAPAPPRXPPPAHPXXPPVAPPPALXXQPQAPPLAPPRYPPPAPPLXPPLAPAPLPXPPPAPPLAPEPPPESPPAPAPPPAPRPPPRPPPPPAPPPSPPPPLSPPPRPPPEPPPRPPCT

SEQ ID NO: 282345 - protein, 74 aa, Zea mays
  Clone ID: MRT4577_20598C.1.pep
FPGQRRQCSSIIPDRGASQCPNAVTNFIVRAPTFICLSHYMHPAFELMSSMIYSFCFYSIFVFFSSFFLKILFF

SEQ ID NO: 282346 - protein, 50 aa, Zea mays
  Clone ID: MRT4577_20599C.1.pep
PPGMKFKGVRPQQAVAFYVRGPLKKKRPPPVSGFLPSFNEDKSLLLFTIF

SEQ ID NO: 282347 - protein, 939 aa, Zea mays
  unsure (1)..(939): unsure at all Xaa locations
  Clone ID: MRT4577_2059C.1.pep
MRQSGLVVTEGACDEGTPATEAEQADIEEGDAGEEEIDYNTTMPSKPSHLDFGKSTVFEADMLTMLATLHLHLYVYASGGSSWIIDSGCRNHMMGEKKMFTSYVKNKDSQDTIILGDGNQGKVKGLGKIAITNEHSISNVFLVESLGYNLLSVSQLCHMGYNCLFTNVDVSVFRRSDGSLAFKGVLDGKLYLVDFSKEESDLDACLIAKTSMGWLWHRRLAHVGMKNLHKLLKGEHVLGLTNVCFEKDRPCVACQAGKQVRSTHHSKNVMTTSRPLELLHMDLFGPVAYLNIRGSKYGLVIVDDFSRFTWVFFLQDKSETQGTLKRFLRRAQNEFELKVKKIRSDNRSEFKNLQVEEYLEEEGVKHEFSAPYTPQQNGVVERKNMTLIDMAMMMLGEFKTPERFWSEDVNMACHAINRLYLHRLLKKTSYELLTGNKPNVSYFRVFGSKCYILVKKGRNSKFVPKVVEGFLLGYDSNTMACRVFNKSSGLVEVSSDVVFDETNGSPREQVDLDDIDEDDVPTAAIRTMAIGDVRPQEQQEQDQPSSSTMVHPPTQDDXRVEEALQDPDWVLAMQEELNNFKRNKVWSLVPRPKQNVVGTKXGKANPTLFTKTCDGDLFVCQIYVDDIIFGSTNQKSCEEFSRVMTQKFEISMMGELTYFLGFQVRQLKDGTFLSQTKYTQDLLKRFGMKDAKPAKTPMGIDGYVDLNKGGKSVDQKAYRSMIGSLLYLCASRPDIMLSVCMCARFQSDPRECHLVAVKWILRYLVATPCFVIWYPKGSTFDLIGYSNSDYVGCKVDRKNTSGTCQFLGRSLVSWSSKKQIFVALSTAEAEYVAVGQCCAQLLWMRQTLRDFGYNLSKIPLLCDNESAICMADNPVEHNRTKHIDIRHHFLRDHQQKGDIEVFYINTENQLTDIFTKPLDEKTFCRLRSELNVLDSCNLD

SEQ ID NO: 282348 - protein, 51 aa, Zea mays
  Clone ID: MRT4577_205C.1.pep
LHSCPTLHLFLNKPSTLKILNHFRMQLQNLLTKTHDERVLILGSAALSQKG

SEQ ID NO: 282349 - protein, 114 aa, Zea mays
  Clone ID: MRT4577_20600C.1.pep
KDPNFHMLGNWSSGLAQYTGEHLHFSKTELQHRKIGVPVKKKLAQIWLSWLKNFFTGFIYMYTGGNLLKLDRGHTNTKGCPMPGKERSPPSLGGGVKDTEHLQREPPGYSSGPN

SEQ ID NO: 282350 - protein, 66 aa, Zea mays
  Clone ID: MRT4577_20601C.1.pep
GLHVRQQHIISAPARSQFRQPLSCQLGKFMVRAHGACSNQVGATPNPSMGPRPTTLVPVRLWPGYS

SEQ ID NO: 282351 - protein, 98 aa, Zea mays
  Clone ID: MRT4577_20602C.1.pep
TNVVALPIAHYYCQFICRVFILLGRSIYTIAGCQSFIYLDTMEHTVKCWYAGVVPFLRIMFLFWLLSFRISTHPLDNSTLEHDCTDLLNCFTLPVAVG

SEQ ID NO: 282352 - protein, 56 aa, Zea mays
  Clone ID: MRT4577_20603C.1.pep
IFLPSEKTTHLKRRPLMRRPLKRDIKNGFSRIISRFEQQQFEGPSLDQGSVIKGHS

SEQ ID NO: 282353 - protein, 64 aa, Zea mays
  Clone ID: MRT4577_20604C.1.pep
SSASASFLFISYHMTGVALTWYCQLQRDEPPLSWNSFKQSCQQRFGPPLRSNPLGELARLPFPA

SEQ ID NO: 282354 - protein, 93 aa, Zea mays
  Clone ID: MRT4577_20605C.1.pep
SCLHQLPHQIRVLKWRRFLCLIEIVQQRSDAGLEKRRLATPGTATTTFLGTHLSLQIKILLQQHRTRFPKPVRTIEDSNPFQSTLQSEKHRDV

SEQ ID NO: 282355 - protein, 59 aa, Zea mays
  Clone ID: MRT4577_20606C.1.pep
EPEEIFLFVGESIKGRGISCRQSIRRRVGFLGKVPPGKDFRQICLSILFINRRAVQSPL

SEQ ID NO: 282356 - protein, 73 aa, Zea mays
  unsure (1)..(73): unsure at all Xaa locations
  Clone ID: MRT4577_20607C.1.pep
LKTLTASDTRAHGGLCVVMRHSLECLSQLDMSYNSPXIDLVFXDLYGNDWHLCHIFXGPPRVHVLYYRLKLLL

SEQ ID NO: 282357 - protein, 154 aa, Zea mays
  Clone ID: MRT4577_20608C.1.pep
GHLLAQNIRGQQLQQLVVANLVAFFQQQQFFPFNPLGALNFGFYLQQQQLPFSQVFVAFPPQFFPFNQLAALDFPGFFQQQQLFPFSQLGGVSPGPFLAQPQLLPFFQPGGPNAGPLFQLQQLVPFKQLALPPPAAFFPQPLIGGAPFLIFFGV

SEQ ID NO: 282358 - protein, 61 aa, Zea mays
  unsure (1)..(61): unsure at all Xaa locations
  Clone ID: MRT4577_20609C.1.pep
HNPPPQELVGFNRSWLPLTXTQGKRYNTCFSHGFPLVVFSLGSINIIKHALIYIFVANGSV

SEQ ID NO: 282359 - protein, 119 aa, Zea mays
  Clone ID: MRT4577_2060C.1.pep
FKTPERFWSGAVNTACHAINQVYLHRLLKKTSYELLTGNKPNVSYFRVFGSKCYILVKKGRNSKFAPKAVEGFLLGYDSNTKAYRVFNKSSGLVEVSSDVVFDETNGSPREQVDPNDVD

SEQ ID NO: 282360 - protein, 122 aa, Zea mays
  Clone ID: MRT4577_20610C.1.pep
MLLYPSKRPTTRLLTTQSLRLSHFVRTMTKYTIDITSDTVCPWCYIGVSRLDRAIKEHTKLHPGDTFDLKWHAFYLMPEATPYPGVNKLQLYEMRFGGPERVQTMMTRLRAVGAQEGINFSF

SEQ ID NO: 282361 - protein, 66 aa, Zea mays
  Clone ID: MRT4577_20611C.1.pep
IWGIIHRTGGISKRGSRGTTCILDRDLMTELTNRHTPKTRRTTETFSKTSSPNQIAHKLNYENFNY

SEQ ID NO: 282362 - protein, 71 aa, Zea mays
  Clone ID: MRT4577_20612C.1.pep
WGFGAPNQGNTHLATLFFIETWNYYIHKTTTNHQLINKGRPSLIGELTNYCGWALFETFGPSPRRQIQGCR

SEQ ID NO: 282363 - protein, 264 aa, Zea mays
  unsure (1)..(264): unsure at all Xaa locations
  Clone ID: MRT4577_20613C.1.pep
QLARRHHLSLRPQAFPIRNQTKLHNISSSCSFKKPGSIQPSIAQSVGSPLSCDGRGDHGTWIILPLFLLRXGFEEWVALVRKRNGKASSCGRLGLRSTASSEVLELADPDSNVINPDPCDQVPEGILWERLGRVSMMDIESSDFSWTSLTSLHHTKHTATSTDPSEDDISRSFEVTVNSGGIVFIALFKAIENVDLPSKETAAVIKIAPSRMATQSERFGYELAKWLGVRTPSGRVIHSSSDEWQQXKDAVXNARMIDSFCDEL

SEQ ID NO: 282364 - protein, 55 aa, Zea mays
  Clone ID: MRT4577_20614C.1.pep
HDWAYDQGIRYSFTFELRDTGRYGFLLPESQLRATCEETFLAIKYVASYVLEHLY

SEQ ID NO: 282365 - protein, 102 aa, Zea mays
  Clone ID: MRT4577_20615C.1.pep
GFASSTRSGSPLTRGGPRNLPHLEALHLVLTHPAIQSPSLLSPLPCTYISCTFLHHSPLLLLFANNPARLAWAPTGGLRALFAEVLEALRGAPPATLPEKLL

SEQ ID NO: 282366 - protein, 311 aa, Zea mays
  Clone ID: MRT4577_20616C.1.pep
NLKTKLFRCRPSTPFHGVAFLVGLASLASLETIKKQVAIMYLWPKALEVPIMDPSKASKKPVGILLVKVVRAQNLRKKDLLGKSDPYVKLKMSDDKLPSKKTTVKRSNLNPEWDEEFKFVVTDPESQSLEVNVFDWEQVGKHEKMGMNMVPLKDLPPEETKFTTLNLLKTMDPNDVQNEKSRGQLTLEVTYKPFKEADVETEDTEGTNVIEKAGMAGFGAKELWASRGWANWIWPAAGLRGGELSAPRNGGEGSACAMTKLQAGRRKKTGSDAMDGGEGRCAGRADRGEWAPELEGQVRPWQDPASNPAHE

SEQ ID NO: 282367 - protein, 950 aa, Zea mays
  Clone ID: MRT4577_20617C.1.pep
MRPYRYAPALKTEIEKQVEEMLQSGIVQPSQSEFSSSVILVKKKDHTYRFCVDYRHLNALTLKTKYPVPVIDEFLDELHGAAWFSTLDLRAGFHQIRMSPKDQHKTAFQTHHGHFEFRVMPFGLSGAPATFQSAMNSTLAPLLRKCVLVFFDDILIYSKTWTDHINHLQQVLQILQKDQWFIKMSKCAFAQQKIGYLGHVISQQGVATDPSKIEAVSSWPTPSNCKDLRGFLGLAGYYRKFVKNFGVIARPLNDLLKKGVLFIWTQVHEEAFLTLKQGLTTAPVLMLPDFSKPFAIETDASSKGIGAVLLQNSHPLAYVSKALGVKNQGLSTYEKEYLAILLAVDKWRQYLQHSEFLIYSDHRSLSHLTEQRLSTPWQQRVFSKLLGLQYRVVYKKGADNGAADALSRRPHPDSSLFHVTSIVPQWMDQVLDSYADDTFSQQLITSLATTTDNTGPYTLQSGILRYKGRVWVGTCEALQIQIISALHDSPVGGHSGFPVTYRRIKQLFAWKNMKSMIKSYVAACTVCQQSKPDRHKYPGLLQPLPIPEAAWQIISMDFIEGLPRSAHADTILVVVDLFSKYAHFLPLLHPYTALKVAQLFMDSVYKLHGLPQSIVSDRDKVFTSKFWQELFKLTGTTLRMSTSYHPQTDGQTERVNQCLETFLRSFVHACPTKWSHWLSLAEYWYNTSFHSSLGRSPFEVLYGRAPRHLGLTLTDAVPSLDLQAWLDQRELMVKLVQHHLHRAQQRMKFQADKKRTDREFQVGDMVYLKLQPYVQSSVATRANHKLSFKYFGPFAIIQRIGKVAYKLQLPSSSTVHPVFHVSQLKHSVGSQNVSSVLPNMSIPLQIPEQVLDRRVIVRGGKSIQQVLVHWSSTDEALSSWEDEAALRHRFPAAPAWGQAASQGEENVRDLQAPAQGEEGAGGKEPRDGVQVVGRRIRRPNLRVKGAEWIE

SEQ ID NO: 282368 - protein, 554 aa, Zea mays
  Clone ID: MRT4577_20618C.1.pep
MAAYYHGGAGTDIQASTDGLQTLYLMNPSYAGGYADDGGASTPGAANMMLLNSAVTTMTPASFAHHHQQQSPPAAQQHFVGIPLQVQAPPPSGYNLWTPAMAGGAADMSPQAQAQTPGAAGAAGVSAVLSLSSREAPPVTVAAVAACTDEGKYLGVSATPQGQMVMSSKYLKAAQELLDEVVSVSKGVEDAKTAAAAATKSLAAVKKKEDSEGASGGGTDDGAGAKSGGGAAPEMSTAERQEMQMKKSKLLNMLDEVEQRYRQYHGQMQAVSSSFEAAAGAGSARTYTALALRTISRQFRCLRDAIASQVRAASRALGEDADAAVAGGRTVGSRLRYIDHQLRQQRALQQLGMMQGGAWRPQRGLPERSVSILRAWLFEHFLHPYPKDSDKIMLAKQTGLTRSQVSNWFINARVRLWKPMVEEMYLEETKDQDAGGGGNDEGKSGGGGSKSSDTVDGVMPRADVMSKSAVRVGGGGAGAESASTNKGIHGSSLLELGGGDHQQSHAGFYDDDEDDGDDVMGRRLKKARGNEPAPAFHHVHDIATLHAQAAAAAD

SEQ ID NO: 282369 - protein, 152 aa, Zea mays
  Clone ID: MRT4577_20619C.1.pep
MAAYYHGGAGTDIQASTDGLQTLYLMNPSYAGGYADDGGASTPGAANMMLLNSAATTMTPGVLRAPPPAAVAAGRAAALRRHPAPGPGAAAVGLQPVDPGHGWRRRGHVAAGAGADSRRRGCCWGQRRAQPVVPRGAGGHRGRGGRLHRRGQ

SEQ ID NO: 282370 - protein, 232 aa, Zea mays
  unsure (1)..(232): unsure at all Xaa locations
  Clone ID: MRT4577_2061C.1.pep
CGSILDACLIAKTSMGWLXHRRLAHVGMKNLHKLLNGDHVLGLTNVCFEKDRPCAACQAGKQVGSTHHNKNVMTTSRPVELLHMDLFGPVAYLSIGGSKYGLVVVDDFSRFTWVFFLQDKSETQGTLKRFIRQAQNEFELKVKKIRSDNGSEFKNFQVEEYLEEKGIKHEFSALYTPQQNGVVERKNRTLIDMARTMLGEFKTPERFWSEAVNTACHTINRFYLHRLLKKTL

SEQ ID NO: 282371 - protein, 138 aa, Zea mays
  Clone ID: MRT4577_20620C.1.pep
GRFFFFFFVQHYPQCHLTAHGAANESQCAMFTVSKTNTELLQIILVGQFLQHTLSPVPIYPFRILYCIPPNPYDLHIKSCTMFGYQLVTYPPIPIYTSPHDIYPIFTFPARPMSPSLTALYTQSIFRLEPFISIQALN

SEQ ID NO: 282372 - protein, 450 aa, Zea mays
  unsure (1)..(450): unsure at all Xaa locations
  Clone ID: MRT4577_20621C.1.pep
MADEEQAPSSRKRVAGTQINKDNPEPDDEGTEQEMGTFKKATEEVMATRRIVKVRRQQTSSASSNPFSAIRFAPTDSSAQTSAPVPEVQPXMSKLTREAMVAGKILCLCPTRLLGSGVNTDSSASTEAPPQPVETSDKAEDTKDESSGDKVVVGEPNEGSCMPSEVEGKTKEGDAEEKERTDEAGNIDKISKDDTGKKDGDDTEKKDGGDDTGGESEQKGQTPSATPLFSFKNLSSGQNAFTGLTGTGFSSTSFSFGSASKDGSSAGPLFGLKADGSSFPSFNLGAATNGGSATALATSAEAPKMFAMTEGPVETGEENEKAVFSADSALYEYLDGGWKERGKGELKLNVPVSGGERARLVMRTKGNYRLVLNASLYNDMSLKDMDKKGVTFACMNSIGESPSSLATFALKFKDTATREEFKDAVESHKTSKAQELPLKTPENSPKAAEV

SEQ ID NO: 282373 - protein, 60 aa, Zea mays
  unsure (1)..(60): unsure at all Xaa locations
  Clone ID: MRT4577_20622C.1.pep
PATATPPRSARRPPAPRRPDTPNPSPTAAEPTXASRRHQVNRPRDAIDLSSPSARERELA

SEQ ID NO: 282374 - protein, 93 aa, Zea mays
  Clone ID: MRT4577_20623C.1.pep
NQRVGGTATTVDVSQRQLGAHHASSPYDGTLLLMCVISTLRSSQLGELMKALGVLTSKPTRSWMLLLMVTKVLRSQLVECHVATGRVGKPGIR

SEQ ID NO: 282375 - protein, 91 aa, Zea mays
  Clone ID: MRT4577_20624C.1.pep
KKEKEKKKKKRTQTYGRWRLPNTILAISSKNRTSRAAAASPCRSRCRGTRAPSLRMLACFLPCFLLACFLPLELAPLSVASLSRCRCSGRE

SEQ ID NO: 282376 - protein, 90 aa, Zea mays
  unsure (1)..(90): unsure at all Xaa locations
  Clone ID: MRT4577_20625C.1.pep
GALGRCQERGWKRAASEPQPSSRKGERGPXDAPPTGRQWRETPEFAPAGHGQGKAFFFFIIFFFQNLIIKKLVLCFFYDKAAFRPRQGRV

SEQ ID NO: 282377 - protein, 53 aa, Zea mays
  Clone ID: MRT4577_20626C.1.pep
DMCETCGVPRLSEILMTASNDIKTPVMKSPSLEHISEDDAQMLDAKLRMCRVG

SEQ ID NO: 282378 - protein, 86 aa, Zea mays
  Clone ID: MRT4577_20627C.1.pep
IVAISQVLLHCSKISFITPPAIHRREESEERCATGARNDRLSAHRTSADSMHDESTRQNVFGGGKNGYAGRTRSDLVLRVFPARPA

SEQ ID NO: 282379 - protein, 137 aa, Zea mays
  Clone ID: MRT4577_20628C.1.pep
TPGASASTVIVCPSGISGWLVRFQPPPAVHSVDQRAADARSQPGPSAAHRHRADAEVSTPLRGLTATTSTTSAYAAMHLAPQSSRVLLFCAVQRSTPYRHCRLGHRKWGASSGQLAPSGGTSDRPARYPHLEHLPAR

SEQ ID NO: 282380 - protein, 151 aa, Zea mays
  unsure (1)..(151): unsure at all Xaa locations
  Clone ID: MRT4577_20629C.1.pep
CYXARDYLEAYKLDPENPLINLCVGTALISLALGFRLQNKNQCIVQAFAFLYRYLRLCDNSQEALYNIARAYHHIGLNTLAAVYYDKALSTEEKDHPIPKLPYEAGSRAPEDLRPGYCDVRREAAFNLHLIYMKSGATDLARRIXXXYCTV

SEQ ID NO: 282381 - protein, 1301 aa, Zea mays
  unsure (1)..(1301): unsure at all Xaa locations
  Clone ID: MRT4577_2062C.1.pep
MDPKGKGMVVNDKEKESIFNELRDNKPTDSNSSHKKRVGKKKRRIKKIIYYDNDASSSSPRDDDNDDSSSKKKDENGMHFDSTDNHVIINEQIHKNAQATTVLLASLCRDEYNKVSGLDNAKQIWDTLKISHEGNDATMITKMELVEGELGRSFTVIDPHLVNLIRENPRYTKMTPEEILGKFVSGRMMVKEALWGTDIPRVHWKDKRPHERPKGPINRKARYVDDALNGPLPIYELQPVALKATSSRETLPSMVAQVEAAGLNEDEMTLIIKRFKTALKGRKEYPNKNKTRGKRSCFKYGLAASAFDKYSLFPNERHTCLMAKEKKVYASGGSSCIIDSGCTNHMTGEKKMFASYVKNKDSQDTIIFEDGNQGKVKGLGKIAITNEHSISNVFLVESLGYNLLSLYALNDFAAPHPKSGICSTVNNSPAHKQHNMYSSISNGGTSLDQQFLAKRGLGQTAQTSRRSDGSLAFKGVLDGKLYLVDFSKENAGLDACLIAKTNMGWLWHHRLAHVGMKNLHKLLKGDHVLGLTDVCFEKDRPCAACQAGKQVGSTHHGKNVMTTSRPLELLHMDLFGPVAYLSIEGSKYGLVIVDDFSRFTWVFFLQDKSETQGTLKSFLRRAQNEFELKVKKIRSDNGSEFKNLQVEEFLEEEGIKHKFFAPYTPQQNSAVERKNRTLIDMARMMLGEFKTPERFWSVAVNAACHAINRLYLHRLLKKTSYELLSDNKPNVSYFXVFGSKCYILXVFNKSSGLVEVSSDVVFDETNGSPREQVDLDDIDEDEVPTAAMRTMAIGDVRPQELHKQDQPSSSTMVHPPTQDDVQVPQEEGKDQGGAHEDQVEEEAPRAPPTQVRASIQRHHPVDQILGDISKGVTTRSRLANFCEHYSFVSSIEPFRVEEALQDPDWVLAMQEELNNFKRNEIWSLVPRPKQNVVGTKWVFHNKQDEHKVVTRNKARLVAKGYAQVAGLDFEETFAPVARLESIRILLAYAAHHSFRLFQMDIKSAFLNGPIKEEIYVEQPPGFEDDRYPDHVYKISKALYGLKQSPRAWYECLRYFLILNAFKVGKADPTLFTKTCNGDLFVCQIYVDDIIFGSTNQKSCEEFSRVMTQKFEMSMMGELTYFLGFQVKQLKDDTFISQTKYTQDLLKRFGMKDAKPVKTPMGTDRHVDLNKGGKSVDQKAYLSMIGSLLYLCASRLDIMLSVCMCARYQSDPKECHLVTIMGILRYLVATPCFGIWYPKGSIFDLIGYSDSDYVGCKVDRKSTSGTCQFLGRSLVSWSSKKQASVALSTAEAEYVAAGQCCT

SEQ ID NO: 282382 - protein, 75 aa, Zea mays
  Clone ID: MRT4577_20630C.1.pep
GPSKSTAAKKTDGGSQSKASAALEIEDVEPAEMSFEEIEERLKSVVKAETISQLKSSVWKERLEGCQYPCVVYPV

SEQ ID NO: 282383 - protein, 321 aa, Zea mays
  Clone ID: MRT4577_20631C.1.pep
LQKANRAKKLIEKRTAANEELKHDYLPRTKQVPPVPGLLTNVEHHQLVLNLCRTLALLQRYWDALQIINRTLKLGNDALTGDKKEELRSLGAQIAYRAPDPSHGFKYVRYVVQQHPYSLAAWNSYYKVVSRIEDRFPHHFKYLLRTREANPDCVPPIIISGHRFTAISQHQSAARDYLEAYKLDPENPLINLCVGTALISLALGFRLQNKNQCIVQAFAFLYRYLRLCDNSQEALYNIARAYHHIGLNTLAAVYYDKTLSTEEKDHPIPKLPYEAGSRAPEDLRPGYCDVRREAAFNLHLIYMKSGATDLARRILKTYCTV

SEQ ID NO: 282384 - protein, 41 aa, Zea mays
  Clone ID: MRT4577_20632C.1.pep
RDSLQKPSLNNTLLHTTALPLIKDIDHYEIYKGYDAINSAS

SEQ ID NO: 282385 - protein, 91 aa, Zea mays
  Clone ID: MRT4577_20633C.1.pep
PIPGFVRVKMSNVLRGVINQGPEYSFFLALMAFKGPLDLGIGLGSGVPFFSDPKKFGWGFPFHRPQWVVNPKPGWVTRVQLSPFIPGPGPL

SEQ ID NO: 282386 - protein, 321 aa, Zea mays
  Clone ID: MRT4577_20634C.1.pep
MESTTAAATAAAAPAPVLLVTNDDGIDAPGLRFLVDRLVAAGRYRVLVCAPDTDKSGVSHCITWRPALRCKRVDIIGATAFGVSGTPADCASLGISGKLFDGLVPDLVLSGINIGNNCGYHVIYSGTVAGAREAFLYGIPAIAMSYDWVAGRSSVNDLKVSAEVCMPLINAIVTEIKNGTYPQGSFLNVDVPTDAAHHKGYKITKQGTYMARISWEQTVYKKPAVESYQTANMDVDGEKDSELVTSENDLLFKRVIVGRSSNGVEGEETDHNSLVDGYITVTPLGALSRTEPDAIPYFKACVSRLVDNFSSPGSSFSRSRG

SEQ ID NO: 282387 - protein, 85 aa, Zea mays
  Clone ID: MRT4577_20635C.1.pep
HRRHLQHRRSCKLPTSAGACLLSFPGRDLTRRVAYSQLSLSTPGQCSRKDGAVYQHRRGAQKPIKCLHAPMRVRPAQVSASCRLP

SEQ ID NO: 282388 - protein, 93 aa, Zea mays
  Clone ID: MRT4577_20636C.1.pep
DFGSSPPPVLFLLIYRLDWIFFGRVTFNGASPFSSSRISGLGQETFPIGADFLWSPRLVSKGGTFICYHALLWPKSYPLCLFQEIDWVFFSFF

SEQ ID NO: 282389 - protein, 60 aa, Zea mays
  Clone ID: MRT4577_20637C.1.pep
DKTEEDDQLHQRRMSTNSSLQGSSVVTKMSQDPQSWMESFLILLFLTQTYIYPKDIFYPT

SEQ ID NO: 282390 - protein, 85 aa, Zea mays
  Clone ID: MRT4577_20638C.1.pep
SNDPAGCQGGRRTPVPQRGASSSFSGMVAAGSADGARERRGRAEQVGEEPGDLIGVSRGGAGGAVRRPRRWNRGQRGGTSRPGGK

SEQ ID NO: 282391 - protein, 64 aa, Zea mays
  Clone ID: MRT4577_20639C.1.pep
PAGYKKNDSPLCPSKPTPAKPCPSPLSGTDRLCYPGAGSAPAAPHMRHSMLGDQHGLPEDDNKR

SEQ ID NO: 282392 - protein, 132 aa, Zea mays
  Clone ID: MRT4577_2063C.1.pep
PAGEPWVEVKFEDEKQGKVQVVASPLIRLTNKPNATIEDIGSPERLIASLGPFVTGNTFDSDELVDTNVENVDGQTYYSYVLETPLALTGSHNLAKATAKGSTVVLFVASANDKQWPASQKVLKAIVDSFQI

SEQ ID NO: 282393 - protein, 66 aa, Zea mays
  Clone ID: MRT4577_20640C.1.pep
MVIYSLAACFPIYKIHKSLKLACHRHVLRSMACHESREALPPLYLWHHQSKIGKAPTRRHICMLIY

SEQ ID NO: 282394 - protein, 35 aa, Zea mays
  Clone ID: MRT4577_20641C.1.pep
QSDSKISRMFLQKCQSYCAVQLALKSFLQLGFWYR

SEQ ID NO: 282395 - protein, 79 aa, Zea mays
  Clone ID: MRT4577_20642C.1.pep
IQTIQNHNFDPLVIGGDKGDHLGGGYWKNKPGTHYNSTGYGGKKNRVGGLKRKPGGATLNLIYGGPNKHLIFFTFFSWV

SEQ ID NO: 282396 - protein, 129 aa, Zea mays
  Clone ID: MRT4577_20643C.1.pep
RNRQGFNGGPNEGTRNYPQTMGFLNKPSPDPLWGPISGRGKAIPRSPFLGARARQIFFSRTKRPKKKKQGVSVRFPPASLDKGLNGPFWGGQLFSLSKTWGGEGTHPAPLGGRWFPPASAARGGRRGIG

SEQ ID NO: 282397 - protein, 113 aa, Zea mays
  Clone ID: MRT4577_20644C.1.pep
TLTITIFILICIKNTYYSLRSKFLLVTLIFKLKRTPNITILSAVHILLDGSYHGEGGREKHGRPSPFHSTTRKGGRGPNLFLRPLEHKHRTGPAPTPHNGGPSFSRPGCSTAP

SEQ ID NO: 282398 - protein, 114 aa, Zea mays
  Clone ID: MRT4577_20645C.1.pep
MASYRPYAPPPQHPPPPPPPPQGGYPPQMNSYAPPPQQAPYSRMPAPTYHAGPPPPPPPGPPPPHQPQFNFGPGPPQQLPPPPPPQMYYQPPPPPYGGNSNPPPPPSAPPPASV

SEQ ID NO: 282399 - protein, 165 aa, Zea mays
  Clone ID: MRT4577_20646C.1.pep
DVKDSDAEMSVHQSLGRSRARIKCRIMHQVISLSKITMRSRKNNETRRLKGGLWLLSGGNMVIGSILPASVLNSFRRGSSVSSSQQSVPRSSGKKKARENKKNRPKKIFRIENKRDPKKEFGWLGSAGKSAYRSISYTERPVIWSVELEYYRVVTAISLHLRRTD

SEQ ID NO: 282400 - protein, 108 aa, Zea mays
  unsure (1)..(108): unsure at all Xaa locations
  Clone ID: MRT4577_20647C.1.pep
MDDDEDIQPLVCERGTAMDTGGFADDYAPRACLPRLVXRTRHTDVMVAMGHXDLYVGTEAPSKXRCILTLKYPMEHSIVSTCDDMDKFLHHTLYKQVHVVPEEHPAML

SEQ ID NO: 282401 - protein, 168 aa, Zea mays
  Clone ID: MRT4577_20648C.1.pep
VAVAPLSDMAARRGLRTSPSSTPTSVIVAAVSRCTCSSPSCGTDAEPASANHGWLTSLRTVVYDAVRLPLESVILSLLAPVAPAAPHLAAPLLLPFLLTMARCSRQEPASTMPSDSGVAASFPLPAAIAPADSHLAAPLLLPFLLTMARCSRQEPASPMPSDSGVATA

SEQ ID NO: 282402 - protein, 101 aa, Zea mays
  Clone ID: MRT4577_20649C.1.pep
FSGSADSAQRVEVIVTHQPAVEVGGGGKAGEALGIALRLALDARGRRGPPDSARVTTDVGCRIDRCRRRAKDLDPDTGGDGASPLDMSPPSKCFSEKSYYS

SEQ ID NO: 282403 - protein, 257 aa, Zea mays
  Clone ID: MRT4577_2064C.1.pep
MDPKGKGIVINDKEKESFVNEPKDDKPTDSGSGHKRKDGKKKTRRIKEIVYYDSDESSSSQQDNDDYEKKKTNPRYTKMTPEEILGKFVSGRMMIKEARYVDDALNGPINEPQPLALKATRSKETLPSKVAQIEAAGLNDEEMALIIKRFKTALKGRKGQPSKTKTKGKRSCFKFGKLGHFIANCPDNDSDQDQGNKREKKKNYKKAKGEAHLGKEWDSDCSSSDSDNEGLAATAFNKSSLFPNERHTCLMAREKKV

SEQ ID NO: 282404 - protein, 42 aa, Zea mays
  Clone ID: MRT4577_20650C.1.pep
SCVEVALAFRHGNLENLSSQTYFPAIRSCYIKLTNLLHNRCN

SEQ ID NO: 282405 - protein, 86 aa, Zea mays
  unsure (1)..(86): unsure at all Xaa locations
  Clone ID: MRT4577_20651C.1.pep
GPSWADVLRAIQPEPQVMFQVLKQRTDGATAAALGRAFGAKPYLVFDPQAPVMSGGENNDSERSAPGAPEEEDDXXEWEFMGGLPV

SEQ ID NO: 282406 - protein, 102 aa, Zea mays
  unsure (1)..(102): unsure at all Xaa locations
  Clone ID: MRT4577_20652C.1.pep
DGATAAALGRAFGAKPYLVFDPQAPVMSGGENNDLERSAPGAPQEENXXEWEFMGGLPVLIRGRPPPPGETRRVRPQEIVNGRPALVFIKTPPPRGWIVSWS

SEQ ID NO: 282407 - protein, 70 aa, Zea mays
  unsure (1)..(70): unsure at all Xaa locations
  Clone ID: MRT4577_20653C.1.pep
AGPVADKGHYGYKFFEKEVPEDADFQKDEMTDIIXGVTKGKGNEGVTTPGYGAGRDLIIETTRGQRRMTP

SEQ ID NO: 282408 - protein, 58 aa, Zea mays
  unsure (1)..(58): unsure at all Xaa locations
  Clone ID: MRT4577_20654C.1.pep
MYSLQVLKRGLQQITGHGGLRGYLRVFFRTNDAKVGTLVGADXYGHXYYEDNKPFLAS

SEQ ID NO: 282409 - protein, 39 aa, Zea mays
  Clone ID: MRT4577_20655C.1.pep
ASHPSELNDKIRHCGIMDVEFRRVRCKYPADHEIYLYIL

SEQ ID NO: 282410 - protein, 85 aa, Zea mays
  unsure (1)..(85): unsure at all Xaa locations
  Clone ID: MRT4577_20656C.1.pep
RIIHRRGLRXGDPLSPMLFILVMDVLGYLIKEAANDGLMVPLIESSVHNRISIYADDVVIFLHPVALDLVITMDIIRIFGEAAGL

SEQ ID NO: 282411 - protein, 111 aa, Zea mays
  unsure (1)..(111): unsure at all Xaa locations
  Clone ID: MRT4577_20657C.1.pep
KVLIAALALLALASSAGWQSSXGCGCHTPPSHLPSAHYMPPXPVYLSPRHHHAPWQYPTQPPQLSPCRXFRSCGVASRPQPXLGQSVQVLRHNSNPXAATPYGSPQSQGAA

SEQ ID NO: 282412 - protein, 97 aa, Zea mays
  Clone ID: MRT4577_20658C.1.pep
QQLHLQSPNLQPYNTGGPYIPYLGFIKTNFWDGGITYTKKPPAFGGFNSRAQKTKPSPGGLKALQKLLFVESSKGGMLNITSPFFWPSRAQIIGPVG

SEQ ID NO: 282413 - protein, 51 aa, Zea mays
  Clone ID: MRT4577_20659C.1.pep
LPKLQHPEISQVVTNVSPTDDPALTNTAGYPIPGFDLGPRTALHPSPVLVG

SEQ ID NO: 282414 - protein, 79 aa, Zea mays
  Clone ID: MRT4577_2065C.1.pep
RRSEHRAKNDAVGSSASAAITTCASVGGDPSGCQQFLGVRQVLSESRGAGSSRWYRLALVVQQRQGQGRWPALASVSSS

SEQ ID NO: 282415 - protein, 149 aa, Zea mays
  unsure (1)..(149): unsure at all Xaa locations
  Clone ID: MRT4577_20660C.1.pep
GVGLLVAGLXESGAHLYYNCPSGNYFEYQAFAIGSRSQAAKTFLERRFQGYDDYTPEQLVRDALSAVKETLQGEKLSGSNCTVAIVGRKDDGTVEPFEVIGAARVQELIDSMEMEVAEETPTAEAAAASSSVQEEGERGSDDAAAPMDI

SEQ ID NO: 282416 - protein, 104 aa, Zea mays
  Clone ID: MRT4577_20661C.1.pep
PTRTPTLAPTYAYTNTKKKKEHCKISNGLNKPRYHTHSYHFITLQYQHLPPLTFYHFTQLQNYQNPIHSQLISNYITHTTLHSPNFLDFQTTHIYPHKYIPNST

SEQ ID NO: 282417 - protein, 277 aa, Zea mays
  Clone ID: MRT4577_20662C.1.pep
MFRNQYDTDVTTWSPQGRLFQVEYAMEAVKQGSACVGLRSRTHAVLAAVNKPASELSSYQRKVFRVADHAGVALAGLTADGRVLSRFLRNECINHSFVYEAPLPVSRLALRLADKAQVCTQRSWKRPYGVGLLVAGLDESGAHLYYNCPSGNYFEYQAFAIGSRSQAAKTFLERRFQGYDDYTPEQLVRDALSAVKETLQGEKLSGSNCTVAIVGRKDDGTVEPFEVIGAARVQELIDSMEMEVAEQAPPLEAAAASSSMQEEGERGSDDAAAPMDI

SEQ ID NO: 282418 - protein, 994 aa, Zea mays
  unsure (1)..(994): unsure at all Xaa locations
  Clone ID: MRT4577_20663C.1.pep
MAQPKRMQEWEAERLICGDPVSALRPALEWAVQVKYFGCYTERPPATVTYQEFLSTQPPLLIKAEDPLDTDVWLHVVESKFPLLTGDYPDDTKTRFAAQQLRRPARTWWDHLCAMLPAGHEVSWEEFKTAFKGHHIPARILDHKLNDFLALNQGTHTVLQYAQAFNDLCQYTGYHVDSDEKKKDRFCRGLNTKLRERLNNVRADSFNELVNLAISQEDCIIAHRAEKKRKAPMNNQPQQHQQFRQGNGNKCFTCGSVGHYAKNCLKNQQRQMPAPNQDRGRKQKVQVRQGKLNLTTLEELPEGAHIMTSIFLVFNQPALILFDSGASHSFISQKFGAKCQLHFYHTKASFMIATLGGKIATNQLNRNVTISLGSKIIKTTLLILGLEGMDIILEADWMTQHRVVLDVAARTLEIRSXPLETLHYIYPXDSTRSYAFAMIELPLKKILVVCEYADVFPDNLPGMPPDREIEFIIELQPGTTSISKRPYRMPPAELAELKKQLQELLDKGFIRPSTSPWGCPALLVKKKDEILRLCTDYHPLNAVTIKNKYHLPRIDVLFDQLVGAKMFSKINLRSGYHQIKIRASDILKTVFSTRYGLYEYLVMSFGLTNMPAYFMYLMNSIFMPELDKFVVVFIDDILVYTKNEEEHTGHLHIVLQRLREHRLYAKLLKNHKSLKYIFTQADLNMRQRRWLELIKDYDLEVHYHPVKANVVADALSRKSKCNYVMMDSRINTLCDELSKMKIEVIPSGALSHISVEPTLQDRIIMAQLSDKGVQIIKENLHQKPEKYKCFRQDGKGILWFGRRLVVRKNKDLKKKILDEAHLSKFSMHLGSTKMYHDLKPLYWWTGMKREIARYVSECDTCQRIKASHLKLAGALQPLSIPSWKWDDISMDFIVGLPNTSRHHDSIWVIVDRLTKVANFLPVHTTDKAQKYTELYIDQIVCLHGLPQTIVSDRGTQFVARFFDQLQESLGTKLMRSSAYHPQADCGGTSRIILA

SEQ ID NO: 282419 - protein, 448 aa, Zea mays
  Clone ID: MRT4577_20664C.1.pep
MAEIHAFRPSTMTKRSRLLAAALCRVRDPDSTVRATLVCATAGAAALAPLADTVLHEPDQCAQLAAALAAAVAVEASEPTDDLAAYLRRLLPRLYKLLRSAAFKAKPRSSPSSALPRQPLAVEPPPPPCLSRPRFASPTRTPRRDSPPAREPPTAIPLPPAANPPPSDPPTGLPPWTRWGRWLGLVTAVWVQCISGNNYTFSNYSHALKTLMGLTQLQLNGLSVAKDVGKAFGLLAGLASDRVPTWLLLAVGSLEGLLGYGAQWMVVSGAVAPLPYWQMCVFLCLGGNSTTWMNTAVLVTCIRNFRRSRGPVSGLLKGYVGLSTAIFTDTCSALFADDPASFLVMLAVVPAAVCALAMVFLREGAAAADEDDDGRCFAAINSLAVAIALYLLAADLTGLGGGGGVVFVAVLLVLLASPAAVPAILAWKSWAETRKAANADLEEADSLA

SEQ ID NO: 282420 - protein, 68 aa, Zea mays
  Clone ID: MRT4577_20665C.1.pep
PHRYFLGAHINSNNIIQPKTTPLPSVFLFVANLSCNNGCILFVTKHATPPCLLFSISSYQHFPFTISQ

SEQ ID NO: 282421 - protein, 113 aa, Zea mays
  unsure (1)..(113): unsure at all Xaa locations
  Clone ID: MRT4577_20666C.1.pep
GVRLGGRGRGSGPNWLLSPLRPPRPXXFXXRMLPYTRSIVSRGLEGVSQGRGQPASAWVSGRREGSGRRGERGGRVGTATAAQISKSRNCKCELQRSLLLMQRGIASARTGFF

SEQ ID NO: 282422 - protein, 311 aa, Zea mays
  Clone ID: MRT4577_20667C.1.pep
APRQEPSSSSPRSPSPPEPFTYNFGAGSTGGGGGDGAVAALPAPRQEPSSSPPRSPSPPKPFTYKQKAVWRWRWKRQRGRGAGRGRGGATGPKLSYLPSPLSRPFSGDEEFFALRHDWLQLLDGKKTYLRGTVDSNYADSNFVTPKPLTDAVLCKESLSDLVLRGARKPITQQKFKILSEHYVCFRPMRTDGSQFYRAFLFSYLENLGKMQGSQAEVTRLMECVARSKVNFCRLEWNKAYFSNPKAFFSSVVSEFEHLVNSVANGLNADELYKISVQEISSSRILCLLRLLTEVHIRTHEVDYNRELSQNR

SEQ ID NO: 282423 - protein, 46 aa, Zea mays
  Clone ID: MRT4577_20668C.1.pep
GSPLCITDHMNNLHTCDMPLDLGSRKDLSRFLCSWRIVTILCIEQS

SEQ ID NO: 282424 - protein, 67 aa, Zea mays
  Clone ID: MRT4577_20669C.1.pep
VGFNGALGFGIYNGLRVSHEGFGSTIGAIDGALEGNGNNPAQINAGVGCYKQTCHQLRVEPGASFTW

SEQ ID NO: 282425 - protein, 82 aa, Zea mays
  Clone ID: MRT4577_2066C.1.pep
NNQDSPTPAPKLTPPPHQASACGTRPNTSARRRAITIPAERIKKPYCKSAGKLAFSPPPLPLFRRCDLFKFSPPGRVVFFFS

SEQ ID NO: 282426 - protein, 70 aa, Zea mays
  Clone ID: MRT4577_20670C.1.pep
PTREKIRIRIPGHPWRVMKKKLQTYCFFSKHGFWPTTPQISNKSGPPLNTVTKFGLVPGPPRNHPYLQPS

SEQ ID NO: 282427 - protein, 67 aa, Zea mays
  Clone ID: MRT4577_20671C.1.pep
QAFSWRRRPPGRSPTTMDPVLAAALQVHKDDTYDTCSRWSEAPPAGGTGRGTSLCFYFPFFFLNLEM

SEQ ID NO: 282428 - protein, 41 aa, Zea mays
  Clone ID: MRT4577_20672C.1.pep
QNFILKVKIKHLKEKFFTIITTNIKIMHLNISGNYSKEKLF

SEQ ID NO: 282429 - protein, 123 aa, Zea mays
  Clone ID: MRT4577_20673C.1.pep
GEKNTPGEVGLFIGKHRQKQGARGRGKLKKGEQTYRGGFWNLVIQKKPGGFYWLYERRGSQNRGLCRGKIQGGGSGSRSGSGALFSLGGGMGGSPLGKRGFNISQRHTRFFFFGPLGFFLEEG

SEQ ID NO: 282430 - protein, 100 aa, Zea mays
  Clone ID: MRT4577_20674C.1.pep
LGTSRPAGNTFSEREELPALLSYGQLSHPVVRPWSSISSAHGVTAAGGPRPLRIVRSLPLSTRRHAHAQSKSMPPGTIAARATSMTAARVALRGERGLSP

SEQ ID NO: 282431 - protein, 83 aa, Zea mays
  Clone ID: MRT4577_20675C.1.pep
YQTTLEKAAPTEARGTPPKTGHPFFLPRATEEDPMFSHNTCTAINPNPDNLPHPAHRRDNLQRRHGPTQPPKPPINWATLNPS

SEQ ID NO: 282432 - protein, 122 aa, Zea mays
  unsure (1)..(122): unsure at all Xaa locations
  Clone ID: MRT4577_20676C.1.pep
HYVGSVNYEFWGGREGYQAALSTDMNRELGHLVNYLHAAVDYKKKMGLNGPLWVDPKPQEPGEHLDDWDGATALALVLRYGLTGELKINAXRNHASVYGHSCHYELGTARINGLLGKMEANT

SEQ ID NO: 282433 - protein, 284 aa, Zea mays
  Clone ID: MRT4577_20677C.1.pep
PTRPPTRPPTRPPTRPVKSITKEDLENYIATHYTAPRMVITAAGNVKHEDIVEQAKKLFNKLSTDPTTTNMLVAKQPASFTGSEVRIIDDDMPLAQFAVAFNGASWVDPDSVALMVMQSMLGSWNKSAGGGKHMGSELVQKAAINDIAESVMSFNMNYKDTGLFGVYAVAKADCLDDLAFAIMHEMSKLSYRVTEEDVIRARNQLKSSIQLHLDGSTAVVEDIGRQLLTYGRRIPTPELFARIDAVDASTVKRVANRFIFDQVLFWQPRTSHPVERSASLCFLL

SEQ ID NO: 282434 - protein, 98 aa, Zea mays
  Clone ID: MRT4577_20678C.1.pep
KTSPNWWLRRQKARPIPRPRPRWFLKGPLCHCFCKKNVGHPTCGQLLWLICVQKPLKLGQSKLSVGQSLDSYEFRSGMSLRIGLGFKKKKRGPLGMIF

SEQ ID NO: 282435 - protein, 38 aa, Zea mays
  Clone ID: MRT4577_20679C.1.pep
CVCEWLFLSGSSYVCPCVQLLFISLYIEMVGMQAGVGN

SEQ ID NO: 282436 - protein, 98 aa, Zea mays
  Clone ID: MRT4577_2067C.1.pep
PISLDLDGFPVPLTAVTLRALRTCYTGPHYSWKAIKYKVWSFNRVIREAMLYGALTDPANTALGYYIHLQERSFPDEKFVLKHTALGVLFMANAGPNT

SEQ ID NO: 282437 - protein, 60 aa, Zea mays
  unsure (1)..(60): unsure at all Xaa locations
  Clone ID: MRT4577_20680C.1.pep
GGRGAFQKKGIRGRLIRLPSAXPGDMDMATEKKAKPDLKKKAMPPVIVTQRGPXGPLELS

SEQ ID NO: 282438 - protein, 68 aa, Zea mays
  Clone ID: MRT4577_20681C.1.pep
RFKTPRDENGHGTHTLSTAGGAGVRGSSAFGYAAGTVRGGYSRARVVVFRVCFRPVNGSECFDSDILG

SEQ ID NO: 282439 - protein, 109 aa, Zea mays
  Clone ID: MRT4577_20682C.1.pep
HCIAWNPIFGWINPPSCFLTSLRFVGNGRETLTGGHAWMEMQPATHARERLVLMRLFLAVCMGGIIIIDGNVGISHSSKIIDVVSKEFLWTNSERRNVLHPRSLTVGPN

SEQ ID NO: 282440 - protein, 126 aa, Zea mays
  unsure (1)..(126): unsure at all Xaa locations
  Clone ID: MRT4577_20683C.1.pep
MNTYKPYSERAKQHSNACARSLLELMERKQTNLSVAVDVTTKKELISIADAIGPYICVLKTHIDIVEDFDADLIQQLQELAKKHDFLFFEDRXFADIGNTVKHPYANAIYKIASWSHITNAHTVAR

SEQ ID NO: 282441 - protein, 189 aa, Zea mays
  Clone ID: MRT4577_20684C.1.pep
MKLGAKGLGLLLLLVLLALCSTIEVGEARRDRHWRSSRTSSSQLLKKGKGKKTSSRRQYGSNRPSPKPPASSTPSSGAGGKGNQTPYQPSPNVPHIPRPSPPANGSAHSTPKPPTPPSCGKAHQQPSQSQGAHSSLHRSIHFLLPWSLICADTLVLIFFGAWNLHSTLFQNPASEILFFGIFPLLFLVL

SEQ ID NO: 282442 - protein, 195 aa, Zea mays
  Clone ID: MRT4577_20685C.1.pep
MKLSIQSLARKLSLPSPKRGGGGIVEDGKKKKKRSLSRGEAPSFASSSSSSSSSSATTTPRSVLAAAPAPALEIPRRELEAVLRRLGHAEPSDAELDAVAALAAQPPPCDADADADGDLMEAFRVFDADGDGRITAEELRAVLDAVLGGGPDACSLDDCRRMIGGVDADGDGFVGFQDFARMMMASAGTADARAF

SEQ ID NO: 282443 - protein, 477 aa, Zea mays
  unsure (1)..(477): unsure at all Xaa locations
  Clone ID: MRT4577_20686C.1.pep
MVRRRNPSVVEFSSDSDEIQEESPIPSPPPRRSLSKRGRGSGRMPGEGSSLPSQPTRGRRQKVGASRPRRSTSSSGYAPCQEEDGAFDDFVDLPAPDALYVTGLHMHPANVSRGPHESPIDFTQKGIETLQRLRFSNPTLTPRHPGVQDPRFWNLFQADFYNSVILTKKHPVVRHRFIDWEGCRIXGDVDMSSALVHLERKGLRNIMTMEYPWNDEVVAQFYATLWIKKVDEEAMGMITQSLYFFIQGNWHKVSYRRFAHIXGFSDTDIQGSNMRVHDIRLPMREETELFHVSTEREFWTTANMHRYYRYLNSLSRMTVLPKGGNQMNVXGELSXLLLLLTPNSLARINVFDMIWEEIVRASWSPLKGCVHAPFIMKMIEVVTQTHFEKPVKHSRYVKKWVDSSNPDARTKRAPSRSGGPASSTEPPSQPPHHPSSSHPAAASHPSPGHGSPMPRARGRGRGRRTGWVLAWSMGLRP

SEQ ID NO: 282444 - protein, 39 aa, Zea mays
  Clone ID: MRT4577_20687C.1.pep
LDPTLLLKRFLLTIEERCLTHNDQGKLSFDQLGGISSRN

SEQ ID NO: 282445 - protein, 148 aa, Zea mays
  unsure (1)..(148): unsure at all Xaa locations
  Clone ID: MRT4577_20688C.1.pep
QKQQMVLPVLXRVDLSTLSLYYXLPQFLPFNRVSXTNPVWLLAXMVLPLTKXAKAYYCRRXIIPFRQLAALXPKVICASXILKPVSQLAATSRASLLTQQQLMPFYHQFAANPATLXLQVQQMLPFDQLALTNPAASYHQHNIGGALF

SEQ ID NO: 282446 - protein, 82 aa, Zea mays
  Clone ID: MRT4577_20689C.1.pep
KYGLGSTQFAFCPSDPSRYHQNGAPQAEARSPCPIMSIIVHDVLRHNGSLVAAPSACVVWCCSSFIAVCVECENSVHIVCRA

SEQ ID NO: 282447 - protein, 71 aa, Zea mays
  Clone ID: MRT4577_2068C.1.pep
RITDVMICAGASGVSSCMGDSGGPLVCQKDGAWTLVGIVSWGSDTCSTSSPGVYARVTKLIPWVQKILAAN

SEQ ID NO: 282448 - protein, 137 aa, Zea mays
  Clone ID: MRT4577_20690C.1.pep
MAAKKLVLKLDLHDDKDKQKVLKAVSTLHGIDSISVDMKGSNLTVVGLADPVDVVARLRKVAAAEIVSVGPAKEDKKEGDKKEGDKKKKDDEKKQQVLWYPHPWHAAAAAQQYHPHPYPPQYAVHSAEEDPNSCAIC

SEQ ID NO: 282449 - protein, 84 aa, Zea mays
  Clone ID: MRT4577_20691C.1.pep
KRSDGGALHFVIYSPVDQESRPKFPWIYHRGVLFKWNGMYGPHPPRFIGGLIRVSSFVFVEALSETVVSFFSFLPCHYMVCLCV

SEQ ID NO: 282450 - protein, 53 aa, Zea mays
  Clone ID: MRT4577_20692C.1.pep
PRVRPRVRHALVSLPLNLYSGLWNADYWATCGCREKTDWFNSPFVVYLLRFSL

SEQ ID NO: 282451 - protein, 107 aa, Zea mays
  Clone ID: MRT4577_20693C.1.pep
RTERPPSSPLAAKGGEHLPWSGLTARMQRRTRYATKGRTNGASGPALSDHPTILHGYVLRPRAWCIHRQRRFHHLTLPVLAGALSVHLHCPPESPYEPAQDAFQTQA

SEQ ID NO: 282452 - protein, 95 aa, Zea mays
  Clone ID: MRT4577_20694C.1.pep
KKGGLSTTDQSGAHRPGRDDLRMDEVNYTKLSYPVRPYAAFLAVCVPYLDLSLLYSLLWSNYMIIIYLAPCMYATIHTSLHRYVYHIIYANRMLS

SEQ ID NO: 282453 - protein, 49 aa, Zea mays
  Clone ID: MRT4577_20695C.1.pep
MGVLEDQRISNGEHGCQERTVDPFSKEDWYDIQGPSVFSVRNIGKTLVS

SEQ ID NO: 282454 - protein, 85 aa, Zea mays
  Clone ID: MRT4577_20696C.1.pep
GSHELCLTIPDLGVASTVSPGCALTTRTVPRCSQTNSRTHPLVLAAADHGDTLRRLPDPQYLLPELAPSDTFLEDLHHKKEHSRL

SEQ ID NO: 282455 - protein, 73 aa, Zea mays
  Clone ID: MRT4577_20697C.1.pep
SFLSSRCQCLNPWKEKKKRGSPLKPFFPRPGWHPTMARPPPAAPAPVRLLLIFENSRLLRRVQRDEGLSFFWF

SEQ ID NO: 282456 - protein, 55 aa, Zea mays
  Clone ID: MRT4577_20698C.1.pep
QEDTYGRRIAQLKAELGSASQSALCMDESRPSTRLRTMRWNTSRTILSSGSRPSL

SEQ ID NO: 282457 - protein, 435 aa, Zea mays
  unsure (1)..(435): unsure at all Xaa locations
  Clone ID: MRT4577_20699C.1.pep
MVRMRFPKRYLIVLLTFICTNVCYIERVGFSIAYTVAADAIGVNQANKGMILSMFYYGYVLSQIPGGWAAQRIGGRRVLLLSFVLWSMICGLIPLDPNRVTILVLSRLFVGVAQGFIFPAIHTVLAQWVPPQERSRSVSLTTSGMYLGAAGGMLFFPSLVKHTGPQSVFFVEAVLGVAWSVIWLKFSSDPPRTDLPKVXAESGISGXIKAQAGGVVAPRTLMIPWRRIIFSLPVWAIVVNNFTFHYALYVLMNWLPTYFELGLKLSLQDMGSSKMLPYFNMFIFSNIGGVIADHLITRRILSVTKTRKLLNTIGFIISAFALMALPLFSTPSGTVTCSAISLGFLALGRAGFAVNHMDVAPKFAGIVMGVSNTAGTLAGIVGVGLTGNILEAAKASNKDLTDSETWKTVFFVPAYLCIFSSVIFLIFSTGEKIFE

SEQ ID NO: 282458 - protein, 61 aa, Zea mays
  unsure (1)..(61): unsure at all Xaa locations
  Clone ID: MRT4577_2069C.1.pep
LSPPKIVKLGKIYLFDGDPKLLFQELSYDSGYXLDNVFGPHGKILKLPHPCGAPNYRKRIS

SEQ ID NO: 282459 - protein, 77 aa, Zea mays
  Clone ID: MRT4577_206C.1.pep
ASLEERVWSFDVELQCLAGTAGRKDFGDVKTVLTQNAPSVTPLQVESYANGRIAKRIIVAITTTPFVGGCLPFTLEP

SEQ ID NO: 282460 - protein, 64 aa, Zea mays
  Clone ID: MRT4577_20700C.1.pep
HVSFELSKLALCHLLLIWVLDVFLVCSNMTRHIIRIKPVLDDFIQMTQCDRYSNLLTENQSTEI

SEQ ID NO: 282461 - protein, 125 aa, Zea mays
  Clone ID: MRT4577_20701C.1.pep
YQVMHMERPMLATLHMNRIYPRQQYTYKQGDSDPHSAMAVEDIDFCPSCFAQSCKLSFRYSQDCHHLCVPMKAIIQLGSFITALPCHSKCCTTCSLSMWSTIDITLSKSLLVPFVPSKVPRLYSR

SEQ ID NO: 282462 - protein, 58 aa, Zea mays
  Clone ID: MRT4577_20702C.1.pep
HRYQAIFGLVLQSILKQQPKSGQVAGLLAAQKAQQLTAMWGLQQPTPCPYAAAGGVPH

SEQ ID NO: 282463 - protein, 60 aa, Zea mays
  Clone ID: MRT4577_20703C.1.pep
YETEMGIYFFPGRNSYGGETIIRVLMDTGRNAYKALRFEMLISSDIHVGIRHGQARWGLY

SEQ ID NO: 282464 - protein, 506 aa, Zea mays
  Clone ID: MRT4577_20704C.1.pep
GPPCFHPPVHQFRGPPMFNLRPQMKLNQPGVSYPMHDAVDRFSTHMHPFGWPNHLDESCPPHMQVWNGGSSVFPGEPYIYGRQEWDQNRPHGGSRGWELTGDISKGPNDVPDAELLIAKKDPYSAITAVSDSGGQHNLQPQAEQKEIGHLTAEKFETKDDSKSSKSLESLQGVQHVTSMLTKNGAVFCKDYLARINVSHDLVESELYKRCISLLGDLGVTKASHLVRNGIQQDNENIEKMSTKYGHLNPFSSRYLKSDSTIFQRALALRNNQTRKGLIIVSASVKMEANMDVLEDDHGKEMLEQVVSNPALQRHTEVMEEGSLSKQELGDGIEGTIPATIGSGGLDAPPEIPQPEVVVATTAITQFNKDMEDVLPPAIEDGALQATLEHAVGILEVTPGDGLGNVAPSSGDDMEIMPSAMTEPRLGKETAPVASPPDSQEKPSIMHDSETGMEVDKVIDDIHGDGRVSSILGTKLDVAASDGDSEALLVESRVNLSRIPNSPESTH

SEQ ID NO: 282465 - protein, 144 aa, Zea mays
  Clone ID: MRT4577_20705C.1.pep
MDCLNLRTSFRVLLSIQLLLSSFSPLIVANLSSEKQALLDFVSAVYHGNKLNWDKHTSVCSWHGVKCSEDQSQVFELRVPAAGLIGRKGKDEIDVESKGKGTATRSEKPKQEFSSGGQIAEMNKLVFLEGCTYSFDLEDLLRAS

SEQ ID NO: 282466 - protein, 636 aa, Zea mays
  Clone ID: MRT4577_20706C.1.pep
MDCLNLRTSFRVLLSIQLLLSSFSPLIVANLSSEKQALLDFVSAVYHGNKLNWDKHTSVCSWHGVKCSEDQSQVFELRVPAAGLIGVISPNTLGKLYSLQVLSLRSNRLTGSLPADVASLPSLRSIYLQHNELSGGLPSSFSPNLSVIDFSYNSFTGEVPASLQNLTQLTVLNLQDNSFSGSIPDLKLHSLKLLNLSNNELKGSIPRSLQKFPKGSFSGNPGLCGLPLAECSHPSPARSPESSPSPQSPPLTHHDKKLGTGFIVAVAVGGFALLMLVVVVCFSKRKGKDEIDVESKGKGTATRSEKPKQEFSSGGQIAEKNKLVFLEGCTYSFDLEDLLRASAEVLGKGSYGTAYKAILEDGTVVVVKRLKDVVAGKREFEQQMELIERLGKHANLLPLRAYYYSKDEKLIVYDYIDTGSVSAMLHGIRGVTAKTPLDWNSRMKVILGTAYGIAHIHSEGGAKLTHGNVKSTNVLVDQDHNPSVSDYGLSALTSVPVNASRVVVGYRAPEIVENRKITQKSDVYSFGVLLMEMLTGKAPLQTQGNDDVVDLPRWVHSVVREEWTAEVFDVELMKHQNIEEELVQMLQIAMVCTAKSPDRRPTMEEVIRMIEGLRQSTSESRASSDEKSKESNPPSV

SEQ ID NO: 282467 - protein, 99 aa, Zea mays
  unsure (1)..(99): unsure at all Xaa locations
  Clone ID: MRT4577_20707C.1.pep
TPQQPPQKPTRRKENPPATTHSHKMTXADTLKAPLFVDWXLSPSRVPIDXTPFAPLLADEHIHSYFEVILSQHCSFFPSKVNINISHLKWSYSKKPKQA

SEQ ID NO: 282468 - protein, 65 aa, Zea mays
  Clone ID: MRT4577_20708C.1.pep
RATPGLLHRDNHIVKLTPVPPCINREIVKAFLNLFTHHTLRSVHFLRPPGRPNCIARSSSLNFQG

SEQ ID NO: 282469 - protein, 257 aa, Zea mays
  Clone ID: MRT4577_20709C.1.pep
MAATSPFSSYPSRLHSKTLKPRHSRPLHHKAAPAASAPRPLLLSFPAPARHCGAGLRASAAQKNSADYKFDEDDDDDEEEEYEYDGEEEEWEEEDDEDAMNVEAMEEEARGAAADLAKRLARELHIDDDVREKRRNIRDKTSVSKHIPDNLLPKVAIIGRPNVGKSALFNRLVGGNRAIVVDEPGVTRDRLYGRSYWGDHEFMVIDTGGVITLSKSQAGVMEELAVTTTVGMDGIPLATREAAIARMPSMIEKQAVA

SEQ ID NO: 282470 - protein, 85 aa, Zea mays
  Clone ID: MRT4577_2070C.1.pep
GNKTLTRGGNLTFEAKSSNERPPPKKSKLFFFPPRGGKRRKKEMARGKNTTLRGVPFAQRTNRVGAPVTHKLVGGFSSTARGTGL

SEQ ID NO: 282471 - protein, 85 aa, Zea mays
  Clone ID: MRT4577_20710C.1.pep
RLHSNPDPSDVIRKPLQLGGHIRLYLSLGENMNIPLRLCGGEPCPNEHWHPKELPVLADHFMLLWYKPKNETTWPHDPPHVLLPS

SEQ ID NO: 282472 - protein, 110 aa, Zea mays
  Clone ID: MRT4577_20711C.1.pep
FITRIFMACYCCSIFCFLLLLLVAAAFCSCCSRPLPQVLYAAGAYISLYPIDVDQDQRRAAMVEVIMPPVIEADVTSSSATATASSAAPDFTSKSLALSRKGHSCLNTIS

SEQ ID NO: 282473 - protein, 164 aa, Zea mays
  Clone ID: MRT4577_20712C.1.pep
VLPRAPLKPLKTGLMESAALGAQFPVPKGGAPQRVPPNLGSLQISPNAVEAPRKPRPPGMETPLNGVSGFGRPVPLGWRGPKGQTPFPGSGGSPEHPQTWVGPHRLDPGPGFPVSPFSAPRGGALFSPPPPLGFFWCPRFSSPLLVKERLSLVGVLSPAFFLVP

SEQ ID NO: 282474 - protein, 191 aa, Zea mays
  Clone ID: MRT4577_20713C.1.pep
TGRGAGVLALAAALPSDAQWLERLPEKKKPLYTPSLPCIEGWGRSLGFPQSREDPPVWVAEKPLWDGGFSLDVPALPIRDLKSGPGNFSKDMERRFSSALSREDIGNAILGGPLAEPMAKGVRARHWLVGVGPEEIIPPPPRGVPLSQCKSQWVMCREIIFMGHILGKKKKKKKKKKKKKKKKLKTKQTPP

SEQ ID NO: 282475 - protein, 57 aa, Zea mays
  Clone ID: MRT4577_20714C.1.pep
YNATYLHHTVMLIFIGLYYQPLFMIVCQHIKTANAFFGSRCYLTLDIYISMPSSRLF

SEQ ID NO: 282476 - protein, 60 aa, Zea mays
  Clone ID: MRT4577_20715C.1.pep
HLYATETWDKLLLVHTNWGRAGGLYLNALGILLTHIYSHGGCNDMWDFRNRIGQRVKAGA

SEQ ID NO: 282477 - protein, 36 aa, Zea mays
  Clone ID: MRT4577_20716C.1.pep
QVTLVKSTKKSRKKHTNPLIRYISNRSQLIRMNALD

SEQ ID NO: 282478 - protein, 107 aa, Zea mays
  Clone ID: MRT4577_20717C.1.pep
GEKTVAALALLFAIHSFRPSPFFILDEVDAALDNLNVAKVAGFIRSKSCERVGDEQGSDGESGFQSIVISLKDSFYDKAEALVGVYRDSERSCSRTLTFDLRKYRES

SEQ ID NO: 282479 - protein, 372 aa, Zea mays
  Clone ID: MRT4577_20718C.1.pep
MSNNDKLSKCHNAIFILLLIFLVISWVSLLPYTDWKSKSDECEKVIDELKEQNGNVASTLAKMDRQVKSKEGQLAQLISRQREVHEKCELEQLKLPTVNDPMDTGTSSQEPILDYSQLSKSHLQDIRPSERDKHEAEFKKRTGVLLADIERTAPNLKALDQYDALQQKEKEVTERFEAARKEEREISDKYNSVKQRRYELFMEAFDHISKGIDKIYKQLTKSHTHPLGGTAYLNLENEDEPFLHGIKYTAMPPTKRFRDMEQLSGGEKTVAALALLFAIHSFRPSPFFILDEVDAALDNLNVAKVAGFIRSKSCERVGDEQGSDGESGFQSIVISLKDSFYDKAEALVGVYRDSERSCSRTLTFDLRKYRES

SEQ ID NO: 282480 - protein, 54 aa, Zea mays
  Clone ID: MRT4577_20719C.1.pep
SIRFMTRISVFTLVGYRFRIGGFLRESRFFLLRCILLDLRFWLWNPIHTSDLIL

SEQ ID NO: 282481 - protein, 66 aa, Zea mays
  Clone ID: MRT4577_2071C.1.pep
KTTGFGMIYDSLDYAKKNEPKHRLARHGLYEKKKTSRKQRKERKNRMKKVRGTAKANVGAGKKPKE

SEQ ID NO: 282482 - protein, 65 aa, Zea mays
  Clone ID: MRT4577_20720C.1.pep
LYRYNSPDLTLSAHNVNSFQLNPQAYYFTTPLTLIAHTRLKLMHKNTRWPYSLTNSLDMPGLRSR

SEQ ID NO: 282483 - protein, 72 aa, Zea mays
  Clone ID: MRT4577_20721C.1.pep
LVAFSVVPRRSSTLARLALNVFLPVRPSYYSFRIITHPVVPPITVIVLWSSGHKVEHGSAPRQFFCRTPPLY

SEQ ID NO: 282484 - protein, 141 aa, Zea mays
  unsure (1)..(141): unsure at all Xaa locations
  Clone ID: MRT4577_20722C.1.pep
RKEGPKAPPIIIKGAPPHPGREEGAPPRTAHTPPPPXPFKPPQRKLQTAHQTTKKATPGPMREQDPDKGGKLNPGXKAKTNPPPQKKANSFFPPREGKKKKKGQGKKTTLQGPPFPNXNKVWGPPPPXLGEGPPSTARGTG

SEQ ID NO: 282485 - protein, 128 aa, Zea mays
  Clone ID: MRT4577_20723C.1.pep
GFPNAVVSLLFLAALTRFTHGFVMSPRTLLNRFSQNSNYYLTTEEHWFYQTLDHYSPYDHRQFKQRYYEFLDYFQVPDGPIFLKICRESSCNGISNDYLSVLAKKFGAGVGSLEHRYYGKNSPFKSHT

SEQ ID NO: 282486 - protein, 75 aa, Zea mays
  Clone ID: MRT4577_20724C.1.pep
QSMPAYMNHWLDICHCHYPSLIGDEDLPTYVFSNLAGQGLIHSSSTLAGCITCFLWQTDLTVSMGCPSSSILGPG

SEQ ID NO: 282487 - protein, 170 aa, Zea mays
  unsure (1)..(170): unsure at all Xaa locations
  Clone ID: MRT4577_20725C.1.pep
MLVYXQDLLSGDELLXDSFTYKELXNGTLXEVEGKRVTQGPVDXDIAANSXADEAGDDESVDDTGAKVADXLADTFRVQEQPPFDKKSYVSYIKKYIKNLTDVMEPEKAYELKKGVKGATKKILSKLKDLKFFVGESMKDKSYVELDYYKDGATNTTLLYFSHGLKEIKR

SEQ ID NO: 282488 - protein, 113 aa, Zea mays
  unsure (1)..(113): unsure at all Xaa locations
  Clone ID: MRT4577_20726C.1.pep
MDPPPATRAASRRRDRRRRLRQRQRAAAATKTKVGAAVLAVEPQSAAVTTPVASIGPAATPASRGRKRRRPRRRRGRNAGAAGVSDEPPAASPVXPFQMPRKQVAIWKQWHHV

SEQ ID NO: 282489 - protein, 65 aa, Zea mays; identical to SEQ ID NO: 264737
  Clone ID: MRT4577_20727C.1.pep

SEQ ID NO: 282490 - protein, 621 aa, Zea mays
  unsure (1)..(621): unsure at all Xaa locations
  Clone ID: MRT4577_20728C.1.pep
LGNSVQSDQFDEMVHPSDVLGPSIPGPTVLLVDCPTQYHMPELFSLHPLSCFYEDSPEQSGKKVNCIIHLGPSPVTRSVDYQNWMKKFGATQHIMAGHEIKNMEIPILKGSARISSHLNFVCPQLFPSSGFWSEQPSNDVMENDKSVSSEACGSVSAQNLLKFHLRPYAQLGLDRTSIPNLFTYKDFVEELVSEIPAIREVPEQVCKFWQNNVNDNNILTPTGNHMGEEQWINKKSDKVDDGTLFQEIVXESIQGTIRKSLVVWRMQQGKIWRSLFWAQVHLSLQNTGTXSIYINLFERGGILLDCGEGTLGQLKRRFGVNDADEAVKGLRCIWISHIHADHHTGLARILALRSKLLKGVPHKPLLVIGPRPLERFLNAYSTLEHLDMQFLDCRHTLKSSVEAFLSENDTDPATPQLETTMFAPGTRMENYNRKPASPRDTTALANFKEVLQESGLEILYSVPVLHCPQAFGVVLKAMEKANSTGKVIPGWKVVYSGDTRPCPGLIDASRDATVLIHEATFEDSMKDEAIARNHSTTKEAIEVGTSAGAYRIILTHFSQRYPKIPVIDEVDMEKTCIAFDLMSVNLADLPVVPKVLPHLKVLFKDELVVDEAEEVQEAAVY

SEQ ID NO: 282491 - protein, 98 aa, Zea mays
  Clone ID: MRT4577_20729C.1.pep
DGERGEQGQAAGPRPAGGQQLDASASADGGTGAEPRRDRDRPQPDRRTAARHRAVGGRGQRWTAGRGQRRRLTEEGWPLVEGTGSLALWHSGGRLVAE

SEQ ID NO: 282492 - protein, 79 aa, Zea mays
  Clone ID: MRT4577_2072C.1.pep
FWSSMWACSLLCELLSQLGASGFTQYAPWWYFVWVVCGSRFHRGTSYGHHIWGFFWAHNKKKWKNNGLVQNPKKKTPSP

SEQ ID NO: 282493 - protein, 109 aa, Zea mays
  unsure (1)..(109): unsure at all Xaa locations
  Clone ID: MRT4577_20730C.1.pep
MIHRSMHHHHLFEAMCGGAILSGFIPPSGVAAAXILXALRLACNXHATANTVEAESEVMGAPEDKEEDFXADFREFERGLGEDDVDSAGEGGHPEVQELPPPEPTRFAF

SEQ ID NO: 282494 - protein, 171 aa, Zea mays
  Clone ID: MRT4577_20731C.1.pep
MTSSSVFFLLLACFATCAGAATFTVRNNCGFTVWPAGIPVGGGTQLNPGSTWTVNVQAGTSGGRIWGRTGCSFSGGRGRCATGDCGGAYSCSLSGQPPATLAEFTIGGGGNHDYYDISVIDGYNLPMDFSCSTGAALRCRDSGCPDAYHQPNDPKTRSCNGNSNYQVVFCP

SEQ ID NO: 282495 - protein, 68 aa, Zea mays
  Clone ID: MRT4577_20732C.1.pep
FKRLPCQTVNGISQVCFGLFACSVMCLFITKVEGLCVSKVACNETLNCLEMRNPVVFFKIKFALGSPA

SEQ ID NO: 282496 - protein, 16 aa, Zea mays
  Clone ID: MRT4577_20733C.1.pep
MAASSRPLVSVKALKV

SEQ ID NO: 282497 - protein, 83 aa, Zea mays
  unsure (1)..(83): unsure at all Xaa locations
  Clone ID: MRT4577_20734C.1.pep
GGCWGACGVGLGGGLLCGVCGGDVVVGGEEDPLHLHLAPTVVVVWGRRVALGWRSFXLPPRMAAARVLLVYLAGSYWRLLVLP

SEQ ID NO: 282498 - protein, 101 aa, Zea mays
  Clone ID: MRT4577_20735C.1.pep
PGVCRFLRLCRCRAFKCCPFLSFSLVPPWPPLGPLPLPAFCRVFSFSLMHLFPQFSRLISGQSVHLIYFPFFPPLGSPFFPLFASVCGCCVGLSVFPSFPL

SEQ ID NO: 282499 - protein, 177 aa, Zea mays
  Clone ID: MRT4577_20736C.1.pep
EQNAAQTEKEQIKGVKWPTNKRYRQANPGEPALARASTSERAMASIICSSKLSGTLPEPMLDTAEVDELPTPASTVTSDSAILVPASATSDHQPFEPSTVRCVLLLDGSSTLESEELFPTTLRSSVKDLSDLLRMSNLVVWQADALEDCPCICCCSAKAARRVDVELRAAVSRASRP

SEQ ID NO: 282500 - protein, 106 aa, Zea mays
  Clone ID: MRT4577_20737C.1.pep
MEFGAGGSRWPLPRGDAAEARPPPPPGDREEVASPRFDSSRALRLLRELGTNVTEDLVVLMPNLLSFLKHDDPATVKQSIASGTNLFPAVLEEMTLQVVLCKTDIC

SEQ ID NO: 282501 - protein, 44 aa, Zea mays
  Clone ID: MRT4577_20738C.1.pep
TSDKHCTEILKNKRIRNFRSKFKPYHLAYLVGLGNPDTYTRYAR

SEQ ID NO: 282502 - protein, 105 aa, Zea mays
  unsure (1)..(105): unsure at all Xaa locations
  Clone ID: MRT4577_20739C.1.pep
CKRPPFGRWADQRTPSHGALTDDKXARPRGRPNKLQEQRTVTEKWVEEIRXRFTKSWQGKRTSRPCSESDGXTPKTDDRTDTLGKDNQKGTLTXVDTQPAMGGQK

SEQ ID NO: 282503 - protein, 90 aa, Zea mays
  Clone ID: MRT4577_2073C.1.pep
MQETVAKDILAEETETGLNKHPDLSFAFNQHSHMKSMYPSPLTIVSLLLSHPRQQHVLVAGVEVHQLHTQPAVRFPPGLGFLDLLAPGGP

SEQ ID NO: 282504 - protein, 335 aa, Zea mays
  Clone ID: MRT4577_20740C.1.pep
SYRGLGSSRPAGDGYYAKKNAAPLPHTPHLNVLSKAAVKTTGGGGAPASRWSLSTVTQVEETKRMLKMLPVLAITFVPSAMMAQVNTLFVKQSTTLDRHIGRHFEIPPASLQGFVTISMLLAVVLYDRAFMPFARRVTANPRGISLLQRMSVGLVIHILIMAIASLTERHRLAVARDHGLYDSKGTTVPLTIFVLLPQFVLMGVADAFLEVAKIEFFYDQAPEGMKSLGTSYAMTSLGIGNFLSSALLSAVSHITRRHGRTGWILNNLNASRLDKYYAFFAILNCANLVAFCFVCRFYVYNAEVSHVVDAGSSKQKREVPMAMQPPAVGAVDATL

SEQ ID NO: 282505 - protein, 68 aa, Zea mays
  unsure (1)..(68): unsure at all Xaa locations
  Clone ID: MRT4577_20741C.1.pep
VAFSSVVGDVTSMSFRLPVRFLLSDLVYCDLPFLPLLLSLDGVGCGNYAFVVLKKNPKNTRAAADXXA

SEQ ID NO: 282506 - protein, 448 aa, Zea mays
  unsure (1)..(448): unsure at all Xaa locations
  Clone ID: MRT4577_20742C.1.pep
MAAVDATTKEMDALHVGQNDETKERLIKEDKAANSNHSVVAAQSLPPEDDDDDEAQADGPSQDGAAAAVKKKKKKKKGPXKKGPLQQTDPPSIPVDELFPSGEFPEGEIQQYKDDNLWRTTSEEKRDLERLQKPIYNSVRQAAEVHRQVRKYMRSIIKPGMLMVDLCETLENMVRKLIKENGLQAGIAFPTGCSLNWVAAHWTPNAGDKTVLQYDDVMKLDFGTHIDGYIVDCAFTVAFNPMFDPLLQATRDATNTGIKEAGIDARLGDVGAAIQEVMESYEVEINGKVFQVKSVRNLNGHSIGPYQIHAGKSVPIVKGGEQTKMEEGEFYAIETFGSTGKGFVREDLECSHYMKNFDVGHVPLRLAKAKQLLGTINHNFGTLAFCRRYLDRLGETKYLMALKNLCDNGIVQPYPPLCDVRGSYVSQFEHTILLRPTCKEVISRGDDY

SEQ ID NO: 282507 - protein, 38 aa, Zea mays
  Clone ID: MRT4577_20743C.1.pep
EKSTDEDDSPRRSRFLRPWPGWIPRLMSRRLIPGAGPG

SEQ ID NO: 282508 - protein, 51 aa, Zea mays
  unsure (1)..(51): unsure at all Xaa locations
  Clone ID: MRT4577_20744C.1.pep
MAVLAASSTRQAAWPGXPVLSTSYCFICPAVPRLLVNFMIRERVSAMFVWL

SEQ ID NO: 282509 - protein, 49 aa, Zea mays
  Clone ID: MRT4577_20745C.1.pep
NKWRECASFINLTVTIAAGSHLHITLAPHKTPTISATTPYADADYRYTC

SEQ ID NO: 282510 - protein, 38 aa, Zea mays
  Clone ID: MRT4577_20746C.1.pep
MLMIIWFFGPLGYGPVAEGRPVRMRRLPCCGLGLGWCL

SEQ ID NO: 282511 - protein, 209 aa, Zea mays
  Clone ID: MRT4577_20747C.1.pep
MEVPPEMLDALAGWFAQSLSPDTAARRGAEQSIASAASSPGFALALLGLAASPRHDLQARLAASLHFKNLLRRRWPKPDADADADVDHLPASDCAIIKAHLLQLLLTTPPLIQAQLSEALAAAAASDFPARWESLLPSIVSSLGTAVNAGDITATNSLLAAVVSLFSRFRNAFDNNALRLDLKYCLDIFAAPLLEVFSFASRRLQAAGT

SEQ ID NO: 282512 - protein, 470 aa, Zea mays
  Clone ID: MRT4577_20748C.1.pep
MSSRGLVRLPVSCSAAVDGVNGCLTYSTCRSRNYYYQYSHTTNLQISPVDQMPLPRKLKKSIQRNAYFLTQKRKLVPHCSSDLSTSCRGVPNYLSINVLQDQSNTKQGAIRKALVILNPNSGFRSSRDVFYQKVQSTLKLSGFKMEVIETAYAGHAKVLSSTVDLKKFPDGIICVGGDGIVNEVLNGLLSRDDFDVAIRFPIGIIPAGSDNSLVWTVLGIRDPVSAAIALAKGDFTPIDVFAVKWIQAGVTHFGLTASYYGFVADVLQLSEKFRVQLGPFRYVVAGLLKFLSLPQYRFEVDYLPSSLQGRSSESRPLAEKRHEQLSDDGKVRRGTQTNGRIKDDWVTRNGEFLGIFVCNHFCKPAQGLLSPVIAPKARHDDGSLDLILVHGSGRLRLFCFFVAYQLCWHLLLPYVEYVKIKEVKVRPVGSTHSGCGVDGELLDGERGAEWQCSLLPAQGRLLGQDPGAFN

SEQ ID NO: 282513 - protein, 71 aa, Zea mays
  unsure (1)..(71): unsure at all Xaa locations
  Clone ID: MRT4577_20749C.1.pep
MASEVVRXSDAELLKAQADIWRLSLSXXTPLSXRCAVELXXPTAIXRHGGAASAAEXVTALSLPSIXXPFL

SEQ ID NO: 282514 - protein, 333 aa, Zea mays
  unsure (1)..(333): unsure at all Xaa locations
  Clone ID: MRT4577_2074C.1.pep
MDPRFPLPAAAAPSTGGGGGARGHHRRAHSETFLSFHDADLLLDPDGDFFSDLDFPSLSDDSPAASDPTPPPHPQQQPPQASPAPRPPGGTHTRSLSLDAAFFEGLAFQGPSGSAGGGGGPGHKRSGSMDGDTSPFEGESALSSGLPDYAKKAMPAERIAELALIDPKRAKRILANRQSAARSKERKIMYTSELEKKVQTLQTEATTLSAQLTLLQRDTTGLTAENRELKLRLXVHGXSKLNCGTLXNEALREEVQRLKIAAGQVGNMNGNPFNGGLQQQIPSYFVQQQHRMPYFGGHQAQLHNQNQNHRHQISSNVGQTLSGQSLNDSMDFM

SEQ ID NO: 282515 - protein, 161 aa, Zea mays
  Clone ID: MRT4577_20750C.1.pep
ARLPLHTFLKAAKMSVAVYRGPAAVPAFEAPCWLRPAEPYKQPEAVVDDRPAQVDIWNAIQADVDRASAGAKKASKPYVHRSRSLMSQKSLEVCTESLGNETGSGDFTSSLDMAFLFDSLLPAGAAAEEESFWQHDGSRRCEEEQWESEDLAAVNYHCSAG

SEQ ID NO: 282516 - protein, 85 aa, Zea mays
  Clone ID: MRT4577_20751C.1.pep
LFIFSSCDPWREHACTRSSPLALRPLGCSRMACTAPHMCRRMVPAEVAISTSRWSQRQHGCVVYPSRSPTVGQSICICSAYASRQ

SEQ ID NO: 282517 - protein, 112 aa, Zea mays
  Clone ID: MRT4577_20752C.1.pep
NYKSGKVFRNLTTINSNTGGKNFIRVQYKWEKPWIIHYIIPLQRDDPENLSLSSAHLHKKTSCYRGDCYELEPIQVLETLPRLMPHLGLGQVLFDDDGLLYLDEEVVHGPGH

SEQ ID NO: 282518 - protein, 85 aa, Zea mays
  unsure (1)..(85): unsure at all Xaa locations
  Clone ID: MRT4577_20753C.1.pep
LPVFLTLGTSPTTPTVEAVAXITMLPRDRPATPSRRRPVVATTVPPGHHLTPPRCTPPGGGASSIQPYGGGVQRSLPMESPTCRS

SEQ ID NO: 282519 - protein, 85 aa, Zea mays
  Clone ID: MRT4577_20754C.1.pep
MSASRSSSPNSISQWSQKENKMFEEALAYYGEGTSNRWDKVSRAMGGIKSAEEVRCHYEDLDYDVKMIESGHVPYPKYKTHGFWT

SEQ ID NO: 282520 - protein, 50 aa, Zea mays
  Clone ID: MRT4577_20755C.1.pep
GYLHVDSSICYLNETRHSLGACNFLLRAFHPRMFLSSFHQLFQHISYALQ

SEQ ID NO: 282521 - protein, 95 aa, Zea mays
  unsure (1)..(95): unsure at all Xaa locations
  Clone ID: MRT4577_20756C.1.pep
QLVELGLLREEAKQRATREHEIVVNKLKAESEKMKIALKKTHAAETEMTLEKANSKLKQIEKEYTXQKLAKSSQIIAERQTTISSLKEENSQQQL

SEQ ID NO: 282522 - protein, 60 aa, Zea mays
  Clone ID: MRT4577_20757C.1.pep
KEAETEKIKKKSDSEKACKKELENDKSSKKDSANEKGKLNNPIKELDISLQSPAQTASAK

SEQ ID NO: 282523 - protein, 88 aa, Zea mays
  Clone ID: MRT4577_20758C.1.pep
WLPGLYYKPAQSPLFSPRFEPLPEPFSPFLQLPLVKDGPPHDCPGGVFVPLGGPPYGRDPPLVLQNGDGSGCFLPQNWRGLPPPPSHF

SEQ ID NO: 282524 - protein, 46 aa, Zea mays
  Clone ID: MRT4577_20759C.1.pep
IAFNNWGHLSHASKCALKLIILHHDSLLIGIRKHCTLHEHMPSHNM

SEQ ID NO: 282525 - protein, 91 aa, Zea mays
  unsure (1)..(91): unsure at all Xaa locations
  Clone ID: MRT4577_2075C.1.pep
SXLQLQAIMSCHXCGGNVGDVVNITITQCVXDVGMSNNDIFYSNRTCVTNIEXLMLGVDDQHLFTXRYCIQLXSDYMKSFSETMADLLDAG

SEQ ID NO: 282526 - protein, 98 aa, Zea mays
  Clone ID: MRT4577_20760C.1.pep
VSSEFGSSTFPTPHLFQTLSLLPKGGNFKLMAGFIPRITRLGGWFVNTFLIPLNDLKEPQLRNFFHGCCSNQHAPHMHYNQNQKILNIPGTRPHKRHL

SEQ ID NO: 282527 - protein, 108 aa, Zea mays
  Clone ID: MRT4577_20761C.1.pep
GRMCPQTPSLSPEYSHKAGLQAVITRMPLQARPVTQRRPRGARYNGPDHAWALEQDEAALRGDVTAGLRLVLNEAKGVPARFVFVRPATAAEASSEGWRLCLRPNTSE

SEQ ID NO: 282528 - protein, 113 aa, Zea mays
  unsure (1)..(113): unsure at all Xaa locations
  Clone ID: MRT4577_20762C.1.pep
LLFLYQSTTXGMXLVDLWEDHNIIPRINIYNTFFSFPASNNQSSFQLLYXLXSTSAKYYNQYSLFPKRITVLIIPSCPSSLPINXIILXLSQYTSITQYNHLLPILVPIILLH

SEQ ID NO: 282529 - protein, 57 aa, Zea mays
  Clone ID: MRT4577_20763C.1.pep
WVGQVRCFLKGTLVEKGKIWSCKSHGLNKPPHVLFGRFKMVIFIKTRVLFKTYQNLG

SEQ ID NO: 282530 - protein, 115 aa, Zea mays
  Clone ID: MRT4577_20764C.1.pep
KAHSPLLPEHFTSLSSAPACIQRLVTLQNRDSSRRAMADEESSPSSCLSSENEHGMQWSNSPEATSMVLAACPRCFIYVMLPQDDPRCPQCKSPVLLDFLQDNNNSKNNSYNSSR

SEQ ID NO: 282531 - protein, 87 aa, Zea mays
  unsure (1)..(87): unsure at all Xaa locations
  Clone ID: MRT4577_20765C.1.pep
MISEHTVAYSHLALLWHYTTTLVWRAFEGHGXRVVTKVWAEYLDGQELXNEXYATAKRCAGEHRAIFRTDXVMRGQRGRGELSALGD

SEQ ID NO: 282532 - protein, 115 aa, Zea mays
  Clone ID: MRT4577_20766C.1.pep
MSRSNRKSSRGLDLKLNLSLPATGDSSRRAMADEESSPSSCLSSENEHGLQWSNSPEATSMVLAACPRCFIYVMLPQDDPRCPQCKSPVLLDFLQDNNNNSKNNSNNSSRRSRRG

SEQ ID NO: 282533 - protein, 236 aa, Zea mays
  unsure (1)..(236): unsure at all Xaa locations
  Clone ID: MRT4577_20767C.1.pep
MSKLQTDALKEAITQVVADAKEKNRKFTETVELQIGLKNYDPQKDKRFSGSVKLPHVPRPKMRVCMLGDAQHVGEAEKIGLDSMDVEALKKMNKNKKLVKRLAKKYHAFLASEAIIKQIPRLLGPGLNKAGKFPTLVSHQESLEAKVNETKATIKFQLKKVLCMGVAVGNLSMEEKQIQQNIQMSVNFLVSLLKKNWQNVRCLYIKSTMGKPXRVFSLYPYRPSISMLPRILDFFT

SEQ ID NO: 282534 - protein, 81 aa, Zea mays
  Clone ID: MRT4577_20768C.1.pep
PAPAPPARSSAASTRAAPAPSSLLLPPDSSARPVSRRPPPPSDLNARAAPPARSIRSLSSVQISIRPAMCVSECRCSRKRP

SEQ ID NO: 282535 - protein, 121 aa, Zea mays
  unsure (1)..(121): unsure at all Xaa locations
  Clone ID: MRT4577_20769C.1.pep
DCLCSRTAPRPACRATLPSAPAGRPRQRSSRRGRPGYTLWVEEWMAVPKRCWIYHLASLSPFLLVFAGHIWVVDHWWNQHGLGGDNVEGRCRGLHXGPXINLLHWSGKGSVWLVSLANLAV

SEQ ID NO: 282536 - protein, 60 aa, Zea mays
  Clone ID: MRT4577_2076C.1.pep
RFRTFSFAIVVVLGRRRIQSLIYCLLKSSVDTASGPNSLGYKFSSLDLRQLREIQDPQCN

SEQ ID NO: 282537 - protein, 94 aa, Zea mays
  Clone ID: MRT4577_20770C.1.pep
VMVRYVSSKEHLMIQMNLLRDESIAIQVEAFHVFKLFVANKEQAPEITGILLANRSKLLRFLKDFTTVEKDDKKFEADKATVISEILALNGAEK

SEQ ID NO: 282538 - protein, 117 aa, Zea mays
  unsure (1)..(117): unsure at all Xaa locations
  Clone ID: MRT4577_20771C.1.pep
KQNSTLQSESRSSQYKFRNTARTYTFILSYGSWCPASECSHCNKQTITPNTTRPQHGGAPILFIYFLTEAALLPDHRVAWRRCSAARSLGRDEQPPLLLAGGAPLQLRAPSVXRCRR

SEQ ID NO: 282539 - protein, 71 aa, Zea mays
  Clone ID: MRT4577_20772C.1.pep
IESFRSRITDHSAGMQRCCCRGWESLGGGCVMPRASGPRCIGTTSKGSRGWIVGKRHSQQIGWCDHSVLVG

SEQ ID NO: 282540 - protein, 105 aa, Zea mays
  unsure (1)..(105): unsure at all Xaa locations
  Clone ID: MRT4577_20773C.1.pep
NVYTIIIATQVGTFKNMVNLLVRISRTVDWGELTTEELNLLTVQYQIVTADHLTSRSMFYSVQHQGEGSGIEVRDTMTLVFRDKTDTELTIMCPXVNKLIESYVV

SEQ ID NO: 282541 - protein, 36 aa, Zea mays
  Clone ID: MRT4577_20774C.1.pep
MKTRASINIFLFWSWALLQKGARLTFGAENCPCYLS

SEQ ID NO: 282542 - protein, 86 aa, Zea mays
  unsure (1)..(86): unsure at all Xaa locations
  Clone ID: MRT4577_20775C.1.pep
SVVTRSNIQPSSIAVYSHKPPLCAQVRRSTVRIRGSSISCSAGVSVPLALGAHFHDTPYPVACYILSRCLQLHXYPSWVXKXATNP

SEQ ID NO: 282543 - protein, 44 aa, Zea mays
  unsure (1)..(44): unsure at all Xaa locations
  Clone ID: MRT4577_20776C.1.pep
EQQETEEPESIIFAQLINRSIGTGKFCPRCRICYWLRTRGTGXG

SEQ ID NO: 282544 - protein, 198 aa, Zea mays
  unsure (1)..(198): unsure at all Xaa locations
  Clone ID: MRT4577_20777C.1.pep
EEATVELARSRAXERMRQNILTMGQCCXESELDVLMKFTSEVQEQLPNLLSMKADASFQKRRIDKLQNEIERHNSSVRATXHELKLERKALSMARSSADEEAKKAREHPRALHEAPNHXDAHRIILLVLRXLKDDALTDVTWANAGKEHTVDDSINRAEALLEILKTMSVEMDVHSRSAAERAMQHVTSFIAILKHPA

SEQ ID NO: 282545 - protein, 78 aa, Zea mays
  Clone ID: MRT4577_20778C.1.pep
IMSHSCCKPIGCTHIQRCFVLQQVLLTCRWFRYVLHSVMVVLGPWRLYRVFRSHKVVCCKNFASTPIRAALMSPSQSQ

SEQ ID NO: 282546 - protein, 32 aa, Zea mays
  Clone ID: MRT4577_20779C.1.pep
DPGDLMCTSLRTSSTLWLYIKSRRVPPAVPPR

SEQ ID NO: 282547 - protein, 93 aa, Zea mays
  Clone ID: MRT4577_2077C.1.pep
REFGPVPPSCSGSSTRLSSLPSSHKAPLRRASTLLRFPHRTRLLSTSPGLQQLSAPVFPGVCLTAPARQRLSTRPLSSLHLDIRRYSPLSLSS

SEQ ID NO: 282548 - protein, 229 aa, Zea mays
  unsure (1)..(229): unsure at all Xaa locations
  Clone ID: MRT4577_20780C.1.pep
ILKPGESEDVIXXACQKLLSIFSHRPEQKQIYMAQNGFLPLMELLEIPKNRILCSVLQLINNIVKDSTGFLENACLVGLIPVVMNFAEPNRPKDVRVQASLFLQQLCQAXFFFALTQLIVSDIFXKRVEGTNALAYLIFSFHXSTLTLQMFIACQGIPVLXDMVHLAIDXIWQVFKLQHSTPRNDFCRIAAKNGMLPRLVNTLYSLNEATRFASVSGSGASXTQNGSTP

SEQ ID NO: 282549 - protein, 799 aa, Zea mays
  unsure (1)..(799): unsure at all Xaa locations
  Clone ID: MRT4577_20781C.1.pep
SEDVILLACQKLLSIFSYRPEQKHIYMAQNGFLPLMELLEIPRNRXMFHCGFTNIFPAPLHHRSCLFCFFYFFILQILCSVLQLINNIVKDSTCFLENACLVGLIPVVMNFAEPNRPKDVRVQASLFLQQLCQASTLTLQMFVACQGIPVLVSFMEPDYAKYRDMVHLAIDGIWQVFKLQHSTPRNNFCRIAAKNGMLPRLVNTLYSLNEATRFASVSGSGASVTQNGSTPRRRSGQLDPSVLESCKARLDHHHSSGSLQSLQTDADKHHILMDSSSPRFSDKTGSNLERNDNDLVIRPQRLSVSAGRTSTDRSPKHVELVSNGHISGQNDQVRPLLSLLEKEPPSRHISGQLDYVCHITGLERHETILPLLHTSTERKTNGELDLMMDFAEVSRHGRENGHLDSSIKVSNRVHSMKYAPSTSASNEGASTSGAASQTASGVLSGSGVLNLRPGSTTSSGPLAQMFSSMSADVAREYLEKVADLLLEFAQADTVVKSLMASQSLLTRLFQMFNKIEPPILLKILRCINHLSGDPNCLETLQRTDAIKHLIPILELRDGPLVFQIHSEVLNALFNLCKINKRRQEQAAENGIIPHLMNFVMSDSPLRQYALPLLCDMAHASRNSREQLRAHGGLDAYLNLLEDDVWACTALDSIAVCLAHDNDHRKVEQALLKKEAIQKLVKFFQDCPEQYFVHILDSFLKIIMKSSRLNTAMATNGLTALLIARLNHRDAIARLTLLKLIKVVYEHHPRPKQVIVENDLPQKLQNLIEERRGGQRGGHQVLVKQMATSLLKALHINTVL

SEQ ID NO: 282550 - protein, 1336 aa, Zea mays
  unsure (1)..(1336): unsure at all Xaa locations
  Clone ID: MRT4577_20782C.1.pep
MASRQHNAQFHKSKTLDNKYMLGDEIGKGAYGRVYKGLDLENGDFVAIKQVSLENIPQEDLNIIMQEIDLLKNLNHKNIVKYLGSLKTKSHLHIILEYVENGSLANIIKPNKFGPFPESLVAVYIAQVLEGLVYLHEQGVIHRDIKGANILTTKEGLVKLADFGVATKLTEADINTHSVVGTPYWMAPEVIEMSGVCAASDIWSVGCTVIELLTCVPPYYDLQPMPALFRIVQDVHPPIPEGLSPEITDFLRQCFQKDAMQRXCEDIIDASMVAELXRALPASLRQPTPLRNIDGDDESSRGDNNSGFCDTPGDTRATIASNVDQVNGRNGPNMDSAAQSKSEELHDGNLELTEGISSNNVALVKDNVVLNKDPTLVLHEKLPVESSFGDADLNGKVMAHELLQGGLPSKIELENKESSTVEDGDVFSFQAGRQNIDFQMVVEPSVVEGPKQLSRFSDKPEDASLEDLFPPIDKRGDNGAEPSTSTTVQELQYNGVHNGFVKGLNARVEKQKENDSESMNGGKLIEFAMQLENIDASGFGEHIPGESLFPLQSVEYSKIVAQLKPGESEDVILLACQKLLSIFSHRPEQKQIYMAQNGFLPLMELLEIPKNRILCSVLQLINNIVKDSTGFLENACLVGLIPVVMNFAEPNRPKDVRVQASLFLQQLCQASTLTLQMFIACQGIPVLVSFMEPDYAKYRDMVHLAIDGIWQVFKLQHSTPRNDFCRIAAKNGMLPRLVNTLYSLNEATRFASVSGSGASVTQNGSTPRRRSGQLDPSVLESCKARLDHHHSSGSLQSLQADADKHHILMDSSSSPRFSDKTSSNLERNENDLVIRPQRLSVSAGRTSTDRSPKHIELVSNGHNNSQNDQVRPLLSLLEKEPPSRHVSGQLDYVRHISGLERHETILPLLHTSTERKTNGELDLMMDFAEVSRHGRENGHLDSSIKASNRVHSMKYAPSASASNEGASTSGAASQTASGVLSGSGVLNLRPGSTTSSGPLAQMFSSMSADVAREYLEKVADLLLEFAQADTVVKSLMASQSLLTRVFQMFNKIEPPILLKILRCINHLSGDPNCLETLQRTDAIKHLIPILELRDGPLVYQIHSEVLNALFNLCKINKRRQEQAAENGIIPHLMKFVMSDSPLRQYALPLLCDMAHASRNSREQLRVHGGLDVYLNLLEDDAWACTALDSIAVCLAHDNDHRKVEQALLKKEAIQKLVKFFQDCPEQYFGHILDAFLKIITKSSRLNTAMATNGLTTLLIARLDHREAIARLTLLKLIKVVYEHHPRPKQLIVENDLPQKLQNLIEERRDGQRGGQQVLVKQMATSLLKALHINTVL

SEQ ID NO: 282551 - protein, 108 aa, Zea mays
  unsure (1)..(108): unsure at all Xaa locations
  Clone ID: MRT4577_20783C.1.pep
ESVAGDRDADFSIARYIDTVYNGXKDTHSHEXVNTTADFATAVITHHAHDHLXGXCFLQLPEPGTNESARGSYXNMKSVKATNDCNSPISSEVDKFNAXLSETASLIN

SEQ ID NO: 282552 - protein, 108 aa, Zea mays
  Clone ID: MRT4577_20784C.1.pep
MEPDADEDYMGDLSRFLPPSPSSSPPKNLGRRKQPSTQAQPRAKRGKGVPWQERRRQERERKQREEDARTMAGLAEAIPESNVGFRMLRQMGYDPDFPRAGAEPVGIE

SEQ ID NO: 282553 - protein, 223 aa, Zea mays
  unsure (1)..(223): unsure at all Xaa locations
  Clone ID: MRT4577_20785C.1.pep
AAASTSITSYIKGINILGNIIEGNQDSVNNRXYYGAYTTMLRNLFALIMDPSAEHGVAPGVMAHYETALRDPAFYYYTSYIMGFFKQYKDNLPYYRHEELNFNGVAVKDVAVSKXMTXYFGLFDVDVTNAVDFASLDEMDKYEYVAKAMRLNHQPFTYKIQVASEKHTNAVVRVFLGPSTDYIYTNFYGDQASDVYYGHDTADFERLREYFVELDRFPVQLKN

SEQ ID NO: 282554 - protein, 684 aa, Zea mays
  unsure (1)..(684): unsure at all Xaa locations
  Clone ID: MRT4577_20786C.1.pep
MTMSSQEVTLELLLGDGSNYKSWSVSIYNAFMHIDPDLRQIFSRSIFPSNISKNPSNTELRCLSLNHHACNILVDSLSRGAYFAIMSSDSDLFVDAHDLWTRIKIKYSESNCTTSTPYVACGTNLSKGEEKRWQPNDESTSPTGLSSTSYKCLIANNDSGDESDDEEEYEDDSEDESSSPQGTFSCIASTNNNDRENETGDAEEEEIRRFYTNLNKEDKVLLVKLLSRNKEQGETLLRLEETLIKTNDSLEKMTKEHEELKCSHDNLVQRYESILFEQRNNHDVLSDVAQLKIENSMLRNKVELLSHDNLALTQKYDLLSCYHDNLLDRHIMLEVAHEVVITNLNSCELHSCTSTHSDISSPCANPCLSKESQCLXASSCRVTXKLCGNKKAKQLRRRRIAQPPQDIHGRMVKKLETGETAASVKLHKKDAPKAINEEINMNKEKGKNSISHVVCTDHLSMSSKSKKGRGKRRCFKCKELGHFIASCPHKDKDEGMRRCFGCNDKDHMITSCPLMKNQRRAPSKMTLTKQKDKQQVSSQVERRFCYMCGKHGHLPKSQGGKGKMSKKWSDQDLGTSTSRVIATRKGQDKGSDISVKELRLLRWKVHHNMVKIFMWFWRFKIGILMVNSETIDQAKDGGKKRFEVPSAREKVKETRIPKPGVKKKTCKVKVDRVKKSYGASRITT

SEQ ID NO: 282555 - protein, 99 aa, Zea mays
  Clone ID: MRT4577_20787C.1.pep
DSALLVWGHIQPGPDYSKIFLPQRIARGYPSINWHGNISHGNTHILVYPPTSAHISDLSLRGEAPNTSKLVLSILPKILTLPCCGKNIGTPSFNTHGIL

SEQ ID NO: 282556 - protein, 75 aa, Zea mays
  Clone ID: MRT4577_20788C.1.pep
MNDQTNEKCPLCLNKMDLTDKQLKPCKCGYEICLWCWHRIIDESGGRCPGCRSVYNKDKILETSARNQILKGTLC

SEQ ID NO: 282557 - protein, 69 aa, Zea mays
  unsure (1)..(69): unsure at all Xaa locations
  Clone ID: MRT4577_20789C.1.pep
KKAQAPQNXHIEQGQGIRVEELSDTHAIVARRLTCQAAYTHAWCVITSYPSTLGKIFMKLAGKRKANNN

SEQ ID NO: 282558 - protein, 89 aa, Zea mays
  Clone ID: MRT4577_2078C.1.pep
PKRKPASDTKRGSYYSQHAVRERSHTCNKRNQIIVAKRLTTINNNQNQLRATCNQSHLRNYNSIRLSAEPAVRSSNDTATTDTVTYTAS

SEQ ID NO: 282559 - protein, 94 aa, Zea mays
  Clone ID: MRT4577_20790C.1.pep
TLWPPSVSHVEEAARTHEILKPTPLNGKGVVKADDVVGMSKLSIDEASSGSMEPTALSLELIGSTDTRQSAFHVSPPMNRPELSKRNSSPIHAV

SEQ ID NO: 282560 - protein, 71 aa, Zea mays
  Clone ID: MRT4577_20791C.1.pep
FSEHHHIQCCNARSLVSLAMHVCSRSFPEDGHLNGLAFTAGRKYHDVPGVRTLTWSSLKQLSSLHEFSRML

SEQ ID NO: 282561 - protein, 61 aa, Zea mays
  unsure (1)..(61): unsure at all Xaa locations
  Clone ID: MRT4577_20792C.1.pep
HAYHFEFSFIFSRKSTQGKVPMVCFSYNIKLLSYHISIPPTTTRNKXDNKVTNTNMAGNEN

SEQ ID NO: 282562 - protein, 59 aa, Zea mays
  Clone ID: MRT4577_20793C.1.pep
ASSRVSQILSRSRTASLLLLRSELFRYHWDFSCFSYIVPRHESSRALFSTHVACRLHLS

SEQ ID NO: 282563 - protein, 119 aa, Zea mays
  Clone ID: MRT4577_20795C.1.pep
QGGCRGVELEWSALRRRLKKKVARAQSSLEVSRRDIPYVESAESRREWIRAGSGSTQALSWRSITEARQEVELFAPGLCLLVEAAVGLMSVSAEMLRSRRAHISTAPHGCTPWRRRRRI

SEQ ID NO: 282564 - protein, 88 aa, Zea mays
  unsure (1)..(88): unsure at all Xaa locations
  Clone ID: MRT4577_20796C.1.pep
MSGQQEEDKKPGDQSGGHINLKVKGQDGNEVFFKIKRSTQLKKLMNAYCYRQSVDFNSIAFLFDGRRLRGEQTPDXLEMEDGDEIDAM

SEQ ID NO: 282565 - protein, 56 aa, Zea mays
  Clone ID: MRT4577_20798C.1.pep
EISLPTHSTSPRMGLRTLLEGNSLVANAQPILNENRFLGPRRWSMYEVSGNGQTKS

SEQ ID NO: 282566 - protein, 156 aa, Zea mays
  Clone ID: MRT4577_20799C.1.pep
GKNMGFPPFPSQVFFGGVGDTNRRPSSPPFFLPGGFWGPFGLLPPPPSLGGNGPKSLPPWGEKKERDPPDFFPFRQAPPVSPFYFTRAGKQFPVPPNELRDPPPGRGETPGSGGSPLGLFGVDPPFLYPGGDPNLGGNKRGHATISPLGLPPGNGG

SEQ ID NO: 282567 - protein, 127 aa, Zea mays
  Clone ID: MRT4577_2079C.1.pep
SLATVPPSCSGSSTRLSSLPSSHKAPLRRASTLLGFPHRTRLLSTSPGLQQLSAPVFPGACLTAPARQRLSLLDLPHRCNWTYAAARCSPWCASLPAPSPPLHVRVLASPSRHRRRAVVPSAPRKGS

SEQ ID NO: 282568 - protein, 66 aa, Zea mays
  Clone ID: MRT4577_207C.1.pep
QRHDLLEDSEGAPGPLCGSCPVGVKSCYERLSILASLPVVFLEIAGSINFFPAGARQLEKSNGKRS

SEQ ID NO: 282569 - protein, 158 aa, Zea mays
  Clone ID: MRT4577_20800C.1.pep
MGLSYCVIAVPYPLHRRRGFTAVTGVAVLHHDLATLQAFNHVATSRTSSPITVVAPQPHYMSIHAYIWLYLENEEEIEVEEARTSPPPPEEPQMMLQSGWDVSKIKLDGGSIMAMMGSTSEKMYLCQVKKQQTFVASVPRWYQKKKIKTEPAGGKVLR

SEQ ID NO: 282570 - protein, 118 aa, Zea mays
  Clone ID: MRT4577_20801C.1.pep
SFAKPSYRAPSTGLPTPYGALAPPDQVRSPSHITRRRRRRSRAAGYRRRRTQPEPAAHRDAGGGGRGAAGGAASAACEPRAQRGAASVTAPPHAPAAEPGLPPARRSGDDASATFTPG

SEQ ID NO: 282571 - protein, 164 aa, Zea mays
  Clone ID: MRT4577_20802C.1.pep
MPNNGVRAVATPVAREEPLLRREDDAAPPKAAGGDGQPLDAGARDAGSFPWLPAAGIMYLTLSSAMALHRCWPDPGDVAFVVSAYVDLVLLFCCLRRYERAEPGSPLRERLKLAVWLLTSALTLLFSYKVAAVMPAAVAAIVWLMGLTTICGGFLAFFCFQKKA

SEQ ID NO: 282572 - protein, 68 aa, Zea mays
  Clone ID: MRT4577_20803C.1.pep
GNEPPPQGKAPQPPRPPGPQGPRGVKTGLDPPPPAAPLQPGAPPPLNPKGPVGAEAPPPMFPANYGAS

SEQ ID NO: 282573 - protein, 50 aa, Zea mays
  Clone ID: MRT4577_20804C.1.pep
KLGTLFPDAAMKKIMQANEDAGKHALPPPVLVARYLELVLQDLIDRTYEI

SEQ ID NO: 282574 - protein, 131 aa, Zea mays
  Clone ID: MRT4577_20805C.1.pep
SPVFFWGLPGAPSVTSASAPQGKGPISGRGLFPLPPLLPIEGALGLGGPLYFPVSSRGRPKGLLPLPLVPRACFCFPGFFFFSVPGIKNFSPISLGVFWTKFFKKPPGCCFVWGGIIKGGGAPALEAPRSR

SEQ ID NO: 282575 - protein, 80 aa, Zea mays
  unsure (1)..(80): unsure at all Xaa locations
  Clone ID: MRT4577_20806C.1.pep
PDDTKKRIKYLAARHQHNPTKALDIYNSLNTTIMIFLVLPDLTSGNNRSAYPDRIDPITLXATTVPRLDILKILNLNFIH

SEQ ID NO: 282576 - protein, 54 aa, Zea mays
  Clone ID: MRT4577_20807C.1.pep
DQEPTELRLSQITICLNPNPQISLTSEYQVTPSHLPDAMGGQKETGRVEGRDGA

SEQ ID NO: 282577 - protein, 41 aa, Zea mays
  Clone ID: MRT4577_20808C.1.pep
RRGGGRGTGGHGGRTGHDHRSRTGRGGRVGVGRSGRLGRPG

SEQ ID NO: 282578 - protein, 45 aa, Zea mays
  Clone ID: MRT4577_2080C.1.pep
CRFVLLTCLYLLLLNRSCCCLIFTVVCGFLFVLCCPADCSLVFFF

SEQ ID NO: 282579 - protein, 76 aa, Zea mays
  Clone ID: MRT4577_20810C.1.pep
GIVGEESQRGSSHPTLRKPSEHKEAGYQAPEGPILCINNCGFFGSAATMNMCSKCHNEMITKQDQAKLAGPLSTAS

SEQ ID NO: 282580 - protein, 107 aa, Zea mays
  unsure (1)..(107): unsure at all Xaa locations
  Clone ID: MRT4577_20811C.1.pep
ADRRISPSASLPPHARAHGFFLRSLASGKPRRSALLVALRSLNPSGRGLXXRRGALLARSXSEQPSWSPDSHMLLVQNLVDILFSIRAGSTRVVSHLAGQREYFCYS

SEQ ID NO: 282581 - protein, 120 aa, Zea mays
  Clone ID: MRT4577_20812C.1.pep
LKQGLQMLAIFKNHEAETSILEDFDFYEQREKTMLDDRQQQKPECSDTGKQVQASAPVDIVTGMSDAFAQAVQLQETNDKENKPRIEDADAADNAPAAPVKIEEDKLKTAEVGGLLKESG

SEQ ID NO: 282582 - protein, 78 aa, Zea mays
  unsure (1)..(78): unsure at all Xaa locations
  Clone ID: MRT4577_20813C.1.pep
LGTSRPAGXNSKKKKKKKKKKKKKKRPSRSISLLAFPGPIRHLPKKTAKTTPTAKLERVATLDPPSRRLIEEPCRRAQ

SEQ ID NO: 282583 - protein, 146 aa, Zea mays
  unsure (1)..(146): unsure at all Xaa locations
  Clone ID: MRT4577_20814C.1.pep
HPSGAIPVPCYFILRGRYTTAIVGAATRDSGEKGSADRNSMEDVKNILNMAQRAFQRRDVFYTNFLTTPIRKETMLALEKFADTKPVAHGGYPHAERCRICDGHPDVMTCNPDVVAALSISRNXYGWNXCQGDVIGAITWTGITRE

SEQ ID NO: 282584 - protein, 119 aa, Zea mays
  Clone ID: MRT4577_20815C.1.pep
QWSTDNHKVILFKAYTNDCSWSDRAKQMVICFSKRQMRASTIGMTKWTSSWSTCGTLFAINRNDAHNMVTSNNSSNDGSKRSRVNLDSDYSSASLDNVKSTRSIGRNREKAQHKGKWLA

SEQ ID NO: 282585 - protein, 59 aa, Zea mays
  Clone ID: MRT4577_20816C.1.pep
KGQPLLFHFVGSAQTFILMYLIESVMFKSSYSEHLFTFMLVGYDIIGILIFFNSTVQFY

SEQ ID NO: 282586 - protein, 34 aa, Zea mays
  Clone ID: MRT4577_20817C.1.pep
SNNQIVPLVSIILGLMRGDSAARAGAPYIGRTST

SEQ ID NO: 282587 - protein, 920 aa, Zea mays
  Clone ID: MRT4577_20818C.1.pep
MDRRVVKKKFSFCRELRNVRAACLGPWIIAGDFNLIYKAEDKNNSNLNRAMMGRFRRTIDDLSLKEIPLHGRKYTWSNQQNIPTLVKLDRVMCSTDWEDLFTNVLLQSSASEVSDHCPLLLGLRDNRSGKRRFHFESFWPKLDGFQEAVQDAWNSVPTLECPFQALDRKLKATTKRLQSWSDSRVGHVNSQLALAREVLHRLEIAQDARSLSLSEIWLKNKLKKHSLGLASLKRTIARLRSRVSWLKEDVGVPTFDLAALDLPFLEKEVWETVKLLPSDKAPGPDGFTGGFYKACWSIIKGDIMAAVSAVWSRRFAQFNRLNTAYITLIPKKEGADQVKDFRPISLVHSFAKLITKLLANRLAGRLNEMISPIQSAFIKGRFIQDNYMLVQQTARLLHRRRQAHLLLKLDITKAFDSASWPFLIEVLQRMGFGQIWRDILCGLLATSSTQVMVNGFSGQHIVHRQGLRQGDPLSPMLFILVMDVLGRMVTAAEGAGLLQPLATRSVHHRVSMYADDVVLFLRPAAEDIATIVDILHLFGEASGLHNNAQKSNVYPIRCDESDIAVVQAMAIDLPTYITKAIDKIRRGFLWRGRKDINGGHCLVSWSKVCRPLDLGGLGISSIKELSWALRMRWLWLQKTEPNRPWSSLTIRVPDKLQGQRVADIAPRLLQVVPKRKINTRTVQEAITGRAWMSDIRGALSVGAIVDYLHLWNLLLTAELRPNVEDKHIFRLAANGKYSAKSAYEGLFIGSIPFEPYERIWKTWAPPKCRFFMWLVAQKRCWTADRLAKRGLDHPDSCPLCEQESETIDHLLVSCVFSRECWFLLLRQFGLHNLSPQPENDSFLDWWRTISEMAARQMKMGINSLVLLGAWILWKHRNQCVFKRGSPSVAAVLEQVGEERRLWEMAWTKGFIFLAANLPHG

SEQ ID NO: 282588 - protein, 433 aa, Zea mays
  unsure (1)..(433): unsure at all Xaa locations
  Clone ID: MRT4577_20819C.1.pep
LGLPLTLRKITKDQAQPIIDKFANQLPGWKADLMTRAGRTVQVRFVLTGMLIYLVMAIDLPTYITKAIDKIRRGFLWRGRKELNGGHCLVSWSKVCRPLDLGGLGISSIKELSWALRMRWLWLQKTELNRPXSSLTIRVPDKVQAFFSMAMQTEVGNGANTLFWKDRWLQGQRVADIAPRLLQVVPKRKINTRTVQEAITGRAWMSDIRGALSVGAIVDYLHLWNLLLTAELRPNVEDKHIFRMAANGKYSAKFAYEGLFISSIPFEPYERIWKTWAPPKCRFFMWLVAQKRCWTADRLAKRGLDHPDSCPLCEQESETIDHLLVSCVFSRECWFLLLRQFGLHNLSPQPENDSFLDWWRTISEMAAGQMKMRINSLVFLGAWILWKHRNQCVFEGGSPSVAAVLEQVGEERRLWEMAGAKGLIFLAANLPHG

SEQ ID NO: 282589 - protein, 101 aa, Zea mays
  unsure (1)..(101): unsure at all Xaa locations
  Clone ID: MRT4577_2081C.1.pep
TPTNLETSTLSMXIRDMCTGESCEGEIEDVXGSSXGTTLDIGHPVKLPPPPLCPCGNSXIFLRQRLEPKRRKGVPFVLGFLTNRPTASAHASALXAWVGPG

SEQ ID NO: 282590 - protein, 40 aa, Zea mays
  unsure (1)..(40): unsure at all Xaa locations
  Clone ID: MRT4577_20820C.1.pep
RISFLLRIYLYSPCPSSSXTWLTITITRFPCNRFLFSRWC

SEQ ID NO: 282591 - protein, 49 aa, Zea mays
  Clone ID: MRT4577_20821C.1.pep
HCLIKIYINYESFRPPISNMLIFFSRHSPVSNLLPLSNHFTSCSSPPFI

SEQ ID NO: 282592 - protein, 53 aa, Zea mays
  Clone ID: MRT4577_20822C.1.pep
RSRTSSLPPGVVLFKINIPYISYIYRGGLLYQYITSRHCPWSSETLLCPGDGA

SEQ ID NO: 282593 - protein, 165 aa, Zea mays
  unsure (1)..(165): unsure at all Xaa locations
  Clone ID: MRT4577_20823C.1.pep
PRRPPSRSARARAQNKGNDRGKKSTPAGAXKDDQSERPKQGKPXAEPEERAPXEKAKEEGKEESKGQPGKSPDTKGGEKHGQTQEPAEPTRSGGXETDTNNXTKGEKADRGDNXDETDTPXGAXKGQKPQRSTXHRGNHESPAETQXXGXQDEGARKQGNANGRK

SEQ ID NO: 282594 - protein, 160 aa, Zea mays
  Clone ID: MRT4577_20824C.1.pep
PAGVPSPISDQQTTPFLSSRHGGTCTHATGDRAQSLIHRCTASHCILLCLNLVAVCVFPGSGRRRTGCCCLPEFPDWLVLLLRVLPTANGYCLLQRCVVEFALFPPRVDSVRERERQREFPLLGLEIRSISFTLATWPDCSSAALLFIYLSQKKKKKICG

SEQ ID NO: 282595 - protein, 69 aa, Zea mays
  Clone ID: MRT4577_20825C.1.pep
RGVRVLVPHRLGSQHPRGRLVPPHEQLQVTWTPQGLVIPASCLLPPRKKVRTKINFFPLIYVRCILLVG

SEQ ID NO: 282596 - protein, 85 aa, Zea mays
  unsure (1)..(85): unsure at all Xaa locations
  Clone ID: MRT4577_20826C.1.pep
APLPIGCAVFLVHLATILITGPGINAAWSFGPAVIYNQRHAWVDRWILWVGPFIGSGLAAIFLQXIIRAMPFRSRSSKSIRISDA

SEQ ID NO: 282597 - protein, 104 aa, Zea mays
  Clone ID: MRT4577_20827C.1.pep
RCPSPTAANALPQCLLLRASSSPRAALAEMPPSTTRTPTEPEPEPIPPSTPDLAPNPRPPSTPAAAPQIPPHQRHPSPNPSPPSTQTAHPNPRPLPIDGANNAV

SEQ ID NO: 282598 - protein, 88 aa, Zea mays
  unsure (1)..(88): unsure at all Xaa locations
  Clone ID: MRT4577_20828C.1.pep
MLGSNDINDSHRSPIFDPLRNGTMPPVQYTVNGTTFNFRYNLADGIYLDWPSFVKAIRHPWEEKXHWIQESCRKDIKRAFSILQASQG

SEQ ID NO: 282599 - protein, 133 aa, Zea mays
  Clone ID: MRT4577_20829C.1.pep
FAPLLFLESPPPTGETRVTAFLWGEAERRPITNRPLPGVWGGSLKGPDPQVSSLGGGPDSLTHLGGWVSPLGPPGLALCASGGFVLWIGTPDFFPPGPAFFLCGPGMGSQFGPPKTGPQCLGNLPFERGPGGV

SEQ ID NO: 282600 - protein, 1731 aa, Zea mays
  unsure (1)..(1731): unsure at all Xaa locations
  Clone ID: MRT4577_2082C.1.pep
MDHKGKGIVINDKEKESFVNEPKDDKPTDSGSGHRRKEGKKKKTRRIKEIIYYDDSDESTSSQKDDDNDYKKTVNSNFSFDYSRIQHSSNSHLLSIPLGKPPHFDGEDYGFWSHKMRSHLFSLHPSIWEIVENGMKFDSSDSPMLINEQIHRNAQATTVLLASLCREEYNKVSGLDNAKQIWDTLKISHEGNDITMLTKMELVEGELGRFAMIRGEEPTQTYNRLKTLINKIRSYGSTRWTDHDVVRLMLRSFTVLDPHLVNNIRENXVHDDDARGSTWKIRXGRMMIKEARYVDDALNGPLHEPQPIALKATRSKESLPSKVAQVEAAGLNDEEMALIIKRFKTALKGRKGQPSKAKTKGKRSCFKCGKLGHFIANCPENDSDQEQGKNGKRENKKVYKKAKGEAHLGKEWDSDCSSSDSDDEGLAATAFNKSALFPNEHHTCLMAREKKVITRNAYDSSSDDESSEDEIDYSSLFKGLDRTKIDKINELIDALNEKDRILEKQEDLLYEEHDKFVSAQNSLALEVKRNGILSCELSTCNETISSLKGEINVLTAKLEVASNSCVENITICTRCKDFDVNACSEHLVSISKLNDEVASLNAQLKTSKSEVDKLKFARDAYTIGRHPSIKDGLGFKREAKNLTSHKTPIPAKEKGKAPMATSVKKNHAFLYHDRKNSRNAFRSYDAYDSHAYDSYAMTASSSHVVHERNVGRRNVVNIPRKVNEPSTIYHALNASFAIYRKDRKVYASGGSSWIIDSGCTNHMTGEKKMFTSYVKNNDXPDSIIFGDGNQGKKKXGSLAFKGVLDDKLYLVDFAKEEAGLDACLIAKTSMGWLWHRRLAHVGMKNLHKLLKGEHVIGLTNVQFEKDRPCAACQAGKQVGGAHHSKNVMTTSRPLELLHMDLFGPVAYLSIGGSKYGLVIVDDFSRFTWVFFLQDKSETQGTLKRFLRRAQNEFELKVKKIRSDNGSEFKNLQVEEFLEEEGIKHEFSAPYTPQQNGVVERKNRTLIDMARTMLGEFKTPERFWSEAVNTACHAINRVYLHRLLKKTSYELLTGNKPNVSYFRVFGSKCYILVKKGRNSKFAPKAVEGFLLGYDSNTKAYRVFNKSSGLVEVSSDVVFVETNGSPREQVVDCDDVDEEDVPTAAIRTMAIGEVHQQEACDQGGAQDDHVMEEDAQPAPPTQVRAMIQRDHPVDQILGDISKGVTTRSRLVNFCEHYSFVSSIEPFRVEEALLDPDWVLAMQEELNNFKCNEVWTLVPRPKQNVVGTKWVFRDKQDEHGVVTRNKARLVAKGYAQVAGLDFEETFAPVARLESIRILLAYAAHHSFRLYQMDVKSAFLNGPIKEEVYVEQPPGFEDERYSDHVCKLSKALYGLKQAPRAWYECLRDFLIVNAFKVGKADPTLFTKTCNGDLFVCQIYVDDIIFGSTNQKSCEEFSRVMTQKFEMSMMGELNYFLGFQVKQLKDGTFISQTKYTQDLLKRFGMKDAKPAKTPMGTDGHTDLNKGGKSVDQKAYRSMIGSLLYSCASRPDIMLSVCMCARFQSNPKECHLVAVKRILRYLVATPCFGLWYPKGSTFDLVGYSDSDYAGCKVDRKSTSGTCQFLGRSLVSWNSKKQTSVALSTAEAEYVAAGQCCAQLLWMRQTLRDFGYNLSKVPLLCDNESAIRMAENPVEHSRTKHIDIRHHFLRDHQQKGDIEVFHVSTENQLADIFTKPLDEKTFCRLRSELNVLDSRNLD

SEQ ID NO: 282601 - protein, 68 aa, Zea mays
  unsure (1)..(68): unsure at all Xaa locations
  Clone ID: MRT4577_20830C.1.pep
GRXGFDFFIHPQCSNNTWCAVNQTVQTAGNLLVFFPRKGPRKPFFSGRVFKRGTKGGSLYRGSKTGRG

SEQ ID NO: 282602 - protein, 125 aa, Zea mays
  unsure (1)..(125): unsure at all Xaa locations
  Clone ID: MRT4577_20831C.1.pep
HMCTSIVRDALGYNALRALRLGEXLELLDAYSXKLFKLPLDCIHYEWDNLTKYGHPSIXCTFKPTLKLSAXKIKDKXCCECLRVALYFTKDDEREYSHPFMRWRDQVIFSADSINYAQCNTGESN

SEQ ID NO: 282603 - protein, 157 aa, Zea mays
  unsure (1)..(157): unsure at all Xaa locations
  Clone ID: MRT4577_20832C.1.pep
LSGSTHAFVIKRCALIDDRXNKEFGQEMLILFQINHKNIVKLEGCCLXVEVPLLVYEYVPNGXTFYERIHGKNQALQIPFSTLLRIVHDASEGLSFLHXYAXTPIIHGDVKSVTFLFDGNYMAQVSDFGASILFLVDKEXYVTRVQGSCGYLYPEYM

SEQ ID NO: 282604 - protein, 53 aa, Zea mays
  Clone ID: MRT4577_20833C.1.pep
YRSRTSHPTAHHALPPNEPSFHHPSPPPGILFRAHHLSKLDLERSPYPYVTKP

SEQ ID NO: 282605 - protein, 79 aa, Zea mays
  Clone ID: MRT4577_20834C.1.pep
PFKHLQRGGSRRSSMNPVGEHLRAHSPAQSAKLAGKVAWQAIFYSMLYSARSSGPWPGGGGGFFNGQLTAKPKTKHCIK

SEQ ID NO: 282606 - protein, 101 aa, Zea mays
  Clone ID: MRT4577_20835C.1.pep
GPRRRRHPSRPPRPGPGASPASHSHLIPYQPKGSAMRKTFCFGAAAWPTGRRSGRRWSIARCAPTSTTALLYSDDKVVAFRDINPSAFRHYLVYPLIICQL

SEQ ID NO: 282607 - protein, 57 aa, Zea mays
  Clone ID: MRT4577_20836C.1.pep
KKNHNFYNRNILLDIIIYLYISFSTLLINRCSHTQNNFLEQHGDQHTNINMHGRIDQ

SEQ ID NO: 282608 - protein, 70 aa, Zea mays
  unsure (1)..(70): unsure at all Xaa locations
  Clone ID: MRT4577_20837C.1.pep
FLLSAVAGGHRRKLDDASESMETLESMQEDDEMAVVVHKRILSQVKMNDXYARYDPSPTMAKPRSKDIPN

SEQ ID NO: 282609 - protein, 87 aa, Zea mays
  Clone ID: MRT4577_20838C.1.pep
VRGFLWLVVLSFCTFCLYSLSPSGCLSSLLFLPQSFSGHSVLFSRLLVFRPAFACLMRSGSMPGLFKTSPLSSLVCVKYKFRSGSSR

SEQ ID NO: 282610 - protein, 78 aa, Zea mays
  Clone ID: MRT4577_20839C.1.pep
WPWHHMSSYSFSSYRVFLFSSWDFSCAFFIIMASISPRAANKVGEYSQRVLDVVHVCTVRPVYVLSRNPCTTKFKILT

SEQ ID NO: 282611 - protein, 609 aa, Zea mays
  Clone ID: MRT4577_2083C.1.pep
MDPKGKGMMINDKEKETFVNEPNDDKPTDSGSGHKRKDGRKKKTKRIKEIVYYDSDESSSSQKDDDDHDRRKTIHKNAQATTVLLASLCRDEYHKVSGLDNAKQIWDTLKISHEGNDVTLLTKMELVEGELGRFAMIRGEEPTQTYNRLKTLINKIRSYGSTRWTDHDVVRLMLRSFTVLDPHLVNNIRENPRYTKMSPEEVLGEFVSGRMMIKEARYVDDALNGPINEPQPLALKATRSKEALPSKVAQIEAAGLNNEEMALIIKRFKTVLKGRKGQPSKTKAKGKRSCFKCGKLGHFIANCPDNDSDQDQGNKREKKKNYKKAKGEAHLGKEWDSDCSSSDSDNEGLAATAFNKSSLFPNERHTCLMAREKKDKSKTQGTLKRFLRRAQNEFELKVKKIRSDNGSEFKNLQVEEFLEEEGIKHEFSAPYTPQQNGVVERKNRTLIDMAWTMLGEFKTPECFWSEAVNTACHATNRVYLHRLLKKTSLYQMDVKSAFLNGPIKEEVYVEQPPGFEDERYPDHSCEEFSRVMTQKFEMSMMGELNYFLGFQVKQLKDGTFISQTKYTQDLLKRFGMKDAKPAKTPMGTDGHIDLNKGDFGEAMGLKGQD

SEQ ID NO: 282612 - protein, 72 aa, Zea mays
  Clone ID: MRT4577_20840C.1.pep
QFLYPYLISFTHPSNHQPDGLKLTCGRHTTLQTFPSKYKLLLITSYTYYTFYHNTFPPSTSPLYLHTSLPLL

SEQ ID NO: 282613 - protein, 825 aa, Zea mays
  Clone ID: MRT4577_20841C.1.pep
DTSDTDFVADSGDAVENDDSDEEFAPDKDTPPAPAVPEAALPPPVPIRIKNQARNRREKRRRGKKARRDAPPLPWEEWQVANDSWLDERNAADGGVEATDATVAAVPTADPAPEVVLRLLRFQKEWLAWALAQEASVTRGGILADEMGMGKTIQAISLVLTARRLRPPDHHSAASSSNSSVGRTKPQVGCTLVVCPVVAVIQWTEEIERHTASGSVRVLIYHGAKRVTQSFDFNSYDFVITTYSTIEADYRKHIMPPKTRCQYCNKLFYPNKMKVHLMYHCGPNAKRTEAQAKQQSKRKWDSSKEKVKEKRRVHKKGDEVNKDFQELADELGRQLRGQSPLHSVRWERVILDEAHFIKDRRCNTARAVFALESECKWALSGTPLQNRVGELYSLIRFLQIFPYSYYFCKDCSCEILDTSMKKQCDCGHSSVRHFCWWNKYISTPIQYGSTSFEGKRAMTLLKEKVLKGIVLRRTKKGRAADLALPPKIVTLRRDSFDKNEMEFYEALYTQSVTQFDAYVDAGTLMNNYAHIFDLLTRLRQAVDHPYLVAYSKTAGHPEGMKNEGNESMESQCGICHNLAEDVVVTSCDHAFCKTCLIDYSAALGNVSCPSCSIPLTVDLTAQNSVGKVTRSVKGRKCSGILSRLPSLVDFKTSTKIDALREEIRNMIEHDGSAKGIVFSQFTSFLDLIQFSLERSGIKCVQLNGAMNITEKGRAIDTFTHDADCRVFLMSLKAGGVALNLTVASHVFLMDPWWNPAVENQAQDRIHRIGQFKPIKSTRFVIKDTVEERILQLQQKKQLVFEGTVGDSPDAMSKLTEADLKFLFQI

SEQ ID NO: 282614 - protein, 66 aa, Zea mays
  unsure (1)..(66): unsure at all Xaa locations
  Clone ID: MRT4577_20842C.1.pep
QSIQHVHVQCHYCTRDVHQSRRACESHVRLIPSSGTLTYPLESHLNQLLRLSFHARWCTIRSDFXL

SEQ ID NO: 282615 - protein, 122 aa, Zea mays
  Clone ID: MRT4577_20843C.1.pep
LFGRCPWASRAWSCGVRCSSARPLRGCCSPCSPSWSSCPCLAVLWLGCPWSSGPQLPRWAFFAAGSLVFPSIVLCPATRGSGGFFFCGVGHQALFRFVSPSSSSFAVVGGFKMNRFCQKKRA

SEQ ID NO: 282616 - protein, 223 aa, Zea mays
  unsure (1)..(223): unsure at all Xaa locations
  Clone ID: MRT4577_20844C.1.pep
GPTLFRAAAKNHKDVLXVVVDHHDYPALLKCLQEKQADPQFRRMLAWKAFQHVASYDSAVSEWLWKQSSGGEIFPPSFTVPLSMKSTLRYGENPHQKAAFYGDRSLSLVNAGGIATSFQHHGKEMSYNNYLDADAAWNCVSEFENPTCVVVKHTNPCGVASRQDVLEAYRLAVRADPVSAFGGIVAFNTTIDEDLAKEIREFRSPTDGETRMFYEIVVAPGYT

SEQ ID NO: 282617 - protein, 108 aa, Zea mays
  Clone ID: MRT4577_20845C.1.pep
GGFYPGPPPSSGGGPGGGGPAPLAGPSAPAPASALRARSPPPRPSGRCLLSTGRSQRSAAGGMILLYVWAQTFAVGWSSGPFRICMLHLLLQFYVLPGPARPPALHGG

SEQ ID NO: 282618 - protein, 126 aa, Zea mays
  Clone ID: MRT4577_20846C.1.pep
PFEMLGTTITSAALDHHAQLRVVLCLEYHAQALGALLQRLAAARRSTLAAARGPPPASAGRHSSRHATCSMHSILSTFMSASCTCRTPMSVTAASSSSAALPAIRGDLVLCVRCLVQAPLSRAGTG

SEQ ID NO: 282619 - protein, 137 aa, Zea mays
  Clone ID: MRT4577_20847C.1.pep
LGLHNFTKEPLPLSRFAPPFYPLTHLPHKTRGGGGANWAYNLKKHATTTQSLLPGTPVTQKKKSEGPTPGPNYKTDRGKNKTHFLLGPPGATNLEKPKKKAPPKKNREGGGANKQSPHKIMEKGQLLKTGKKKFYIP

SEQ ID NO: 282620 - protein, 60 aa, Zea mays
  Clone ID: MRT4577_20848C.1.pep
TLIIVQACQKDNQKWKLEQKYLLKDHFNLGVKCSHLYPKKSVRLILTFNKDISHLFLCFK

SEQ ID NO: 282621 - protein, 291 aa, Zea mays
  Clone ID: MRT4577_20849C.1.pep
MDPSLKEEVMKAVEEARSAAAPRCRVVRIIVHDEDATDSSSSDDEGEEAGERAAAHPAAAPAGSVKRSRVLLQSAGCGAEEDGEGARFTGVRRRPWGRWAAEIRDPLLRRRVWLGTFDTAEEAAAAYVAARLRIRGPSNSLPPPEHRPALPPRPPPPPQQREKKLPLPPPPPPLLPLPPKKQQYPPPPLLPPKKQLYPPPLPLLPPKKQQQHHHHPSPPLPTLPPKKRLPSPPLLRESKKQCVASSPAEPRFMPLPVWALMSGSGKRKKRSGCGGRVPALHTPAAEETGRA

SEQ ID NO: 282622 - protein, 1680 aa, Zea mays
  Clone ID: MRT4577_2084C.1.pep
MTTRKRKTVNSNFSFDYSRIPHNSNAHLLSIPLGKPPHFDGEDYGFWSHKMRSHLFSLHPSIWEIVENGMQFDSTDTPMFINEQIHKNAQATTVLLASLCREEYHKVSGLDNAKQIWDTLKISHEGNDATMITKMELVEGELGRFAMIRGRSQPKRTTGSRPWYTKMTPEEILGKFVSGRMMIKEARYVDEVLNGPMPIHEPQTVALKATSSIEGLPSKVTQVEAAGLNEDEMALIIKRFKTALKGRKEHPNKSKTKGKRSCFKCVTRNKERMGRENKKVYKKAKGEAHLGKEWDSDCSPSDSDDEGLAATAFNKSSLFPNEHHTCLMAKEKKVSIQNTIAYASSSDDESSDDEVDYASLFKGLDRTKIDKIKELIDALNEKNRLLEKQEDLLYEEHDKFVNVQKSLALEVKRNEMLSCELSTCHESISSLKSVNDDLNAKLEVANKSSSCIEHVAICNRCKDFNVDACVEHLTSIAKLNGEVASLNAQLKTSKSDFDKLKFARDAYTIGRHPSIKDGLGFKREAKNLTSQRASIFNKEKGKAPMANSSQKNHAFIYDRKFSRNAYHNRSCNAYDSHAMFASSSSFVHGRDMPRKNVVHHMSRKMHNENATIIHDCNTDFALQCKNKKVVATKLGAKCKGDKSCIWVPKAIFTNLVGPNKSWVYASGGSSWIIDSGCTNHMTGEKKMFTSYVKNKDSQDSIIFSDGNQGKVKGLGKIVISSEHSISNVFLVESLMYNLLSVSQLCNMGYNCLLTNVDVSVFRRSDGSLAFKGVLDDKLYLVDFSKEEADLDACLIAKTSMGWLWHRRLAHVGMKNLHKLLKGEHVLGLTNVTFEKDRPCAACQAGKQVGSTHHSKNVMTTSRPLELLHMDLFGPVAYLSIVGSKYGLVIVDDFSRFTWVFFLQDKTETQGTLKRFLRRAQNEFELKAKKIRSDNGSEFKNLQVEEYLEEEGIKHEFSAPYTPQQNGVVERKNSTLLDMARTMLGEFKTPERFWTEAMNTACHAINRVYHHRLLKKTSYELLTGNKPNVSYFRVFGSRCYILVKKGRNSKFAPKVVEGFLLGYDSNTKAYRVFNKSSGLVEVSSDVVFDETNGSPREQVDLDDVDEEDVPTAAIRTMAIGDVRPQEQKEQDQPSSSIVVHPPTQTDEQVHQEEACDQGGAQDDHALEEEAPQAPPTQVRATIQRNHPVDQILGDISKGVTTRSRLANFCEHYSFISSIEPFREELNNFKRNEVWTLVPRPKQNVVGTKWVFRNKQDEHGVVTRNKARLVAKGYAQVAGLDFEETFAPVARLESIRILLAYASHHSFRLFQMDVKSAFLNGSIKEEVYVEQPPGFEDERYPDHVGKADPTLFTKTCDDDLFVCQIYVDDIIFGSTNQKSCEEFSRVMTQKFEMSMMGELNYFLGFQVKQLKDDTFISQTKYTQDLIKRFGMKDAKPAKTPMGTDIHVDLNKGGKSVDQKAYRSMIGSLLYLCASRPDIMLSVCMCARFQFDPRECHLVAVKRILRYLVATPCFGIWYPKGSTFDLIGYSDSDYAGWKVDRKSTSGTCQFLGRSLVSWSSKKQTSVALSTAEAEYVAAGQCCAQLLWMRQTLRDFGYNQSKVPLLCDNESAIRMADNPVEHSRTKHIDIRHHFLRDHQQKGDIEVFYVSTENQLADIFTKPLDEKTFCRLRSELNVLDSRNLD

SEQ ID NO: 282623 - protein, 53 aa, Zea mays
  Clone ID: MRT4577_20850C.1.pep
CACSMMTPHLELRSSLDDLDHVGSSTTESVCPLLKFGPGPCGTIQRATLRDSP

SEQ ID NO: 282624 - protein, 101 aa, Zea mays
  unsure (1)..(101): unsure at all Xaa locations
  Clone ID: MRT4577_20851C.1.pep
MATNRSVGTLVEADLQGNNVFVRADLNVPLDDAQKITXDDTRIRASDPTINTPLEKVAKAILATHLRRPKGVTPKXRLKPPVFFLSEPLGVYSAMATDCIA

SEQ ID NO: 282625 - protein, 160 aa, Zea mays
  unsure (1)..(160): unsure at all Xaa locations
  Clone ID: MRT4577_20852C.1.pep
GAPLIFNALNKLSPKKPWGLFFFFGRGLQGSPLKALGAKVENLEKVXTAFLPRGKAHFEGSLGPSKGDFSPPPQSLFVKGFKDWVGFFFDPRFFEPPPSNRVFNVFFFFKLFYLGMKKTSFLWGRRVFLYLVIYHQVLLFNSGEIAPPQREKPTPPFFFI

SEQ ID NO: 282626 - protein, 163 aa, Zea mays
  Clone ID: MRT4577_20853C.1.pep
MDDGDSVAPSADKDDAPPGDDGSSTPLPETIQIGNSPTYKLDRKLGKGGFGQVYVGRRISTPSLSDRAPGANALEVAIKFEHRTSKGCNYGAPYEWQVYNTLSGIHGVPRVHYKGKQSEYYIMIMDMLGPSLWDVWNNNSHSMSVEMVACIAIEAISILEKMH

SEQ ID NO: 282627 - protein, 79 aa, Zea mays
  Clone ID: MRT4577_20854C.1.pep
VQLVRFVYLDKPYMSMGICSIHHFSLWLRWERVILAFQHDVSMVIGKATRYRNWYLPSYNGGISCYFLKEDKRHLQLSQ

SEQ ID NO: 282628 - protein, 87 aa, Zea mays
  Clone ID: MRT4577_20855C.1.pep
CVFPGDRWSKNVRHSYGEVGCGSSAGVADLLGRAGMDYSGRTPNSGCTHMSILGHHGRAMVVLMRLRRGLPRRRQPARGRARQGVPR

SEQ ID NO: 282629 - protein, 52 aa, Zea mays
  Clone ID: MRT4577_20856C.1.pep
TFLRFVLNENVLLVGDAFHPAVAIEYVSKKLCGPLNGYTLINQKELNDRRLF

SEQ ID NO: 282630 - protein, 157 aa, Zea mays
  unsure (1)..(157): unsure at all Xaa locations
  Clone ID: MRT4577_20857C.1.pep
MERVFGLDGRDFALAPXDTSAEHXILVHKTSQGRXVWRLHYREMTXLAREPGCQXELTEPIQKXLHLCQSGNTMPFSTAANANFTQGELAKALRDSPYMANIILDDYGRDDAAISYYXFDYCASLHNIAQXAAVYASYFGSTLMDTLXYPDVTVDET

SEQ ID NO: 282631 - protein, 73 aa, Zea mays
  Clone ID: MRT4577_20858C.1.pep
AEPGWPRGRETQGHVDASRRGCIHFPAELKTKYDWVHPRLPHRYSSFSEVRWTNSAAGSFYRFFVVMKHAVLL

SEQ ID NO: 282632 - protein, 68 aa, Zea mays
  Clone ID: MRT4577_20859C.1.pep
NVLVYPCNILHRRETDAATKGSVGQAWGRITARRSRGRKGLQSLIMCRREVGGEGGEGGGRRRMQETL

SEQ ID NO: 282633 - protein, 132 aa, Zea mays
  Clone ID: MRT4577_2085C.1.pep
HSSAHASGAQTLARLKRSRGDYCMRLTCSSRSRAGDNINMLQLDKRQCQGIMDQDRAAGPVAPKRIYPVQDGSGSGTSEPTPTPALVTDAGRAQVAAGLCSELPRLICGEFRRSAPPLPSHESRTTSASKET

SEQ ID NO: 282634 - protein, 329 aa, Zea mays
  unsure (1)..(329): unsure at all Xaa locations
  Clone ID: MRT4577_20860C.1.pep
MASASRALLLDGCDFEHWLVIMEPPPGDASNPDITRDEIIDSYIKTLAQVVGSEEEARQKIYSVSTRHYFGFGALVSEELSYKLKEIPKVRWVLPDSYLDVKNKDYGGEPFINGQAVPYDPKYHXXEWVRNNARANDRNRRNDRPRNFDRSRNFDRRRENMQNYQNRDGPPAQGFNXPPPPPGQNQMPSHHGQGNMPPATPHAGGAATNYQPQMQNXQTGYNPGGAPHXTKQGAAPGYQGGPPGYQGGYQGNPGPAYQGGNTGYQGGKPXPPYQGSNPPPPYQGGSPPGPPPPYRGGNPNVPPYSGGGNPGYPGGSPGYQGQGGNSNFQ

SEQ ID NO: 282635 - protein, 58 aa, Zea mays
  Clone ID: MRT4577_20861C.1.pep
YHQAWWHIIKTGRSDLFCHLCIGGWCCNASHILSCGLEAGTNVVTLVDIVWLPCYAIL

SEQ ID NO: 282636 - protein, 351 aa, Zea mays
  Clone ID: MRT4577_20862C.1.pep
LGTSRPAGPNWLHRPPKETILLDGCDFEHWLVIMEPPPGDASNPDITRDEIIDSYIKTLAQVVGSEEEARQKIYSVSTRHYFGFGALVSEELSYKLKEIPKVRWVLPDSYLDVKNKDYGGEPFINGQAVPYDPKYHEEWVRNNARANDRNRRNDRPRNFDRSRNFDRRRENMQNYQNRDGPPAQGFNGPPPPPGQNQMPSHHSQGNMSPQPPHAGGGQPNYQPQMQNPQTGYNPGGAPHYQQGAAPGYQGGPPGYQGGYQGNPGPAYQGGNTGYQGGNPPPPYQGSNPPPPYQGGSPPGPPPPYRGGSPPGPPPPYRGGNPNVPPYSGGGNPGYPGGSPGYQGQGGNSNFQ

SEQ ID NO: 282637 - protein, 547 aa, Zea mays
  unsure (1)..(547): unsure at all Xaa locations
  Clone ID: MRT4577_20863C.1.pep
MTSHARVRKLGIRLEQNYQNRDGPPAQGFNGPPPPPGQNQMPSHHGKGEHASATTTCWWRPTKLSAPNAKPTDGLQPWRCSSLPARCCSWLPLGTSRPAGIATSGRVLFISAIRIVSLGFGTLAAAMASASRALLISRALQAGAVSRRVPALLRPVAAAASLLPAVAGPAGAALGARVRCFATQPATSSLRDSSPNWSNRPPKETILLDGCDFEHWLVIMEPPPGDASNPDITRDEIIDSYIKTLAQVVGSEEEARQKIYSVSTRHYFGFGALVSEELSYKLKEIPKVRWVLPDSYLDVKNKDYGGEPFINGQAVPYDPKYHEEWVRNNARANDRNRRNDRPRNFDRSRNFDRRRENMQNYQNRDGPPAQGFNGPPPPPGQNQMPSHHSQGNMPPQPPHAGGGQPNYQPQMQNPQTGYNPGGAPHYQQGAAPGYQGGPPGYQGGNQGNPGPXPTKVGNTXIKVANPPPPYQGSNPPTSLXGSNPPPPYQGGSPPGPPPPYRGGSPPGPPPPYRGGRPSVPPYSGGGNPGYPGGSPGYQGQGGNSNFQ

SEQ ID NO: 282638 - protein, 108 aa, Zea mays
  Clone ID: MRT4577_20864C.1.pep
FGFFLCGICSLLLDGMGCSASILNRAHGNLLWGGALNQAQKTKGAKQPSEQGVFQKGGGGKKTTAHPLGPKKGTPNRPLKNSLGQPHREGGGSDRGSLKAPGPPEPQG

SEQ ID NO: 282639 - protein, 89 aa, Zea mays
  Clone ID: MRT4577_20865C.1.pep
LHRLSFLRPLLPGSAPSGLLLLPRISSSSPAFCNAACLVMKCCSFRQSHAIDSSRVTDSLSLSLSLSLSLTIHALWCTDACVTCRRVDT

SEQ ID NO: 282640 - protein, 142 aa, Zea mays
  unsure (1)..(142): unsure at all Xaa locations
  Clone ID: MRT4577_20866C.1.pep
HANGELGKQLEQHFSKHFKTKNATNKRFLGIFPPTTKTKCSYHFTSKLQGMYXTDLKXTSNDTTQALYASTSSQLPTDAPTNSLQKHTTASWPTQXPSIPTTSPLXIAAYSKKTLTYYLGTHNGTMLTXQTNIGTADIKITL

SEQ ID NO: 282641 - protein, 55 aa, Zea mays
  Clone ID: MRT4577_20867C.1.pep
STWYDGESTYIRLGCRYVPGSRRAAQLHDPRRSSPTPRSRSATLSRRRRRPGPTA

SEQ ID NO: 282642 - protein, 105 aa, Zea mays
  Clone ID: MRT4577_20868C.1.pep
SRYFCRINVRVSSVVVPCSGRIFVLLGIRRGVLFPDVGHSSSPFLRIEARSRLTGHHLVVYVNVPHLCWRILGDCGRKIPLCCIQGRPAKHMLDNNPRAEFRAYV

SEQ ID NO: 282643 - protein, 21 aa, Zea mays
  Clone ID: MRT4577_20869C.1.pep
ILQAMIQYLMSMQACNLITLP

SEQ ID NO: 282644 - protein, 1623 aa, Zea mays
  Clone ID: MRT4577_2086C.1.pep
MDPKGKGIVINDKEKESFVNEPKDDKPTDSGSGHKRKDGKKKKTRRIKEIVYYDDSDESTSSQKDNDGNDYDKRKTVNSNFSFDYSRIPHSSNAHLLSIPLGKPPHFDGEDYGFWSNKMRSHLFSLHPSIWEIVENGMKFDSSDSPIFINEQIHKNAQATTVLLASLCRDEYHKVSGFDNAKQIWDTLKISHEGNDVTLLTKMELVEGELGRFAMIRGEEPTQTYNRLKTLINKIRSYGSTRWTDHDVVRLMLRSFTVLDPHLVNNIRENPRYTKMSPEEVLGKFVSGRMMIKEARYVDDALNGPINEPQPFALKATRSKEALPSKVAQVEAAGLNDEEMALIIKRFKTALKGHKGQPSKTKTKGKRSCFKCGKIGYFITNCPDNDSDQEQGNKREKKKAYKKAKGEAHLGKEWDSDCSSSDSDNEGLAATAFNKSSLFPNERHACLMAKEKKVCNRNNATYESSSDDESSDEEIDYSSLFKGLDRNKVDKINELIDALNEKDRLLEKQHDLLYEEHDKFVEAQKSHALEVKRNEMLSCELSSCHETISSLRSINDGLNAKLEIASKSNSCVEHVMICNRCKDFDIDACSEHLVSISKLNDELASLNAQLKTSKSDFDKLKFARDAYTIGRHPSIKDGLGFKREAKDLTSHKAPISIKEKGKAPMATSAKKNHAFMYHDRRQSYRSCNAYDAFDSHAMFASSSSYMHGRDMSRRYFVHMPRRNVVNVPRKVNEPSIIYHALNASFAICRKDRKIVARKLGAKCKGDKTCIWVPKNICANLVGPNMSWVYASGGSSWIIDSGCTNHMTGEKKMFTSYVKNKDSQDSIIFGDGNQGKVKGLDVSVFRRSDGSLAFKGVLDGKLYLVDFAKEEDKSETQGTLKRFLRRAQNKFELKVKKIRSDNGSEFKNLQVEEYLEEEGIKHEFSAPYTPQKNGVVERKNRTLIDMARTMLGEFKTPERFWSEAVNTACHAINRVYLHRLLKKTSYELLTGNKPNVSYFRVFGSKCYILVKKGRNSKFAPKAVEGFFLGYDSNTKAYRVFNKSSGLVEVPSDVVFDETNGSPREHVVDFDDVDEEEVPTAAIRTMAIGDVRPQEQDERDQPSSSTMVHPPTQDDEQEAVEEALLDPDWVLAMQEELNNFKRNEVWTLVPRPKQNVVGTKWVFRNKQDEHGVVTRNKARLVAKGYAQVAGLDFEETFAPVARLESIRILLAYVAHHSFRLFQMDVKSAFLNEPIKEEVYVEQPPGFEDERYPDHVCKLSKALYGLKQAPRAWYECLRDFLIANAFKVGKADPTLFTKTCDGDLFVCQIYVDDIIFGSTNQKSCEEFSRVMTQKFEMSMMGELSYFLGFQVRQLKDGTFISQTKYTQDLIKRFGMKDAKPAKTPMGTDGHTDLNKGGKSVDQKAYRSMIGSLLYLCASRPDIMLSVCMCARFQSDPRECHLVAVKRILRYLVATPCFGIWYPKGSTFDLIGYSDSDYPGCKVDRKSTSGTCQFLGRSLVSWSSKKQTSVALSTAEAEYVAAGQCCAQLLWMRQTLRDFGYNLSKVPLLCDNESAIRMADNPVEHSRTKHIDIRHHFLRDHQQKGDIEVFHVSSENQLADIFTKPLDEQTFCKLRSELNVLDSQNLD

SEQ ID NO: 282645 - protein, 159 aa, Zea mays
  Clone ID: MRT4577_20870C.1.pep
QNPKWGPFPDLGGWLGPHLERGPPSGLPRDQTGGPAPRFKNHLGFFYGGHKTKALFKGFFFQKAPLGVLGGGQVRNPVLGPGFSPLPFAKMLFPQYLFALVGFFVPPLGPSKKTGVVLGCFLGSAPPPGFSQNWFWFFFWGSRFGPPVFFHGAGGPPLG

SEQ ID NO: 282646 - protein, 60 aa, Zea mays
  Clone ID: MRT4577_20871C.1.pep
GTHFRERCCRRIIYRGQYLLQCPVRNKQYSVTARNLGDAAADSLTRESSLRSTLTRVPGA

SEQ ID NO: 282647 - protein, 87 aa, Zea mays
  Clone ID: MRT4577_20872C.1.pep
KTKTNLGGEDQKRHPLTKLGTKPGGVGFRGGSLGKSAQFLKGLGIFFYNCKAKKVFGGFPPCKYLRQSFLFFFSPGGFKREAPLFRI

SEQ ID NO: 282648 - protein, 46 aa, Zea mays
  Clone ID: MRT4577_20873C.1.pep
VVIHPRSSNLSCRNIWQTWIIIPAPKCNLLICFFACYMMVFLSSTT

SEQ ID NO: 282649 - protein, 328 aa, Zea mays
  unsure (1)..(328): unsure at all Xaa locations
  Clone ID: MRT4577_20874C.1.pep
MGGSSGLVDWRGRPVNTKKHGGVRASIFIHALVLLSNVANIASILNLVSYLREEMHMDVARATTMASNFFAALQMFSIPAAFLADSYIKRFYTVLIFGPIEILGYILLAVQAHVPSLHPPPCVPGQETSTCESVSGSNLSLLLLGLYLIPIGDGAARACLPAFGGEQFDRSDPVEQRQESSFFNWYTFSVSTGGFVGLVFIVWVENSKGWDVGFAVCALSVLLGMLIWIAGLPLYRNQLPTSSPITRILQVLVAAFKKRNVALPANPSELKQISQGDAGSLEILHRTDGFRCLXQAAVDTGKTGGWILCSITQVEETKIILRMVPIFL

SEQ ID NO: 282650 - protein, 114 aa, Zea mays
  Clone ID: MRT4577_20875C.1.pep
SVANRKWTWARESDASVIESDVPEAVTSTVISGPLRGWAADAGEAHTCTSYCAEAVFVRPSCLHSCLRCCPPVRHRSTVLILSTSADSTVRHSVVPSIRIFLRYVISQGAERKR

SEQ ID NO: 282651 - protein, 77 aa, Zea mays
  Clone ID: MRT4577_20876C.1.pep
SIIHRLRGLILKSSVPTVHHRAYDGEDHLYSNDLGGLGHVRRAQLRLQECDVPQLQTLYLGLETGCPMEIDCAAQRR

SEQ ID NO: 282652 - protein, 215 aa, Zea mays
  Clone ID: MRT4577_20877C.1.pep
GTLEAGRDAGMYPIVNVTGLPSLVKPSPVWLNVQHPTFYKQRGLDMSSYILSTHQDLVPTVAYISSPELGFLQTISAVAGRTRTTTKLVFSFLDKALLDHSVNRTYGSLLANLTLVRSVASGIMVPKSYIWPVTGDNYLLPSTSVVTDAHKAGLEVYASDFANDRVIPYNYSYDPVAEYLSFVGDGGFSVDGVLSDYPITASEAIGKPLKIKALH

SEQ ID NO: 282653 - protein, 172 aa, Zea mays
  unsure (1)..(172): unsure at all Xaa locations
  Clone ID: MRT4577_20878C.1.pep
IAVGILPLSSLFLQQSSAVLPQLPLVHLXGHNISAQDRHLVIANLASSSQQQQFIPFSPLGSMXAASYLQHRQLPFRQLRHECPQQFIPFNQLPALNSLVYLQQQQLLPFXQLTGVSPATFLAQPQLLPFYQLVAPKAGTLLQLQQLLPFNHHALTNPTVFYHQPIIGGALF

SEQ ID NO: 282654 - protein, 86 aa, Zea mays
  Clone ID: MRT4577_20879C.1.pep
KKERFLTTKLVKDNRSAHNNGGCWQAKLYPITKPGCHGLQFQRALPKPLIILISVNFIWGSSLLLIKHTHSGSAMLVGNSIARGRW

SEQ ID NO: 282655 - protein, 55 aa, Zea mays
  Clone ID: MRT4577_2087C.1.pep
YPSNSGVTLSFSHFYFLFLNSEELFFISMCKPSIVKNNSSLFRKKKKKGGHSRSR

SEQ ID NO: 282656 - protein, 104 aa, Zea mays
  Clone ID: MRT4577_20880C.1.pep
DKRFPSPFSKGKLGVKFNPFLKFPPCFKNMGFWVNDAFPENHFCGVVKGKTGGFVWGVKLFYNFPPKKGMPSLCSRKAYRSMERSLPAGGISHFPFNVREPVKN

SEQ ID NO: 282657 - protein, 170 aa, Zea mays
  unsure (1)..(170): unsure at all Xaa locations
  Clone ID: MRT4577_20881C.1.pep
MKPMATNGMAPSFFAANFLLQMQQEQQAHHQHQHHEGHDHLLAPPPPALVSPFLHDFGGAMTAPPPPMLATGIKRMYPDGMCDDGSGHLHAEPKQHQQDCGGGASXRGGXPRRRXGERKRXRLSVEQVRTLXERTSEGGQXKLEPERKAQLXARALGXLQPGQVAIWFQN

SEQ ID NO: 282658 - protein, 78 aa, Zea mays
  unsure (1)..(78): unsure at all Xaa locations
  Clone ID: MRT4577_20882C.1.pep
GVGTDIVFYKKAAVRNGVVVEESDVGLCGVGDGEMFVVRYVEVESVSIAPAREEVYRLAVVLDWKMVSLGIWXFGVFV

SEQ ID NO: 282659 - protein, 77 aa, Zea mays
  Clone ID: MRT4577_20883C.1.pep
CTKVLPRSSRMSGLQFGTDFAGVSTGSRPCVSFDRPLERWLVAVFGGIPSTRLDPFAHYRLMTLVCAVTIVRVGRSG

SEQ ID NO: 282660 - protein, 60 aa, Zea mays
  Clone ID: MRT4577_20884C.1.pep
TARDGFTFQAPMLYKLARRYCSSVMGTSAWSAASYYIHVHGLSRSSRNSWSASLQSRQLS

SEQ ID NO: 282661 - protein, 217 aa, Zea mays
  Clone ID: MRT4577_20885C.1.pep
MVTEQPSEDDGGVNFQDGGGSSAALLDKNAGEEIELVAGVRALQVPLTGNGSDASHESEMRKFNEVLTVRESEVDTQEVSKEMEHTDIAELQADIVDEAAFLDCSSIVNLVAGEETEVVNTEDGLGCEEDGDVDKVLHDSVDDTILIDCSIEKAGNVTREMPENQAALDEDVDKPNEVVIGDMPQDTVTDKVVQEEREVLITDEMQQGTAGMHDEIK

SEQ ID NO: 282662 - protein, 40 aa, Zea mays
  Clone ID: MRT4577_20886C.1.pep
SHARAAEIQTYHPQAKLPHDTPTQRYMNIQTIPHLSSRTL

SEQ ID NO: 282663 - protein, 103 aa, Zea mays
  Clone ID: MRT4577_20887C.1.pep
GIHETTYNSIMKCDVDIRKDLYGNVVLSGGTTMFSGIADRMQKELTALAPSTMKIKIIAPPERKYSVWIGGSILASLSTFQQMWISKEEYDESGPSIVHRKCF

SEQ ID NO: 282664 - protein, 37 aa, Zea mays
  Clone ID: MRT4577_20888C.1.pep
SKTTSPSIVTDVFSSISPTVPVTSGTSVATTSFFSSA

SEQ ID NO: 282665 - protein, 67 aa, Zea mays
  Clone ID: MRT4577_20889C.1.pep
ISRLDIDGRCEEERWSMDEGGKEGVGGADRESCLRCMEICINYFSLCDGDGDEKVRYMMVGRFVRVG

SEQ ID NO: 282666 - protein, 162 aa, Zea mays
  unsure (1)..(162): unsure at all Xaa locations
  Clone ID: MRT4577_2088C.1.pep
LCHLVLHSGLLNLKLQPWLKTKAHVNIEIIVHVIAHKYSTTGQLIYKLVCIDKRVNKRLNKEADKENNRSFKHAWMLXKLMAKRXRGLTMDIAMDKAETTKDYXTDFDAPXHPDFLKNMITNTFHAACDALITDSTTDCTNAGIYDDVHTHEHALLAATLAV

SEQ ID NO: 282667 - protein, 53 aa, Zea mays
  Clone ID: MRT4577_20890C.1.pep
GCGIYRETRGPVEACLDYISVMLLVYCRLLCRPVGVLIFVSARSWYSGYMYCL

SEQ ID NO: 282668 - protein, 46 aa, Zea mays
  Clone ID: MRT4577_20891C.1.pep
RDGAWPRAETVGYDAGPIVLIAEKRRHSGYAYAPANMHTSGVTVQS

SEQ ID NO: 282669 - protein, 143 aa, Zea mays
  Clone ID: MRT4577_20892C.1.pep
MIDGSTPLYELIYQKGILLGTMEGPPGLSQAIPVSGDAYCNSSTTHVDAAGSSSPAVAKLRKLLFRRMLIGVNDGRYFHGLFHCIDKQGNIILQDAVEYRSARHCLPPTEHRCLGLILIPAACRSSCQVDCSVEEKMSLMCLE

SEQ ID NO: 282670 - protein, 56 aa, Zea mays
  Clone ID: MRT4577_20893C.1.pep
SNNKPSHTFQSWPPDSLIQLSVSQRSTTSKSIFILPASFLCASPNPFTSLSNSYSV

SEQ ID NO: 282671 - protein, 327 aa, Zea mays
  Clone ID: MRT4577_20894C.1.pep
GTGAAASAARRYTTQQQQQQLQHHQPQLGTVPHLLAGGVAGAVSKTCTAPLARLTILFQVQGMHSDVATMRNTSIWREASRIVYEEGFRAFWKGNLVTIAHRLPYSSISFYAYERYKNLLQMLPGLEKNGGFGADVGVRLLGGGLSGITAASVTYPLDLVRTRLAAQTNTAYYRGISHALYAICRDEGVRGLYKGLGATLLGVGPSIAVSFSVYETLRSHWQIERPCDSPVLISLACGSLSGIASSTFTFPLDLVRRRMQLEGAAGRARVYQTGLFGTFGHIVRTEGFRGMYRGILPEYCKVVPGVGIVFMTYEMLKAILTGLESDD

SEQ ID NO: 282672 - protein, 54 aa, Zea mays
  Clone ID: MRT4577_20895C.1.pep
RKHWNICQWIFLRSEHKGGWIFLFPSLNLIACAPNNIFVMFYAYTRVLNTSTLF

SEQ ID NO: 282673 - protein, 260 aa, Zea mays
  unsure (1)..(260): unsure at all Xaa locations
  Clone ID: MRT4577_20896C.1.pep
RHLPSAGSTVYFGPHPHPRTPSVPANIALTRNIHRARRQQLLHHPPEVLENMQAPVKDPTILVIASTXVAAXADEVLFGFPTRYGAMAAQMKAFFDSTGSLWEAQKLAGKPAGFFVSTETQGEGQETTTRPTLLAWAGTGWTAALFRRIQRRARAEHEKTSRPGRQKRIISCCFLRISSKTLSSIHGPLRPNLLLSSVPHHSPRWHGMACAPRGFSVSNPRRRPTGPHARLYAPPVIHLDSGGTTRTRLQSTPSNDNDPS

SEQ ID NO: 282674 - protein, 93 aa, Zea mays
  Clone ID: MRT4577_20897C.1.pep
LSAQRRTLSWRTRTSLLSTRRRHVCCPAIVVRCSVYDPAGASARFRDPMHKKRWICTSDDITVLILGDYHQYYSRTSFLHYLDDDARHALGLQ

SEQ ID NO: 282675 - protein, 225 aa, Zea mays
  Clone ID: MRT4577_20898C.1.pep
RPARPGRPAMEKKLLLPLAVAHKHAHGGGGERPWARPWRWAKTAFFVAAMLASLLLVCAPPLLVVLLDLALPPALLLRGGDGGGGSLALAVVAQARAFDFRSSLVDLPAVSAARALLILCAYVACGGGGAYLGVVVACAAASVCYVLAKAAAVLPRRAAGGARAVAAAGGPEAMLLLSLALAAAHLAVAYRTSCRERRRMLVYRIDVEGAVRLKGGHQTPKGPKQ

SEQ ID NO: 282676 - protein, 153 aa, Zea mays
  unsure (1)..(153): unsure at all Xaa locations
  Clone ID: MRT4577_20899C.1.pep
PPPGSPPRGGGPQXGFPPPGPXFGPWGAPFPXGGPTPPGLKXRPPGPGWGGPPPPGVGFPXGRGPFNLGRVSKPPPWGASPAFIPTPEKKFPPPGDCXPGPGPGSEEPPPPXVLPPPPGVIPPQKISXPLGVKFRGGGPPLIRIPPPPFFFLK

SEQ ID NO: 282677 - protein, 60 aa, Zea mays
  Clone ID: MRT4577_2089C.1.pep
VSSKSRSSPSTVKLLAFHTQCLWVLRYELSLCPAPCVLSQDNLFCVLCGSRARVARPGPS

SEQ ID NO: 282678 - protein, 177 aa, Zea mays
  unsure (1)..(177): unsure at all Xaa locations
  Clone ID: MRT4577_208C.1.pep
MRQRISIHIGQAGIQVGNASWELNCLEHGIQADGQMPADNTIAGGDDAFHTFFSETGAGKHVPRAVFVDLEPTVIHDVRTGTYRQLFHPEQLIRGKEDAANNFARGHYTIGKEIVDLXCLDRIRKLAENCTGLQGFLVFTAVDGGTASGLGTLLQKRLTADYGQKXSKLGFRXYPSP

SEQ ID NO: 282679 - protein, 73 aa, Zea mays
  Clone ID: MRT4577_20900C.1.pep
FLAENDNSLPHSEMDGIHIKVKLPPKRVLIVGAGLCSHGCLVEIVSLLFSRFSSSQFVIHFYMINGEGRYPSS

SEQ ID NO: 282680 - protein, 199 aa, Zea mays
  Clone ID: MRT4577_20901C.1.pep
RISALVREELERLGVTAQTVAGTGVVADVGLGMPPIVALRADMDALPIQELVEWEHKSRVDGVMHACGHDVHTAMLLGAAKLLHERKDQLKGTVRLLFQPAEEGGAGASHMIKEGVLDGVEAIFAMHIDYRMPTGVIAAHAGPTQAAVCFYVVKIEGKTGKAETPHLNVDPIVAAAFTVLSLQQLTSREDDPLHSQVLS

SEQ ID NO: 282681 - protein, 132 aa, Zea mays
  Clone ID: MRT4577_20902C.1.pep
PALRPSILKPYCARKASFDVTQHSLSYSFTRCVFDLTTSSIKTRITGRASTPDHVNKKSGHPARGYGLPRLNNWAGSTQHDARKTDPHERSGLDASDPYRQSFTAWAKALAVSLDAQAGAPSRDWRLMDQKD

SEQ ID NO: 282682 - protein, 93 aa, Zea mays
  Clone ID: MRT4577_20903C.1.pep
SEDEEEEESDEDKPDETGFITPADSGLITPGGFSSVPAGMETPELIELRKKKIEEAMDGSETPQLFTVLPEKRTATVGGAMMGSTHIYDMSTV

SEQ ID NO: 282683 - protein, 128 aa, Zea mays
  Clone ID: MRT4577_20904C.1.pep
LFIFVRHSLDLGLKGSTQSCWANPQSLTPPPHLQRPQAIADDRPLHRRFGSHRALSASPCLTSSSSLLPALSSPSRRRAYDSRAPGACFSQSLPILELAAGHPPGAPVRAFTAPSPYGLIGTLVMVVS

SEQ ID NO: 282684 - protein, 77 aa, Zea mays
  Clone ID: MRT4577_20905C.1.pep
SKGINLNDINYDLYIQMKQIVWLNFKTTDLQLSISDINSFMGRAGITSPLLGCNLVSIIFFFKKKSPLVKSNFSVRY

SEQ ID NO: 282685 - protein, 132 aa, Zea mays
  unsure (1)..(132): unsure at all Xaa locations
  Clone ID: MRT4577_20906C.1.pep
MGAIVLSEFVGCATSLGGAVHINPWNVDAVAEGMHMALRFNGREKQVRQEKHYRFVSTHDIAYWGRSLDQDLQRASKDHASMKFMSVGLAMSYHIVVLGPNFQKLSPEHINPSXQRASKRLILLDYDENSNV

SEQ ID NO: 282686 - protein, 259 aa, Zea mays
  unsure (1)..(259): unsure at all Xaa locations
  Clone ID: MRT4577_20907C.1.pep
MAQSWAFFLLVVLCFCCVSDLICGSNGERVFLYPQSQKVSSIVSQRYRTAYHFQPPKNWINDPNGPMYYNGIYHEFYQYNPNGSVWGNIVWGHSVSTDLINWIPLETAIARDTPSDINGCWTGSATILPGNRLVIIYTGADPEKRQVQNIVVPKNMSDPYLREWTKAGNNPVIQPVGPGLNSGQFRDPTTGWVGPDGLWRIAVGAELNGDSAALLYKSKDFLNWTRVDHPLYSSNSSSMWECPNFFAVLQGXSGGLDWS

SEQ ID NO: 282687 - protein, 91 aa, Zea mays
  unsure (1)..(91): unsure at all Xaa locations
  Clone ID: MRT4577_20908C.1.pep
RSHPSLSSAVPGPCGPEELMDGVIFGAKYLGSTQLLSERSPAPSTRMXXQAQEAMDRVKVSQGWSSWAGGFHVPTTSNFCVPFLPCRPLKA

SEQ ID NO: 282688 - protein, 54 aa, Zea mays
  Clone ID: MRT4577_20909C.1.pep
PSSRAGHHIPTSRTRTNCYPLASPSPAPLQFSPSNRISQSDTENGRGVVVPLVR

SEQ ID NO: 282689 - protein, 765 aa, Zea mays
  unsure (1)..(765): unsure at all Xaa locations
  Clone ID: MRT4577_2090C.1.pep
VYASGGSSWIIDSGCTNHKTGEKKMFTSYVKNKDSQDTIIFGDGNQGKVKGLGKIAITSEHSISNVFLVESLGYNLLSVNQLCHMGYNCLFTNVDVSVFRSDGSLAFKGVLDDPLPNLASREDKSETQGTLKRFLRRAQNKFELKVKKIRSDNGSEFKNMQVEEYLEEEGVKHEFSAPYTPQQNGVVERKNRTLNDMARTMLGEFKTPERFWSEAVNTACHAINQLYLHRLLKKTSYELLTGNKPNVSYFRVFGSECYILMNKGRHSKFAPKDVEGFLLGYDSNTKAYRVFNKSSGLVEVSSDVVFDETNGSPREQVDLDDIDEDDVPTAAMRTMAIGDVRPQEQQEQDQTSSSTMVYPPTQDDGQVHQEEARDQGGAQEEQVMEEEAPQDPPTQVRATIQRNHPVDQILGDISKGVTTRSRLANFCEHYSFVSSIEPFRVEEALQDPDWVLSMQEELNNFKRNEVWSLVPRPKQNVVGTKWVFRNKQDEHGVXYPDHVXKLSKALYGLKQAPRAWYECLRDFLIANAFKVGKADPTLFTKTCDGDLFVCQIYVDDIRFGSTNQKSCEEFSRVMTQKFEMSMMGELNYFLGFQVKQLKDGTFLSQTKYTQELLKRFGMKDAKPAKTPMETDGHVDLNKGGKSVDQKAYRSMIGSLLYLCASRPDIMLSVCMCARYQSDPKECHLVAVKRILRYLVSTPCFGIWYPKGSTFDLIGYSDSDYAGCKVDRKSTSGMCQFLGRSPVSWSSKKQTSVALSTAEAEYVAAG

SEQ ID NO: 282690 - protein, 45 aa, Zea mays
  unsure (1)..(45): unsure at all Xaa locations
  Clone ID: MRT4577_20910C.1.pep
VNIVRFSFKHTVQIIRKLTRLSFIWKGLTDPAIFWNAPVHKXXNX

SEQ ID NO: 282691 - protein, 71 aa, Zea mays
  Clone ID: MRT4577_20911C.1.pep
VSQSRGTSLPGGSQLLESRALGHLCEISMLSGDPKSFLTCSVSSNLPMSDVPAKFLPDSGSVLTSKGQLGA

SEQ ID NO: 282692 - protein, 57 aa, Zea mays
  Clone ID: MRT4577_20912C.1.pep
HFFMLCILLILATIHNIVPCQSGSMHTDIPFIPSHMLVPNQLCLASQCLKSKASRHH

SEQ ID NO: 282693 - protein, 101 aa, Zea mays
  unsure (1)..(101): unsure at all Xaa locations
  Clone ID: MRT4577_20913C.1.pep
CFFPFFFFFFFFSVSWSPLPVRXSLPLPCWRXCVAAAAGSLVLPXLXLLXXPPRPPGLAVPRPVFXLXARPGLGPGXXSFLCSSSLCXFXFRRWAPRXPAG

SEQ ID NO: 282694 - protein, 181 aa, Zea mays
  unsure (1)..(181): unsure at all Xaa locations
  Clone ID: MRT4577_20914C.1.pep
VPLLFLLLDREEKPKSFNCHLPTLHKASPVLEFLSHEQQPWPPRRRPRVSSVTPSPSPRPSSSTCPRRPAPMATTKSRPRRTTSSSPSSRGSSWRRTSTTNSSTSSPTTPCSSEPRNRTXILSEPATARAASXPPAPCRRTSARTLSSPSCPRRTPIRDCVTSTTTVSAPARGSSRVIRGN

SEQ ID NO: 282695 - protein, 76 aa, Zea mays
  Clone ID: MRT4577_20915C.1.pep
SSYIFSRSWMTSTLIPVYHDRAAVRTRSVCSSYCAMHDHHHHTSTIAHTSFAAHAIAVLPIVYCLILADTNHKQMG

SEQ ID NO: 282696 - protein, 155 aa, Zea mays
  Clone ID: MRT4577_20916C.1.pep
SLQGPRPLPLILPPGSGTTSSSSSSTPRPAKRPRRVVSGGGGDVSRAPQSSAAAPGPVILYEHTPKVIHARADEFKALVQSLTGRRGGQEAVPRPPASSQQTAAGDLLVLTLGHHQHVPPPPPLPSPGGAAGFLLSPGSFLFSPATMQAIQELIS

SEQ ID NO: 282697 - protein, 102 aa, Zea mays
  Clone ID: MRT4577_20917C.1.pep
CFGSQKFLRMGPQPPRVPQWPPPIFFCPPTWSLQSPRGLPRFKKKVFFRGLKKNFFCKKTGGQGFIGPPYQNFPHGSPPELFLFFYLCPPRGKKGKILFIPI

SEQ ID NO: 282698 - protein, 81 aa, Zea mays
  Clone ID: MRT4577_20918C.1.pep
VMNVELWISYCVPMLNHIPSSKFLFVRFEWLVNHILVTVHCHKLPCDTFAALSGSPQRPGQSLTAKKKKKKKEGGRRLKSS

SEQ ID NO: 282699 - protein, 92 aa, Zea mays
  unsure (1)..(92): unsure at all Xaa locations
  Clone ID: MRT4577_20919C.1.pep
CDAXVLWSLDRCFAGLFSRQEKKECFAGLFCRQEKKEGTRVGTTSCAPVASWAVLLIESAVTSCYPDYRRSGATATGYGNCVIATPYLVQLY

SEQ ID NO: 282700 - protein, 61 aa, Zea mays
  Clone ID: MRT4577_2091C.1.pep
VRFAPEFFSPLALINNRFLTDPSFRPGSTMLEKGALSISLACKDPYNRRVMPPHDNVTAFS

SEQ ID NO: 282701 - protein, 39 aa, Zea mays
  Clone ID: MRT4577_20920C.1.pep
YLRNHQSNLSQLISQQHHYILVGKPITSSHSLHLTYDDE

SEQ ID NO: 282702 - protein, 136 aa, Zea mays
  unsure (1)..(136): unsure at all Xaa locations
  Clone ID: MRT4577_20921C.1.pep
MTAKILSFLMRLGLSASDATATILPQCSQATITSLISPYLLPTESSMCENPIVQPYRIQQAIATCILPLSPLVLQQPLALLKPVPLDQLVAPNNLAQQLPPLVLSNLGAYPHXHNXLSFDPLAVMNSADYLQQPLP

SEQ ID NO: 282703 - protein, 42 aa, Zea mays
  Clone ID: MRT4577_20922C.1.pep
ARLGAEDLWCIKRLADGYGAGPLGDWTKAPARRSIFIDPREF

SEQ ID NO: 282704 - protein, 179 aa, Zea mays
  Clone ID: MRT4577_20923C.1.pep
LLCEIDSLKTQQLLDRPCSGINGLVSSFVSRLREENSSREHTILRTAQKLKSFSFNKFSANGYHDFLPSRLRPKFQNIDANECTFSEILCLICGSPFSESELLNLENTKLKAQKKIDLYTAHCCQSCHFQILPAATDMYGHFFSLLPKFWTEKVDAASASHSSLRDQIADYLLDEDDGN

SEQ ID NO: 282705 - protein, 101 aa, Zea mays
  Clone ID: MRT4577_20924C.1.pep
NANCTLNCFAPLAKDRHNVHFIMDPSITTVHAITATQKTVDRPSTKDWTSGTSVSFNIIPSITLTANAFIKDLPQMNAKLTGMFFRNPTPDVSTVYLTARI

SEQ ID NO: 282706 - protein, 52 aa, Zea mays
  unsure (1)..(52): unsure at all Xaa locations
  Clone ID: MRT4577_20925C.1.pep
XXXXXXXXXXXXXXXXXXXXXXGAEQISVSTAVSFRTKSFDFLFYKYITPCK

SEQ ID NO: 282707 - protein, 156 aa, Zea mays
  Clone ID: MRT4577_20926C.1.pep
MAERWKSVSSVPKAENARPTGRWPAAKPKASDLLAHSLDCSLDRKDSILAAIHLLRRSMAFDSTTSLSSSDPAAPDLYASSDTDIVSSGSNSVASDPPRQGISVPARFWQKTNSRMLHASSRIAISGRSDFGSRSRCITLDAPGSSSLLFTWHSGT

SEQ ID NO: 282708 - protein, 37 aa, Zea mays
  Clone ID: MRT4577_20927C.1.pep
LGVTKQTSTIPTCLLYNTFYRESNLSHNHILIPNTKI

SEQ ID NO: 282709 - protein, 127 aa, Zea mays
  Clone ID: MRT4577_20928C.1.pep
SVSPICNTEDSVDGIHGDLILGGGTEDTPACAAVVWAVEESVLLALSQAVLNHQSALGLPMMPFLFFLRDGVGRLRHCGWRRLDCRYADGWRDTKRQRGGAACLRRGRGGEGEGASRPEDGGRVRIA

SEQ ID NO: 282710 - protein, 58 aa, Zea mays
  Clone ID: MRT4577_20929C.1.pep
RRKLSNMAKPSHATPPGPLLRKQYPSQPCIPVAGMKAKSHQQSNHPSSTWNSTLDSVF

SEQ ID NO: 282711 - protein, 789 aa, Zea mays
  Clone ID: MRT4577_2092C.1.pep
MTGEKKMFTSYVKNKDSQDSIMFGDENQGKVKGLGKIAISSEHSISNVFLVESLRYNLLSVSQLSHMGYNCLFTNVDVSVFRRSDGSLAFKGVLDDKLYLVDFSKEEADLDACLIAKTSMGWLWHHRLAHVGMKNLHKLLKGEHVLGLTNVCFEKDRPCAACKVGKQVGSTHHNKNVMTSSRPLELLHMDLFGPVAYLSLGGNKSETQGTLKRFLRQAQNKFDKVKKIRSDNGSKFKNLQVEEYLEEEGSKHEFSSPYTPQQNGVVERKNRTLIDMARTMLGEFKTPERFWSEAVNTACHAINRLYLHRLLKKTCYELLTGNKPNVSYFRVFGRKCYILVKKGRHSKFAPKDVEGFFTRMCNHRNYKSKINLLPQRWCIPQIKMMDRFIKKRRVIKGEHKKNKLWRKKVEEALQDPDWVLTMQEEFNNFKRNEVWSLVPRPKQNVVGTKCVFRNKQDEHGVVTRNKARLVAKGYAQVAGLDFEETFAPMARLESIRILLAYAAHHSFRLFQMDVKSAFLNGPIKEKVYMEQPPDFEDDRYPDHVSKLSKALYGLKQAPRAWYECLRDFLIANAFKVGKADPTLFTKTCNGDLFVCQIYVDDIIFGSTNQKSCEEFSMVTTQKFEMSMMGELNYFLGFQVKQLKDSTFLSQTKFTQDLLKRFGMKDAKPAKTPMGTNGHVDLNKGGQCCTQLLWMRQTLRDFGYNLSKVPLLCDNESAIRMAENPDEHSRTKHIDIQHHFLRDHQQKGDIEVYHVSTENQLADIFTKPLDEKTFCRLCSELNVLDSRNLD

SEQ ID NO: 282712 - protein, 169 aa, Zea mays
  unsure (1)..(169): unsure at all Xaa locations
  Clone ID: MRT4577_20930C.1.pep
PRGRPGVNMYSASGRWNEATHLRESMRXKGMEKDPACSWIEVKSKLHVFVAHDRSHPWYDRIIDALNPFSEQMAREGHVPNTEDVFQDIEEEHKSYVLCVHSEKLAIVFGIISTPAGTKIRVMKNLRVCIDCHTVTKFISKLADREIVVHDANCFHHFKDGNCSYKDFW

SEQ ID NO: 282713 - protein, 78 aa, Zea mays
  Clone ID: MRT4577_20931C.1.pep
KTSPVCWPRGRRALEEQRGSSQNNKETVKGQLEIWTTTGMEGFMGSKQKCISCFFKKQTRIGPLYQQLYWHENLDSSP

SEQ ID NO: 282714 - protein, 91 aa, Zea mays
  Clone ID: MRT4577_20932C.1.pep
CVYSAGRAHPSASCIHRLLLLHLGLKRCLFTVEPLGDKEPSPEQRRRLLRNFYTLVTSTHFPPETGPPEKTEDEVYQAQLPRACYLVLGTE

SEQ ID NO: 282715 - protein, 43 aa, Zea mays
  Clone ID: MRT4577_20933C.1.pep
MEDALFRILTTRGSIDIVRDVKAAKESGRLYVIVFVGVNGVGK

SEQ ID NO: 282716 - protein, 120 aa, Zea mays
  Clone ID: MRT4577_20934C.1.pep
TFGLHYVLVYVLEYPAASAVQTLIETNGARDSLKKTRSKSGVILEFAKLPEKFLAGSAKDDSAKLLEKFLLGFAMGEFAKLLEKFLVGFAKDEFTKLLEKFLVEFAKNEFSELVSVGENN

SEQ ID NO: 282717 - protein, 51 aa, Zea mays
  Clone ID: MRT4577_20935C.1.pep
KGAQIRRLRKPNTKTTCVDSIKGALFFSCLFFPPCQDVTLSKQRSPSVDER

SEQ ID NO: 282718 - protein, 38 aa, Zea mays
  Clone ID: MRT4577_20936C.1.pep
EDQEYRLPVFNQRCNIRPILQGLKSKLCPKPFCFIKHP

SEQ ID NO: 282719 - protein, 43 aa, Zea mays
  Clone ID: MRT4577_20937C.1.pep
YVTTNFKRESAMAMLHAIINPTIYNGCFRALNCPHPFCWSAVG

SEQ ID NO: 282720 - protein, 198 aa, Zea mays
  Clone ID: MRT4577_20938C.1.pep
MTGTVSTTTVWATPRQEGSGPRVQTPTVGVPGRGSHVQHLQFPSALQTTGFHHPLRLSTVIRFGSLEFMSLGIEYDMVLLPPGALTDTQERLSARTCPSRHRRHRWSNPNRGTYGTPCPGGAPGLTNDKNSLARDLANISVTLGTPTMEHASPASSLLTPPPAAWGVSAPPTPHAMDQDAPVSSDLPLTGREEPVASW

SEQ ID NO: 282721 - protein, 99 aa, Zea mays
  Clone ID: MRT4577_20939C.1.pep
RYKKLKGHVRFNEMLDIQPFMDPRCKVNNSSTYRLVGVVEHLGTMTSGHYIAYARACKIGGRQQQSSGSKSWFYASDGQVREASLEEVLNCEAYILFYE

SEQ ID NO: 282722 - protein, 660 aa, Zea mays
  Clone ID: MRT4577_2093C.1.pep
MDPKGKGIVINDKEKESFINEPKDDKPTDSGSGHKRKDGKKKKTRRIKEIVYYDDSDESTSSQKDDYRKTVNSNFSFDYSRIPHSSNSHLLSIPLGKPPHFDGEDYGFWSHKMRSHLFSLHPSIWEIVENGMKFDSSDSPMLINEQIHKNAQATTVLLASLCREEYNKVSGLDNAKQIWDTLKISHEGNDITMLTKMELVEGELGRFAMIRGEEPTQTYNRLKTLINKIRSYGSTRWTDHDVVRLMLRSFTVLDPHLVNNIRENPRYMMMTPEEVLGKFVSGRMMIKEARYVDDALNGPINEPQPLALKATRSKEMLPSKVAQIEAAGLNDEEMALIIKRFKTTLKGRKGQPSKTKTKGKRSCFKCGKLGHFIANCPDNDSDQDQGNKREKKKNYKKAKGEAHLGKEWDSDCFLSDSDNEGLAATAFNKSSFFPNEHHTCLMAREKKVSTRDPTYASSSDNESSDDDDIDYSCLFKGLDRSKIDKINELIDALNDKNRLLEKQEDLLYEEHDKFVEAQKSYALEVKRNEMLSYELSTCHETISTLQGVNNDLNAKLEVANKSNSCEEHVIICTRCKDFDIDACSEHLVSISRLNDEVASLNAQLKTSKSDFDKLKFARDAYTVGRHPSIKDGLGFKREAKNLTSHKAPISAKEKGKAPMA

SEQ ID NO: 282723 - protein, 114 aa, Zea mays
  unsure (1)..(114): unsure at all Xaa locations
  Clone ID: MRT4577_20940C.1.pep
IRRRDGNVSLIQRRDGNVSLIQRRDGDVSLIQRRDGGGSPIQQRDGGSFFDPEARQHRLXDLDDDNDGSLEVHEGFALRAGGHMTSSNPACLEHPVAAVSSDPAACILIICTRR

SEQ ID NO: 282724 - protein, 91 aa, Zea mays
  Clone ID: MRT4577_20941C.1.pep
TYSVRPLRFSLFPLEATRPGTLWVIPRWYATLGSEDRRETLADMVCSAYLDMKCMTLLDCVIGYNSVPIFYISDMITTDYIPTMCYNISAN

SEQ ID NO: 282725 - protein, 55 aa, Zea mays
  Clone ID: MRT4577_20942C.1.pep
QEKTRGYQTRGSLFLKTFPGGRGGINFYWAGGSLNPAGGSTPQPALVKGLNVSIL

SEQ ID NO: 282726 - protein, 110 aa, Zea mays
  unsure (1)..(110): unsure at all Xaa locations
  Clone ID: MRT4577_20943C.1.pep
MADSTHHTIRRAAARPRGWCCSFAGVPESPEHRRALPAPASAADAVPKPPPPPPXKSPLAPSSHGSPSSKLAGLIDTRRILSPGRVSPIDSEGSPAAAPREQAAPFVAVR

SEQ ID NO: 282727 - protein, 95 aa, Zea mays
  unsure (1)..(95): unsure at all Xaa locations
  Clone ID: MRT4577_20944C.1.pep
FVNGRPFLTTVQLSKLSTPEIRMHEWYMVASNKYKLEEFTFVVPEDAFWSNDHINPVRHLFFDDLWSLYHRXRMETNYLTLFCLMQYMDDKKKQT

SEQ ID NO: 282728 - protein, 109 aa, Zea mays
  unsure (1)..(109): unsure at all Xaa locations
  Clone ID: MRT4577_20945C.1.pep
GCVSKNKEPDGSXXXREDEKNGNYVFXVGDNLXPXYKINEKMGEGTFGQVLECWDKEKKXEMVXIKIXRXIKKXRDAXMXEIGMXEKXGKYGDEKCGPGGRFYWFEREV

SEQ ID NO: 282729 - protein, 228 aa, Zea mays
  Clone ID: MRT4577_20946C.1.pep
MPRYYCDYCDTYLTHDSPSVRKQHNAGYKHKANVRTYYQQFEEQQTQSLIDQRIKEHLGQAAAFQAGAPFNQHLLAFPGAMARPRLPILPTPGMPHGFPQAPGAPLMPGIRPPILPAPGYPGPPPTMQQPGAPPGSMPQPGAPPGSMPQPGAPPGSMPMQMAPLPRPPTLPPPTSGVPGAPIPNSGAPPAIYQANPQASAGPTSGAPPAPPTAPQPAFSYAPPSEGNH

SEQ ID NO: 282730 - protein, 73 aa, Zea mays
  Clone ID: MRT4577_20947C.1.pep
YAAAHLKGGANKDDISAPNKDAPMFVVDVNEKESKFDINIVSNASCTTNCLAPLANAINDKYRIVDGLEDHCP

SEQ ID NO: 282731 - protein, 69 aa, Zea mays
  Clone ID: MRT4577_20948C.1.pep
NSARGGHRAVGASIPWGGDYPSLCQRWHALSYLYDKHFRSAVSAPGFPSAFFRRVFWGGGASSRSRRRS

SEQ ID NO: 282732 - protein, 41 aa, Zea mays
  Clone ID: MRT4577_20949C.1.pep
VYPSIFYVDKLIILVLQRFVILVPFYPLKSLFSFIINFHFF

SEQ ID NO: 282733 - protein, 1010 aa, Zea mays
  Clone ID: MRT4577_2094C.1.pep
CKDFNVDACSEHLISISKLNGEVASLNAQLKTSKNDFDKLKFARDAYTIGRHPSIKDGLGFKREAKNLTSQRAPISNKEKGKAPMANSSQKNHAFIYDRKISRNVHHYRSCNAYDSNAMFASSSSFVHGRDMPRINVVHVYASGGSSWIMDSGCTNHMTGEKKMFTSYVKNKDSQDSIIFGDGNQGKVKGLGKIAISFEHSISNVFLVDSLGIDLVQLVKQDKSETQGTLKRFLRRAQNEFELKVKKIRSDNGSEFKNLQVEEYLEEEGIKHEFSAPYTPQQNGVVERKNKTLLDMARTMLGEFKTPERFWSEAVNTACHAINRVYLHRLLKKTSYELLTGNKPNVSYFCVFGSKCYILVKKGRNSKFAPKAVEGFLLGYDSNTKAYRVFNKSSGLVEVSSDVVFDETNGSPREQVDLNDVDEDDVPTVAIRNMAIVDVRPQEQTEQDQPSSSTMVHPPTQSDEQVHQEACDQGGAQDDHVMEEEAPQVPPTQVRATIQRNHPVDQILGDISKGVTTRSRLVNFCEHYSFVSSIEPFRQNVVGTKWVFCNKQDEHGVVTRNKARLVAKGYAQVAGLDFEETFAPVARLESIHILLAYAAHHSFRLFQMDVKSAFLNDPIKKEVYVEQPHGFEDERYPDHVCKLSKALYGLKQAPRAWYECLRDFLIANAFKVGKADPILFTKTCDGDLFVCQIYVDDIIFGSTNQKSCEEFSRVMTQKFEMSMMGELNYFLGFQVKQLKDGTFISQTKYMQDLIKQFGMKDAKPAKAPMGTDGHVDLNKGGKSVDQKAYRSIIGSLLYLCASRPDIMLSVCMCARFQSDPREYHLVAIKRILRYLVATPCFGIWYPKGSTFDLIGYSDSDYAGCKIDRKSTSGTCQFLGRSLVSWSSKKQTYVALTTAEAEYVAAGQCCTQLLWMRQTLRDFGYNLSKVPLLCDNESAIRMADNPVEHSRTKHIDIRHHFLRNHQQKGDIKVFYVSTENQLADIFTKPLDEKTFCRLRSELNVLDSRNLD

SEQ ID NO: 282734 - protein, 34 aa, Zea mays
  Clone ID: MRT4577_20950C.1.pep
LLLMQARNLLLVKRSLTDGDLTHVGRAFRTAILL

SEQ ID NO: 282735 - protein, 64 aa, Zea mays
  unsure (1)..(64): unsure at all Xaa locations
  Clone ID: MRT4577_20951C.1.pep
WXPIFIAIVDYMSKIFIYASFFFWQRPRPRRLWGPLVPLDHLHPFAKPSKPYAGKLILNLHLLY

SEQ ID NO: 282736 - protein, 74 aa, Zea mays
  unsure (1)..(74): unsure at all Xaa locations
  Clone ID: MRT4577_20952C.1.pep
PGGSYFDPLGLAADPKKKERLQLGEIKHAPLARVAFXGFPVEAPPPGKGPFKKWAPPLRDPLPPPILERLGGSF

SEQ ID NO: 282737 - protein, 50 aa, Zea mays
  Clone ID: MRT4577_20953C.1.pep
HAHRTKSAVMPRTLSLTESGELVLPTSSLYERILQNALAPTVTTPTRSYE

SEQ ID NO: 282738 - protein, 61 aa, Zea mays
  Clone ID: MRT4577_20954C.1.pep
DAWTKPSSIEQTQTLEARVQRAEQGTKRSEFCAEEAYGNERRRRKGSGRRDAEAELNQPAG

SEQ ID NO: 282739 - protein, 91 aa, Zea mays
  unsure (1)..(91): unsure at all Xaa locations
  Clone ID: MRT4577_20955C.1.pep
SARGRXENLYXDWAVTLKYVGVIRGRFTHSRQGNLTRGPLPELDGLHPAPELMDDQLGNINQKGFLTLNSQPAVTVVKCDSAIAGRGGPGG

SEQ ID NO: 282740 - protein, 59 aa, Zea mays
  Clone ID: MRT4577_20956C.1.pep
LCGVFAKRKIFPLLTVFFFRPLCPFDPKTIFCRLTGVGGVKGGPLLKVAPFSPFKKFFF

SEQ ID NO: 282741 - protein, 36 aa, Zea mays
  Clone ID: MRT4577_20957C.1.pep
AEIRSYKGLMVQDKMTSNKQVASGSKTLQELEEDFM

SEQ ID NO: 282742 - protein, 81 aa, Zea mays
  Clone ID: MRT4577_20958C.1.pep
TSLYHTNTHINQSLTSSIFYYYISHFPFLKNPTLLYITTINHTTTHIFNHHHISHTLFTSSYSTHLLTPIFTINYQFYTFT

SEQ ID NO: 282743 - protein, 561 aa, Zea mays
  unsure (1)..(561): unsure at all Xaa locations
  Clone ID: MRT4577_20959C.1.pep
SGVQKLLLDQNAFFVSIPPVIGRFQQISKPHIAXPQFGESPRCRKPEYAYTLKVDXRNLSGKIPPAISGIRILNYLNLSRNHLDGEIPPSIATMQSLTAVDFSYNNLSGLVPGTGQFSYFNATSFVGNPGLCGPYLGPCGAGIGGADHTVHGHGWLTNTVKLLIVLGLLICSIAFAVAAILKARSLKKASEARVWKLTAFQRLDFTSDDVLDCLKEEHIIGKGGAGIVYKGAMPNGELVAVKCRSAMGRGSSHDHGFSAPSQTLGRLRHRHIVRLLGFCSNNETNLLVYEYMPNGSLGEMLHGKKGGHLHWDTRYSIAIEAAKGLCYLHHDCSPLILHRDVKSNNILLDSNFEAHVADFGLAKFLQDSGASECMSAIAGSYGYIAPEYAYTLKVDEKSDVYSFGVVLLELVTGRKPVGEFGDGVDIVQWAKMTTNSNKEQVMKVLDPRLSTVPLHEVTHVFYVALLCTEEQSVQRPTMREVVQILSELPKPPSTKQGEENSTKQGEEVPNSGDGSAPSPLHSAPVGTNEALAVETRDHQQPPQQQQTSSPSSPPPPDLISI

SEQ ID NO: 282744 - protein, 40 aa, Zea mays
  Clone ID: MRT4577_2095C.1.pep
MTYLSTIPAHLLGRLFSLYCKLLEGRYNLLEWNLAQRKCF

SEQ ID NO: 282745 - protein, 54 aa, Zea mays
  Clone ID: MRT4577_20960C.1.pep
VREHQLPAPQKPNNFIYTKNTKLKGAGENYTNCNQHSLVKMKKHINAQVPNDQS

SEQ ID NO: 282746 - protein, 134 aa, Zea mays
  Clone ID: MRT4577_20961C.1.pep
APGRSGWATLATNSNREQVMKVLDPRLSTVPLHEVTHVFYVALLCTEEQSVQRPTMREVVQILSELPKPPSTKQGEENSTKQGEEVPNSGDGSAPSPLHSAPVGTNEAPAVEARDHQQQTSSPSSPPPPDLISI

SEQ ID NO: 282747 - protein, 73 aa, Zea mays
  unsure (1)..(73): unsure at all Xaa locations
  Clone ID: MRT4577_20962C.1.pep
PTRPTTRTPDMINEVDADGRGTIDGPECLNLMDLNMNDTASDEXITEAFRVSDTDQNGFISADELRHVITNLG

SEQ ID NO: 282748 - protein, 79 aa, Zea mays
  Clone ID: MRT4577_20963C.1.pep
PYPNPKWVDARNKSIHSETQFRVHKGLPYPAHYVCRRAKRCTSCTRHQLKKRETAENGPPVQGKEKMVWMTRGIAERKA

SEQ ID NO: 282749 - protein, 66 aa, Zea mays
  Clone ID: MRT4577_20964C.1.pep
KQKPPHVNKKVNKVNWHHHVHPRINTSSGLTFCNPGTCYDLSMMRKLFNAIDSATSSFIVWWLRNT

SEQ ID NO: 282750 - protein, 104 aa, Zea mays
  Clone ID: MRT4577_20965C.1.pep
MPDVVRPVHHLSASVAKIIAPHRDAEMHNGNVVHLVVLLHVMPANLLMHVPYQDVLSQLALPETPCCDCHAHFCCETRSLCQEYNEIKGRDVRPLPQVVTERHL

SEQ ID NO: 282751 - protein, 164 aa, Zea mays
  unsure (1)..(164): unsure at all Xaa locations
  Clone ID: MRT4577_20966C.1.pep
HIYVQICLHQPACIHRRLIPRQKMADNIFPRPTAGPLHPIAQXHILKHXLRPRAXRCFTLEEMNADDLPNKLAPSIDISDDHRRKNXPLYXLLCIVHNLKTYLVLLAIYPXRREHKANADYSTPKDLDSATQVQGDYMSFTLGDMTSVVVCXVTHDMKTCCCLC

SEQ ID NO: 282752 - protein, 72 aa, Zea mays
  unsure (1)..(72): unsure at all Xaa locations
  Clone ID: MRT4577_20967C.1.pep
AGTHFQTHXIGRHLCVRASDRPHSSCFFYNAEAMIHLDFSAVHPLLPLPSPNSRHARPHLLVTRLPLLCLNR

SEQ ID NO: 282753 - protein, 81 aa, Zea mays
  Clone ID: MRT4577_20968C.1.pep
LVPLKALGADVYLLSQSHMLCSTTTCVALVARKDTITHMASLPSPQNVPEHVLYLNPLKCIFHSCQTKKKKKKGGRRQESS

SEQ ID NO: 282754 - protein, 130 aa, Zea mays
  unsure (1)..(130): unsure at all Xaa locations
  Clone ID: MRT4577_20969C.1.pep
SSDSLPSFSSASGVTGATISVLAACSRFARNASLCSRNRLTLSSKPSISSNSSSSARAASSFSPSISSSLRARCALCSSRACAAISAAVMGFASITAXPSSLQQVEPALSPSPSXKASSSASAAASNGAG

SEQ ID NO: 282755 - protein, 1707 aa, Zea mays
  unsure (1)..(1707): unsure at all Xaa locations
  Clone ID: MRT4577_2096C.1.pep
MDPKGKGMVVNDKEKETIFNEPRDNKATDSGSSQKKKEGKKKRCIKKIVYYDDNDESSSSQKYNDDNDYEKKKTINSNFSFDYSRIPKSTNGHLLSIPLGKPPHFDGEDYGFWSHKMRSHLFSLHPSIWEIVESGMQFYSTDSPIFINEQIHKNAQATTVLLASLCRDEYHKVSGLDNTKQIWDTLKISHEGNDVTMLTKMELVEGELGRFTMIRGEEPTQTYNRIKTLVNKIRSYGSMRWTDHDVVRLMLRSFTVLDPHLVNNIRENXVHQDYARGNTWEVXSERMMIKEARYVDDALNGPIHEPQTVALKATRSKEVLPSKVAQVEAAGLNEEEMALIFKRFKTALRGRKEHPNKNKTKGKRSCFKCGKIGHFIANCPDNDSDQEQEKKREKKKAYKKAKGEAHLGKEWDSDCSSSDSDNEGLAASAFNKSSLFPNEHHTCLMAKEKKVNTRKTTYASSSDDESSDDEIDYASLFKGLERTKIDKINELIDALNDKNRLLEKQEDLLYEEHDKVVEAQKSLALEVKRNEMLSCELSTCHETISSLKSVNDDLNAKIEVANRSNSCVEHVVICNRCKDFDVDACSEHLVSIAKLNDEVASLNAQLKTSKNEFDKLKFARDAYTIGRHPSIKDGLGFKREAKNLTSHKAPISAKEKGKAPMANSAQKNHAFMYHDRRYSRNVHYDRSYNDVVSHAMIASSSSIMHDRSLARKNVIYHVPRRNVHVPRKINEPSTIYHACNASFAICRKDKKVYASGGSSWIIDIGCTNHMTGEKKMFTSYVKNKDSQDSIIFGDGNQGKVKGLGKIAISSEHSISNVFLVESLGYNLLSVSQLCNMGYNCLFTNVDVSVFRRSDGSLAFKGVLDDKLYLVDFAKEEAGLDACLIAKTSMGWLWHRRLAHVGMKNLHKLLKGEHVIGLTNDKSETQGTLKRFLRRAQNEFELKQNGVVERKNRTLIDMARTMLGEFKTPERFWSEAVNTACHAINRVYLHRLLKKTSYELLTGNKPNVSYFRVFGSKCYILVKKGRNSKFSPKAIEGFLLGYDSNTKAYRVFNKSSGLVEVSSDVVFDETNGSPREQVVDLDDVDEEDVPTAAIRTMAIGDVRPQEQTEQDQPSSSTMVQPPTQDDEQVHQEEACDQGGAQDDHVIEEEAPQAPPTQVRATIQRNYPVDQILGDISKGVTTRSRIVNFCEHYSFVSSIEPFRVEEALLVPDWVLAMQEELNNFKRNEVWTLVPRPKQNVVGTKWVFHNKQDKHRVVTRNKARLVAKGYAQVAGLDFEETFAPVARLESIRILLAYAAHHSFRLFQMDVKSAFLNGPIKEEVYVEQPPGFEDERYPDHVCKLSKALYGLKQAPRAWYECLRDFLIANSFKVGKADPTLFTKTCDGDLFVCQIYVDDIIFGSTNQKYCEEFSRVMTQKFEMSMMDELDYFLGFQVKQLKDDTFISQTKYTQDLLKRFGMKDAKPAKTPMGTDGHVDLNKGGKSVDQKAYRSMIGSLLYLCASRPDIMLSVCMCARFQSDPRECHLVAVNRILRYLVATPCFGIWYPKVSTFDLIGYSDSDYAGCKVDRKSTSGTCQFLGRSLVSWSSKKQTFVALSTAETEYVAAGQCCAQLLWMRQTLRDFGYNLSKVPLLCDNESAIRMADNPVEHSRTKHIDIRHHFLRDHQQKGDIEVFYVSTENQLDDIFTKPLDEKTFCRLRSELNVLDSRNLD

SEQ ID NO: 282756 - protein, 123 aa, Zea mays
  Clone ID: MRT4577_20970C.1.pep
SIGSPGGVSPKTSRSPQDPKRKKHRESTLHYTVRAAVDAVEHDPSRLARALGAAGRQARVRARCWLGAPLRRSERVASLGGSDPRYGASADMRVFSRLREFGNGLFRGAGGRDDAQSRKLGIQ

SEQ ID NO: 282757 - protein, 55 aa, Zea mays
  Clone ID: MRT4577_20971C.1.pep
FSDVQARLQTFGVFFYDNGAEPTRLLHLRIAILSYSTLKSTIPQDIDPILRQNPC

SEQ ID NO: 282758 - protein, 48 aa, Zea mays
  Clone ID: MRT4577_20972C.1.pep
WVSPTPTKSFSFCCYCRPCVTNASAPMRKLLSKPPNNILKQPRRAHGV

SEQ ID NO: 282759 - protein, 223 aa, Zea mays
  unsure (1)..(223): unsure at all Xaa locations
  Clone ID: MRT4577_20973C.1.pep
SSQNAGSPAPRAGRAADAGDASAACGFCLRVCVAGLPPPIRCRQLHLLWGPRKRSAAPHSGGGGGPAXSPSSSPSSGPLYPTPPPTEQEVERVKLEQVMRRLEKTARYFKNLGTLGFWSQLVCTIISAGILAFSTVVTGKVTSPFTFYATAAGIAAAFISVFWSFGYIRLSERLRKTSKEPAKASANTILSHFLGVASSLELLRSVSLPPAEAAVPAPAPARA

SEQ ID NO: 282760 - protein, 82 aa, Zea mays
  unsure (1)..(82): unsure at all Xaa locations
  Clone ID: MRT4577_20974C.1.pep
TSPDNRDRIVHAAKTSALXQSQALAPHETVRRGSLHSRAEEEQKADTASYRPARVWRRQKNRAPRRDLLDPNSEVSSAYSSP

SEQ ID NO: 282761 - protein, 274 aa, Zea mays
  Clone ID: MRT4577_20975C.1.pep
MQALLLPARAAPPAAAILRQRAVSASTCASQGCRLLLGASGCLSCGVRSRLRLTVVAAASSSSGPLYPTPLPTEEEVERVKLEQVMRRLEKTARYFKNLGTLGFWSQLVCTIVSAGILAFSTVVTGKVTAPFTFYATAAGIAAAFISSFWSFGYIRLSERLRRTSKEPAKAPPRADVVNSLKNGIVLNILGMGAAVLGMQATVGALVAKALTTSAVPYYQAAAPGQSPVLALDVFLVQASANTILSHFLGLASSLELLRSVSLPPAEAAAPAGA

SEQ ID NO: 282762 - protein, 313 aa, Zea mays
  unsure (1)..(313): unsure at all Xaa locations
  Clone ID: MRT4577_20976C.1.pep
KSQIEQGRRGWALRNTAIQEGIASSSQNAGSPAPRAGRAADAGDASAACGFCLRVCVAGLPPPIRCRQLHLLWGPRKRSAAPHSGGGGGPAXSPSSSPSSGPLYPTPPPTEQEVERVKLEQVMRRLEKTARYFKNLGTLGFWSQLVCTIISAGILAFSTVVTGKVTSPFTFYATAAGIAAAFISVFWSFGYIRLSERLRKTSKEPAKAPPRADVVKSLKNGIVVNILGMGAAVLGMQATVGALVAKALTTSAVPYYQAAGQSPVLALDVFLVQASANTILSHFLGVASSLELLRSVSLPPAEAAVPAPAPARA

SEQ ID NO: 282763 - protein, 99 aa, Zea mays
  Clone ID: MRT4577_20977C.1.pep
TKNICFVKNSEPIYDMFGTKDYGGQFFFHTTCNLHKGIYYPPPSFIWEKGVKNRKKKGPKTYPGGEKRGVLLMFLGIKRKTPQTPRKQPDQATDLNQFN

SEQ ID NO: 282764 - protein, 88 aa, Zea mays
  Clone ID: MRT4577_20978C.1.pep
IKNNASTDYDLSDKSINPLGGFVHYGEVTNDFVMLKGCVVGTKKRVLTLRKSLLVQTKRRALEKIDLKFIDTTSKFGHGRFQTMEEKK

SEQ ID NO: 282765 - protein, 126 aa, Zea mays
  unsure (1)..(126): unsure at all Xaa locations
  Clone ID: MRT4577_20979C.1.pep
PVDMLGAAVGMGQPFSMVTKLNPLGWCLSLYDIAATPGGAGDVSHMNSPGLAKGSMGDDQLREALEGCYGAIIPTGAPRTPGMTRDDLFTINSXMVEALSTAIAKHXPNAXLSDMTSNSVNCTVPI

SEQ ID NO: 282766 - protein, 71 aa, Zea mays
  Clone ID: MRT4577_2097C.1.pep
KKPSFFFHWPGGLQVIIYPIYNGGGTKIGFTPFNHTLGKKEWFHGAPQKNICPPLKKKAFFNWRGGIPSQP

SEQ ID NO: 282767 - protein, 52 aa, Zea mays
  Clone ID: MRT4577_20980C.1.pep
KIVVATLMCNAALFSDIYVNMLSLWCKTCFNHGACYVFQLFLYYVKPYYVET

SEQ ID NO: 282768 - protein, 161 aa, Zea mays
  unsure (1)..(161): unsure at all Xaa locations
  Clone ID: MRT4577_20981C.1.pep
ETKRNRRAGEGGRGRPEPADGXTGPHDRKXRPSXEGXXXNXERKESRXXADNXEXXRRLRRGXXKKKAXXXGNKXRXXXRRRSKKKTERGETXKDXRDXKEXQEXETXRQXXXXEXXXPPQHEXXHXXXRXXKARKKEXEKSKSXXXDXNXXRKEXGXDKK

SEQ ID NO: 282769 - protein, 58 aa, Zea mays
  Clone ID: MRT4577_20982C.1.pep
TGFFMLPFSFPGPPPLIKKALARRTFSGRSSIPNHFHYRCPYPLEIAVNFPHFWDPFS

SEQ ID NO: 282770 - protein, 53 aa, Zea mays
  unsure (1)..(53): unsure at all Xaa locations
  Clone ID: MRT4577_20983C.1.pep
WGFLCFELGVIIQKCEIINVHMFVMKDRTILRPHLFCEKIFPCYFHSPXQFNY

SEQ ID NO: 282771 - protein, 93 aa, Zea mays
  Clone ID: MRT4577_20984C.1.pep
NPTKAVFIYHSKIERKNSARESRFRLGVSSGAARPRFHPGAGNDGVRRAAKHQLPRITAGREEIDEKMQRTSPAAKSDGSNGYMPFKSCLGEC

SEQ ID NO: 282772 - protein, 78 aa, Zea mays
  Clone ID: MRT4577_20985C.1.pep
YYHHLCVLLVRLYHLSSYCAFAHPRYAVWLCEARCRNPVFFFLFSIHPCTITIFFSLPSETKPNWLVVVARCPRKPGL

SEQ ID NO: 282773 - protein, 547 aa, Zea mays
  Clone ID: MRT4577_20986C.1.pep
MDIARAAAGVACCKEHQRIYAEWFALADPDGDGRVTGADATSFFAMSALSRADLKQVWAIADSRRQGYLGFAEFVTAMQLVSLAQAGNEITQDSLKREDLSTLDPPVMEGVDELLARSKAVVKRVHPDDNGTTQAQAPSIYHWFGSKSAQKVQMPLTAVTSVIDGLKRLYVEKLKPLEVAYRYNDFSHPLLTNSDFEAKPMVMLLGQYSTGKTTFIKHLLKTSYPGAHVGPEPTTDRFVVVMSGSDGRTIPGNTIAVQADMPFTGLTTFGGAFLSKFECSQMPHPLLEHITFVDTPGVLSGEKQRTQRSYDFTGVTSWFAAKCDLILLLFDPHKLDISDEFKRVISSLRGHDDKIRVVLNKADQVDTQQLMRVYGALMWSLGKVLNTPEVVRVYIGSFNDKPVNDSAVGPIGKDLFEREQDDLLCDLKDIPKKACDRRVNEFVKRARAAKIHAYIIGHLKKEMPAMMGKAKAQQRLIDNLDEEFAKVQREYHLPAGDFPDVEHFKQVLGGYSIDKFEKLKPKMVQAVDDMLAHDIPELLKNLRNPYE

SEQ ID NO: 282774 - protein, 73 aa, Zea mays
  Clone ID: MRT4577_20987C.1.pep
RVSSQMLKSHPTPTSSNQASQPGRLWPRSALQQPTTQIQMPVAPGISTRRTRRQTDMPCPCSRPMQSLAVHTS

SEQ ID NO: 282775 - protein, 67 aa, Zea mays
  Clone ID: MRT4577_20988C.1.pep
MQQLALASPTLLHCLVVVSLLSCVAHAQLSSTFYASFCPTLRSLARALVTRSVCCEPMYCRLFALAV

SEQ ID NO: 282776 - protein, 52 aa, Zea mays
  Clone ID: MRT4577_20989C.1.pep
SCDTLNRPPFFFFFFFFFFFFFFFFFFFFFFFFFHGNRLIRPKKRSPVDKIL

SEQ ID NO: 282777 - protein, 1758 aa, Zea mays
  Clone ID: MRT4577_2098C.1.pep
MDPKGKGIVINDKEKETFVNEPKDDRPTDSGSGHKRKDGRKKKTRRIKEIVYYDSDESSSSQKDDDDYDRRKTVNSNFSFDYSRIPHSSNAQLLPIPLGKPPHFDGEDYGFWSHKMRTHLFSLHPSIWEIVESGMKFDSSDSPVFINEQIHKNAQATTVLLASLCRDEYHKVSGLDNAKQIWDTLKISHEGNDVTLLTKMELVEGELGRFAMIRGEEPTQTYNRLKTLINKIRSYGSTRWTDHDVVRLMLRSFTVLDPHLVNNIRENPRYTKMSPEEVLGKFVSGRMMIKEARYVDDALNGPINEPQPLALKATRSKEALPSKVAQIEAAGLNDEEMALIIKRFKTVLKGRKGQPSKTKAKGKRSFFKCGKLGHFIANCPDNDSDQDQGNKREKKKNYKKAKGEAHLGKEWDSDCSSSDSDNEGLAATAFNKSSLFPNERHTCLMAREKKVSTHNTSTYASSSEDESSDDDEIDYSCLFKGLDRTKQEDLLYEEHDKFVEAQKSLALEIKRNEMLSSELSSCHETIAKLKSFNDDLNAKLEVASKSNSCVEIVETCNRCKDFDIDACSDHLVSISKLNDELASLNAQLKTSKNEFDKLKFARDAYTIGRHPSIKDGLGYKREAKNLTSHKAPISAKEKGKAPMASSMQKNHAFMYYDRRQPRNAYRSCNAFDSHAMFASSSSYVHDRNVGRRNVIHNMPRKNVVNVTRKVNEPSTIYHALNASFAICRKNKKIVARKLGARCKGDKTCIWVPKDICANLAGPNMSWVYASGGSSWIIDSGCTNHMTGEKKMFTSYVKSKDSQDSIIFGDGNQGKVKGLDVSVFRRCDGSLAFKGVLDDKLYLVDFAKEEVGLDACFMAKTCMGWLWHRRLAHVGMKNLHKLLKGEHVIGLTNVHFEKERPCAACQAGKQVGGAHHSKNVMTTSRPLELLHMDLFGPVAYLSIGGSKYGLVIVDDFSRFTWVFFLQDKSETQGTLKRFLRRAQNEFELKVKKIRSDNGSEFKNLQVEEFLEEEGIKHEFSAPYTPQQNGVVERKNRTLIDMARTMLGEFKTPECFWSEAVNTACHAINRVYLHRLLKKTSYELLTGNKPNVSYFHVFGSKCYILVKKGRNSKFAPKAVEGFLLGYDSNTKAYRVFNKSSGLVEVSSDVVFDETNGSPREQAVDLDDVDEEDVPTAAIRTMAIGDVRPQEHLEQDQPSSSTMVHPPTQGDEQVSQVEANDQGGAQDVQVEEEEAPQAPPTQVRATIQRDHPVDQILGDISKGVTTRSRLVNFCEHYSFVASIEPFRVEEALLDPDWVLAMQEELNNFKRNEVWTLVPRPKQNVVGTKWVFRNKQDEHGVVTRNKARLVAKGYAQVAGLDFEETFAPVARLESIRILLAYGAHHSFRLYQMDVKSAFLNGPIKEEVYVEQPPGFEDERYPDHVGKADPTLFTKTCDGDLFVCQIYVDDIIFGSTNQKSCEEFSRVMTQKFEMSMMGELTYFLGFQVKQLKDGTFISQTKYTQDLLKRFGMKDAKPAETPMGTDGHTDLNKGGKSVDQKAYQSMIGSLLYLCASRPDIMLSVCMCARFQSDPKECHLVAVKRILRYLVATPCFGIWYPKGSNFDLIGYSDSDYAGCKVDRKSTSGTCQFLGRSLVSWNSKKQTSVALSTAEAEYVAAGQCCAQLLWMRQTLRDFGYNLSKVPLLCDNESAIRIAENPVEHSRTKHIDIRHHFLRDHQQKGDIEVFHVSTENQLADIFTKPLDEKTFCRLRSELNILDSRNLD

SEQ ID NO: 282778 - protein, 124 aa, Zea mays
  unsure (1)..(124): unsure at all Xaa locations
  Clone ID: MRT4577_20990C.1.pep
HSITRWPETSVIGPIWGGGGGQLITIVGRSNRFNGLGNPLIESINDDQMDIPEKNRRKNXLIHRGLDLVVGXAYIDSGNSETDLQAGAQHKYELLWIILDEYCADIMIQSLAARLGVPTGGGGA

SEQ ID NO: 282779 - protein, 88 aa, Zea mays
  unsure (1)..(88): unsure at all Xaa locations
  Clone ID: MRT4577_20991C.1.pep
GRGIWGQRAERGPPHPKEPMVRRYGGTPPPPXRGCQAPWGGAHPGGWPGARPXDLVGGRVEVPAPIEPGKGWWVRNPPPAPRAWXXIT

SEQ ID NO: 282780 - protein, 76 aa, Zea mays
  Clone ID: MRT4577_20992C.1.pep
CPCSTCSPTELLESIINIEHQDYCMDYHWLRLALHDARVHHFAVILPLLDEYCQLHRFSALLDTDGDGQPLELARL

SEQ ID NO: 282781 - protein, 50 aa, Zea mays
  unsure (1)..(50): unsure at all Xaa locations
  Clone ID: MRT4577_20993C.1.pep
RPTXPQGLINEPARFFSLTDQPMKRKVLNTALGYKIPFTTTRSHLSPSPP

SEQ ID NO: 282782 - protein, 90 aa, Zea mays
  unsure (1)..(90): unsure at all Xaa locations
  Clone ID: MRT4577_20994C.1.pep
RVSFPWVGAKVLGPGKKGSLSLKKKGVPPVFVRGGNPRGRKDGVFKXFKANVGXVVPPKGEMKGFSLPGALGKEGGDFWARFFWGGKAIV

SEQ ID NO: 282783 - protein, 77 aa, Zea mays
  Clone ID: MRT4577_20995C.1.pep
AAGTPGARPPVPLRRLTSSLRLRKLSVLPETEPSTRGMPPSWTMPPKSLTRTGPISDAHLRRLQGHLPRGPASRNDI

SEQ ID NO: 282784 - protein, 67 aa, Zea mays
  Clone ID: MRT4577_20996C.1.pep
HSHYYNFILDILFYTPPFLLYTILQYYKTAWCTYHLKWPLPQIFSGSRYQLRLYRICSLKVVQFLPF

SEQ ID NO: 282785 - protein, 281 aa, Zea mays
  Clone ID: MRT4577_20997C.1.pep
MIKNTVATLMVRLHHLPLPRAAPAPTYRCRRHLALAPPLPRLRASAAVMSTAAEQTIADQKRTLRAEVRRALKALSADQRASEDLAIQTTILDSSWFKASKRLCAYISCQQLREVDTSKILAECLPSNPGQEELAKDLYVPRVEDKNRNMRMLKITTMDDLVKNSMNILEPSPVDATGNNREDVLSSLSPVDLFLLPGQAFDRTGRRLGRGGGYYDTFLLKYQELAKEKGWNQPLLVALSYSVQIMDEGIIPVNSTDVPIDALVSSSGVIPISAAALQRMQ

SEQ ID NO: 282786 - protein, 77 aa, Zea mays
  Clone ID: MRT4577_20998C.1.pep
HMNYGFQGLGALHPHSLPEVHDGANNGTPYNLNTMVPIGVNSNSRTAEAVDCRHLHKVGSSNLNGHSFDRVGVRAMG

SEQ ID NO: 282787 - protein, 257 aa, Zea mays
  Clone ID: MRT4577_20999C.1.pep
MASSSSPSQVICASFNQDNSMFSVGTKDGFKIFDARNGRLCYEKSLGGFNIVEMLFGTNLLAIVGTGEQPAMSPRRLCLFNTKTGASKRDLNFKTSILAVRLSRKRLVVVLQDRTFVYDLNSTTILDEIETVPNTKGLCAFAPNSEECYLALPASTSKGSALVYKASKPELICQIDAHLAPLAAMVFSLNGMYLATASEKGTMIRVHLVAQATKSHSFRRGTYPSTIYSLAFSPSVDLPDVLVATSSSGSLHMFFLD

SEQ ID NO: 282788 - protein, 98 aa, Zea mays
  Clone ID: MRT4577_2099C.1.pep
SDPHSPDQTAVGPSSSSLPTTAALCSNGKQELSTRTRLNQSCVFSSTDQDSSTRYSYQLKQAPWACSHASNSNRFEESWRQQVSLTPAPARGTGRWVD

SEQ ID NO: 282789 - protein, 84 aa, Zea mays
  Clone ID: MRT4577_209C.1.pep
AGRPLPQETLPNPSFRAPPLEAPKGRGEKRREKRWRKCEKPLTHCRALPSQTGGPSKKGQGKRNAFTGQSCPRKRPIPAAARRL

SEQ ID NO: 282790 - protein, 64 aa, Zea mays
  Clone ID: MRT4577_20C.1.pep
SHPIICFTGVKCYTSDSLQRLLDPTQHVASQNLVVRAPNEQSNVRNNHPRSSLARNCLKNTSHY

SEQ ID NO: 282791 - protein, 90 aa, Zea mays
  unsure (1)..(90): unsure at all Xaa locations
  Clone ID: MRT4577_21000C.1.pep
SPWTLIRTDIGVIGSGTALALLLSTAPTYIRMCKKXSVEQFLSIPYVATLVNCMMWVLYALGVGAPXSVVEITIYWTGVENQMNYGPLFL

SEQ ID NO: 282792 - protein, 66 aa, Zea mays
  Clone ID: MRT4577_21001C.1.pep
LNSSSDSIPSKWSRTRRRSRGGSFQLLDIRLSTAPYTTWRRSSVTIFRLRVSSPTHYSPLMLSSVG

SEQ ID NO: 282793 - protein, 125 aa, Zea mays
  Clone ID: MRT4577_21002C.1.pep
SGGTDGLASGGNHLCSGEPHQRRRPPQHRRQRPPAHQCRTDEWRSPQHARRGPRSRPHCGSEDKTIQEHGRRPHGVRCLVPPMRPPAREKPWMWRTYAWRDRRPYGGRAAMPQPNSWRQRRRRRH

SEQ ID NO: 282794 - protein, 74 aa, Zea mays
  Clone ID: MRT4577_21003C.1.pep
MHAWRSLLPSFVLAVLAAQALLAVVQSKTGPVEHASQACDDVNKPYCVPVIDPRSLPATGGWHGITPVTPLHGS

SEQ ID NO: 282795 - protein, 36 aa, Zea mays
  Clone ID: MRT4577_21004C.1.pep
DHRTSRNRLTWTFYALNVRNAPLRFRRLGRPLSQWR

SEQ ID NO: 282796 - protein, 57 aa, Zea mays
  Clone ID: MRT4577_21005C.1.pep
NLSFIQTSTNSSARYLIRGASIKPTTYSKPKLSNDRTCTLRHRSPLYHPNRTAARTT

SEQ ID NO: 282797 - protein, 55 aa, Zea mays
  Clone ID: MRT4577_21006C.1.pep
LYSMNVRALLSTATPPCSAVLERWNLWAAAVFIPDQIQREAGSGYLGSSSSTRER

SEQ ID NO: 282798 - protein, 114 aa, Zea mays
  Clone ID: MRT4577_21007C.1.pep
APFFAIPRGCGSFLVSLQLVLFPFFRQTIMGVNKQTGGNLERPSPAITGKNVPPRVGGNNCRFIQRGAIPFLFRCASVCFLPPFLCVCPCIPECGLSWTTCAWDQLWIRVFHLP

SEQ ID NO: 282799 - protein, 92 aa, Zea mays
  Clone ID: MRT4577_21008C.1.pep
HNILYPIKHSKTIVQVTKMCSRRKITNNILGGHSNSIFSLVHLGLLQIKLVAQDQNSWLLSFLLGRNNNNQHSSDLAKLYSSKLSVPQFLDT

SEQ ID NO: 282800 - protein, 109 aa, Zea mays
  Clone ID: MRT4577_21009C.1.pep
RLLEHLYPAGIFKTQDLESGCLLYGALLDDIGIDLPKAPTQFGEIIARLTLLGALRFEVMEEILKKMEDTMYRKAVFDAVKKTLEANPSGQTILGSHAAVIDACNSLLE

SEQ ID NO: 282801 - protein, 99 aa, Zea mays
  Clone ID: MRT4577_2100C.1.pep
RGVPDPPTQTRVPLQEASSTKKEPGVGWHTKTWGGKRNPPIFDLPRRQDGFLTKTLKLPTQAHPFSSHPPIACYFFGLFSPSKPFFFLPPHKPNLPFFK

SEQ ID NO: 282802 - protein, 165 aa, Zea mays
  Clone ID: MRT4577_21010C.1.pep
GRVGGRVGGRVGGIRILDEAHQCIVELQSPDYYPEIVKEAVNLALDKGTNFVDPLVRLLEHLYTKKIFKTQDLESGCLLYGALLDDIGIDLPKAPTQFGEIIARLTLLGALRFEVMEEILKKMEDTMYRKAVFDAVKKTLEANPSGQTILGSHAAVIDACNSLLE

SEQ ID NO: 282803 - protein, 36 aa, Zea mays
  unsure (1)..(36): unsure at all Xaa locations
  Clone ID: MRT4577_21011C.1.pep
PPGSPRSLGPGDXLSNRQFQLXKFFAGCCRWQLGDG

SEQ ID NO: 282804 - protein, 92 aa, Zea mays
  Clone ID: MRT4577_21012C.1.pep
PPRFGPFPCGRLYKKMGSPFWPPRAKGFHVGVQLRPIGPLTPPVGFGSQDFPPKPLPGGGFSICFLFFTIPTGLYLGGRLGAKNKKSCWWNK

SEQ ID NO: 282805 - protein, 43 aa, Zea mays
  Clone ID: MRT4577_21013C.1.pep
RRRSSVGPAWISSTLPGTGCLSRSARAELYAQVREPAFTTNKP

SEQ ID NO: 282806 - protein, 73 aa, Zea mays
  Clone ID: MRT4577_21014C.1.pep
EFILEHRHFKCIKMRLKQNEINSNDCRYQPLCLNARKIINVYSAPTPLTSLAISYFCLFPLKMVLSYSSDAWA

SEQ ID NO: 282807 - protein, 176 aa, Zea mays
  Clone ID: MRT4577_21015C.1.pep
MSRVASLSPSLSGDEVEVEEEEEDEGVDGYRKGGYHAVRPGDQFAAGRYVAQRKLGWGNFSTVWLAFDVQSQRYVALKIQKSAPEFAQAALHEIEFLSEITKKDPLNCKCIIQLIDHFKHTGPNGQHICLVFELLGDSLLKLVQYNRYKGIGLDRVRQICKSILVGLDYLHNELGI

SEQ ID NO: 282808 - protein, 106 aa, Zea mays
  Clone ID: MRT4577_21016C.1.pep
IRKKPTCGGLPLPSAEVSSLSVTEIGTASSVAYRTLYMRMDPLSSAFTASAVSSISTRHKMPPTPPISKEEARGRGAARAFASRCRSQIVESGSRRLTCLCRGGYG

SEQ ID NO: 282809 - protein, 101 aa, Zea mays
  unsure (1)..(101): unsure at all Xaa locations
  Clone ID: MRT4577_21017C.1.pep
MTNHPLFEVYHHPPRCPLCXRNQEEESINHLLCACSFSWEFWFVLLXKLGLQALILQIDDVCFDGWKRVESLXISKSXRGLNSIIILGAWTIWKHRNCCFL

SEQ ID NO: 282810 - protein, 42 aa, Zea mays
  Clone ID: MRT4577_21018C.1.pep
IFLEFSEDFKFVCNYVYYHSLRFAEQHGIKSLFVHVPLFLTI

SEQ ID NO: 282811 - protein, 49 aa, Zea mays
  Clone ID: MRT4577_21019C.1.pep
GNKTTYHFNFNQDTTQMPIITNSHETTILKTHYRENQNGEFVAFLTNSN

SEQ ID NO: 282812 - protein, 77 aa, Zea mays
  Clone ID: MRT4577_2101C.1.pep
KAVLRRPVLSLDVKRKGRAGPESLPPGGGCLALQAKLHGKAVLLTVARSITSGRALFKSDDSFSIASGHQHVCVKYY

SEQ ID NO: 282813 - protein, 123 aa, Zea mays
  unsure (1)..(123): unsure at all Xaa locations
  Clone ID: MRT4577_21020C.1.pep
MDLEECAPLXMLRLGWDSALTFYVATKTGGPLGTMNNPHDQANGTNAGLEIAIRLVQPIKDXLPMLYYADFYQIAGVRAEXATREPDVHLHHGRQDTSEPEXEAXLPDATQSYDKLRQGLSTH

SEQ ID NO: 282814 - protein, 85 aa, Zea mays
  Clone ID: MRT4577_21021C.1.pep
PAGALLAPSWGVLAGNPTRTSALPCLVPSWTACTCQPPTCFLAQTLAHTRMRPVQPATGQSGGAASCQCPPQLCLPFSPARFNQN

SEQ ID NO: 282815 - protein, 114 aa, Zea mays
  Clone ID: MRT4577_21022C.1.pep
AAHGARRGFSVQVPVPVERQGPGPVLVPCPQGDGGVQGFRWYTRRLRIDEDGDVADEFLDEIIPEDSVNNNTSPVGRFQVKYNTKPTPALRKHVIAVDGDIRHSLEHQGQLRWV

SEQ ID NO: 282816 - protein, 67 aa, Zea mays
  Clone ID: MRT4577_21023C.1.pep
MDPADKSASNKKPRLLYTSAELAAMEVNAMECLRRLLRRSGEALFLLQLICQHNVARLAQTLGNDLH

SEQ ID NO: 282817 - protein, 83 aa, Zea mays
  unsure (1)..(83): unsure at all Xaa locations
  Clone ID: MRT4577_21024C.1.pep
GKPMLHSKSHNGSLQQGNHNKIKTTMVNKFXPAFXLMEGDIELNSSKCLVIKQMNNLKWSVTKFSSQVVVRVDLGVYGXLEAC

SEQ ID NO: 282818 - protein, 222 aa, Zea mays
  unsure (1)..(222): unsure at all Xaa locations
  Clone ID: MRT4577_21025C.1.pep
MKKLHWLVRFLFGPVPVYFSALAILIVLTNAQYFGLVGVGVAPRTAKLASSAPVVSVMKYCDIFRGEWVPDAEAPYYNHKTCHMIQEHQNCLKYGRPDLGFLKWRWRPSGCELPRFDPLQFLQFARGKSLAFVGDSLARNHMQSLLCLLSQVAYPKDLSANPSDQNKVYHYRAYNFTISMFWSPFLVRAREPXHDGPAHTGHWSLYLDEPXDQWVVQMPRFD

SEQ ID NO: 282819 - protein, 103 aa, Zea mays
  Clone ID: MRT4577_21026C.1.pep
MFLPTKTLFFFFNLINQMYKGKLSFILAAPKYDFINLVSYYACYIHEHACYSDTILAFSIQALLSAPNPDDPLSDNIAKHWKSNEVEACETTKEWTRLYASGA

SEQ ID NO: 282820 - protein, 82 aa, Zea mays
  Clone ID: MRT4577_21029C.1.pep
IFGGQTLIYFNKHWLFKQTKPRQSINNSSKREVHLELLKSTSVCLEHNSSSYHIASYGDKTYGGGRCGCTLFPTNTTAIVKT

SEQ ID NO: 282821 - protein, 146 aa, Zea mays
  Clone ID: MRT4577_2102C.1.pep
GKKKGKKQNRGAQKKKGDRRGNRANQKGGRPPAGQGPKDGPQTGEEGKQTEKPWFFFFNTHQKKPMGGSQPGPAYYGPTPPPSQKEKNHIQGRRTKGTKVAGGPLAVATQIGAGGGLAGPPRGLKELGRGLFFRGHPKEHRGPRGG

SEQ ID NO: 282822 - protein, 60 aa, Zea mays
  Clone ID: MRT4577_21030C.1.pep
PHTWNGEAIYMENHIVSWISMGLSVSILMVLSNFVINYAKERLQPDFNRQLLNYNRSEFL

SEQ ID NO: 282823 - protein, 67 aa, Zea mays
  unsure (1)..(67): unsure at all Xaa locations
  Clone ID: MRT4577_21031C.1.pep
VXQGTLYESLTSRXXXLKVIXHXSFAFXXPXEXXXTYXXRRYGAHCLXDIXRERFXLWXLQXAXXGA

SEQ ID NO: 282824 - protein, 173 aa, Zea mays
  Clone ID: MRT4577_21032C.1.pep
RLARRKWTERRRAYCWICSSWHVLRRTWTPARRMYSCRMAPSTRPPSDDADVHAVLHEMRHANTLPASILLATAALVIASATIYLLLMLDVRTIRQITTLTCMRRPTTTTLPLVSFWSSDACIKASMNALHICSINLTESCNQTERPAGPLTPSDDQIPANTYVAMCATKRTL

SEQ ID NO: 282825 - protein, 52 aa, Zea mays
  Clone ID: MRT4577_21033C.1.pep
HVLCIKKNYRSVYLIHGNLLICQQINTYIYSPISLVTSRKNYFGVVSPSLKV

SEQ ID NO: 282826 - protein, 249 aa, Zea mays
  Clone ID: MRT4577_21034C.1.pep
MAFRPLEVWNRWAIQILLLLSLGMHVLLLPLAGIRRRRAPMLLRVPLWLAYHLADTVGIYAIGLLSLSSAVRDHRLMPFWAPFLLLHRGGPDSIGAYAFHDNQLWLRHLQVFVVKVLAVTYVLYIHLPRPPAARGDTFLVLAALLMWAVGVAKYGEKVAAIRGGNKSSIRSSLTKEPPAARHHHVHHWDHGLPSKAAVDDEEAYLRQAHHMFHIQARRRGFLAGERPRAHTLEMLRALRKQDGRGMWGV

SEQ ID NO: 282827 - protein, 116 aa, Zea mays
  Clone ID: MRT4577_21035C.1.pep
PSPCQLQGTWGVGSPPFLGQWVGFLGHQCSPRGTPYCSPQCPLFRHQFFPPPRRVDPQPRFQAFLGLVLRSLLQQHPQKGPVPGLLAAQIAHHLAALWGLHHPAPCPFAAAGGVPP

SEQ ID NO: 282828 - protein, 91 aa, Zea mays
  Clone ID: MRT4577_21036C.1.pep
IHRCNPVCFHSNALPPAVVVYFFANVLSTCINSFSLANIAPTCSSLFSCKCLTNSQVAKLITKFWKGFVCLIGIKAGSCDLVIQYNSFLEK

SEQ ID NO: 282829 - protein, 37 aa, Zea mays
  unsure (1)..(37): unsure at all Xaa locations
  Clone ID: MRT4577_21037C.1.pep
TTLNLLSNTSFIPTAFYHLITILFVIAPLMYNXSSHN

SEQ ID NO: 282830 - protein, 102 aa, Zea mays
  Clone ID: MRT4577_21038C.1.pep
MASLGLVLLVAVVVSAALMPPSAVAQQLTPDYYASTCPNLEAIVRRSVQQSMAQSQIAAVDSYASNQGAFFTDFVAAITKLGRIGAKTAATGEIRRVCNFPN

SEQ ID NO: 282831 - protein, 317 aa, Zea mays
  Clone ID: MRT4577_21039C.1.pep
MASLGLVLLVAVVVSAALMPPSAVAQQLTPDYYASTCPNLEAIVRRSVQQSMVQSQIAAPAALRLFFHDCAVMGCDASIMIVNSNGDDEWRNTANQSLKPEGFQAILSAKAAVDSIQQCQYKVSCADIMALVAREAVFLSGGPYYQVELGRFDGRVSTRDSVRLPGVNFTLDQLNAFFSGLGFSQNEMVALLGAHTLGAADCPFFQYRIGDPSMDPSLASQLRGTCGSNPSGGFAFFDPSPVRFDNAFYRNLQGGRGLLGTDQVLYSDQRSRSAVDSYASNQGAFFTDFVAAITKLGRIGAKTAATGEIRRVCNFPN

SEQ ID NO: 282832 - protein, 73 aa, Zea mays
  Clone ID: MRT4577_2103C.1.pep
SVFIASLHHLIIDLFTNFEDNIVCSFLCGPSSYCFGLNSSIFSFNLSMLYFNYDRCAPHAKALYHVAVNRAIH

SEQ ID NO: 282833 - protein, 197 aa, Zea mays
  unsure (1)..(197): unsure at all Xaa locations
  Clone ID: MRT4577_21040C.1.pep
GLRPRNPRCPLARHPAPSSHPSSPRKAVASSGRPWYWPDRVLYLGPLAGAPASYLTGEFPSDYRWDTAALSTDPETFAENRELEXFHSLWTMLXRLGCEFPELLVRIGDKVGEAEXIKVAWQIFSEDGLDYLGNPSLIHAXQSILAIWDCQVVLMGAIEGQRVDGGPLGEVVDPLYPGGSFDPLGLADDPEDFAELK

SEQ ID NO: 282834 - protein, 95 aa, Zea mays
  Clone ID: MRT4577_21041C.1.pep
THDLLAKCRLLLCSCSYVWCDVNYAYTMFVCIATTSSEVTSHLKIILGTGISSHRQVVSFVTFITQYCVFFCFFLSLPRCFCFFALVSGRFFWAF

SEQ ID NO: 282835 - protein, 95 aa, Zea mays
  Clone ID: MRT4577_21042C.1.pep
KPPQYCNRLFRPGPPFQCHSFAPSCDLNSFHCSNPLHLQQFFLKKHVFLVAVQVYSNVPKLKRFLPKMGLKNCSSMVCKQTGALSFPFSMSQAGP

SEQ ID NO: 282836 - protein, 99 aa, Zea mays
  unsure (1)..(99): unsure at all Xaa locations
  Clone ID: MRT4577_21043C.1.pep
MASSMLSATTVPLQQGGGLSEVTGLRSSAALPMRRNXATSDEXMSGVSYRAHXAGTSAGXAWLPTEAXLKVHITGFGRXIGGNFLRSWXGDGDASAPST

SEQ ID NO: 282837 - protein, 56 aa, Zea mays
  Clone ID: MRT4577_21044C.1.pep
AAFFFFFLFFFFFFFFFFLTQRKVQFIASVTDRYQILERIHRHTPTKQYQTLSSIS

SEQ ID NO: 282838 - protein, 65 aa, Zea mays
  Clone ID: MRT4577_21045C.1.pep
RRTLLTCNTFITHSERGGGDENKALKNIDKKMREYTFVNENNNLLLTHHSIRKMLHKHTITLCIE

SEQ ID NO: 282839 - protein, 147 aa, Zea mays
  Clone ID: MRT4577_21046C.1.pep
KGIGDFSPKENPLPVKNGFNAPPRFVFLQGPFLVFKNPINLGGGGGGPFPWFLLGNFEGWGGFPEGLGFFFVARKKGSKPPIKGLAKWFKKFTRAGLSKKKNKRGFFPPPWGFFLIPPGGGQMFFNFFNFFKNPFWFLGGPGEVFFF

SEQ ID NO: 282840 - protein, 49 aa, Zea mays
  Clone ID: MRT4577_21047C.1.pep
MTLEELVASDNAVQKMQAVTAAVEQLLVAAQRQDRLTVGVYEAAKLMNV

SEQ ID NO: 282841 - protein, 97 aa, Zea mays
  Clone ID: MRT4577_21048C.1.pep
SRCPLEGWLAQGHAQTLMVRDSFDYSLSNYPRRVTQHSIGCRCHRALLHAPFPSATTNLASKGVNDGSNLQSAFPLISNLLASTSNGNGGAGARVGY

SEQ ID NO: 282842 - protein, 237 aa, Zea mays
  Clone ID: MRT4577_21049C.1.pep
AHLFKNSSGSKVLSWSQRFGIAVGVARGLSYLHEKCRECIIHCDIKPENILLDEEMGAKVADFGMAKLVGHDFSRVLTTMRGTMGYLAPEWLAGAPVTAKADVYSFGLLLFELISGRRNNGSSEAGSNSAVYFPVHAAVRLHAGDVAGLLDDKIAGDANAKELERVCMVACWCIQDEEGDRPTMGLVVQQLEGVADVGLPPIPSRLHMLAMMNKCAVGGEAEVEPCSNSGSKIDTEV

SEQ ID NO: 282843 - protein, 58 aa, Zea mays
  Clone ID: MRT4577_2104C.1.pep
VHHKIIRGEGDYSLTCTPKTTMKGRNSPRLGLVNSPKFILSKRNHQRVPLKRGVYIFC

SEQ ID NO: 282844 - protein, 190 aa, Zea mays
  unsure (1)..(190): unsure at all Xaa locations
  Clone ID: MRT4577_21050C.1.pep
PAGGSCQEDYGADLHFXLPPRVGVGRGENPLHKDVQYRFYHHRNQGRVNTTPLERKLAREGLLRTAIERRQRPNHGDALQDDLGSRVTMDSSEEILLELPRLPGSKDEESAACGDPLPMASKGGAVLMVCITXVKKGQHSISHXGRTTLVSPTETFTDKSPTSDAPHVPKVPAKVTYDPPTMKGRADMTE

SEQ ID NO: 282845 - protein, 101 aa, Zea mays
  unsure (1)..(101): unsure at all Xaa locations
  Clone ID: MRT4577_21051C.1.pep
MVAFALMLQMESSGVVVKPGTPVKGDPXFGSVLHLSQSALGESYRRDYPLMYVKIDDLKPALGTPCVDMNSHIQFDLNLQKKFELSLTSKTTIVFCTVFQV

SEQ ID NO: 282846 - protein, 111 aa, Zea mays
  unsure (1)..(111): unsure at all Xaa locations
  Clone ID: MRT4577_21052C.1.pep
MGPKKDKAPPPSCKPRKPARGNMKKKTLHEGEXKEKDIHAVLFHQATYDKLLSDVTKHEQIIPSIXLSERLXRLLASLARHGTSRXLMAPAAHXMVSDHSSQEXYTNATNT

SEQ ID NO: 282847 - protein, 64 aa, Zea mays
  Clone ID: MRT4577_21053C.1.pep
TIQLRFKLCSLIMLYPCVSKQHVPSKCKTCRAFKSNQIKLRIYRLLLVYQIVFEMTIVNGRSKV

SEQ ID NO: 282848 - protein, 38 aa, Zea mays
  unsure (1)..(38): unsure at all Xaa locations
  Clone ID: MRT4577_21054C.1.pep
SVSISLTCHMHRRKXXPAFLLSLPLSHLXSSCTCTFWL

SEQ ID NO: 282849 - protein, 377 aa, Zea mays
  unsure (1)..(377): unsure at all Xaa locations
  Clone ID: MRT4577_21055C.1.pep
MGNCWFKGNPYFNRVSSNATKAESPKIQSPSERTEKEDCQLPSNPKEVEALRKDTARNPLIAFTFEELKRMTKNFRQDSLLGGGGFGRVYKGFITKDLREGLEIEEPTRVAVKVHDGDNSFQGHREWLAEVIFLGQLSHPNLVKLIGYCCEDDHRVLVYEFMPLGSVESHLFSRVMVPLTWSIRMKIALGAAKGLAFLHEAEKPVIYRDFKTSNILLDEEYNAKLSDFGLAKDGPVGDKSHVSTRIMGTYGYAAPEYIMTGHLTAMSDVYSYGVVLLELLTGRKSLDKSRPVREQMLADWALPLXAQKKKVLGIVDPRLAEDYPVKAVQKTAMLAYHCLSRNPKARPLMRDIVATLEPLQQLEETPGDSVAVTLEGT

SEQ ID NO: 282850 - protein, 168 aa, Zea mays
  unsure (1)..(168): unsure at all Xaa locations
  Clone ID: MRT4577_21056C.1.pep
MGNCWFKGNPYFNRVSSNATKAESPKIQSPSERTEKEDCQLPSNPKEVEALRKDTARNPLIAFTFEELKRMTKNFRXEVIFLGQLSHPNLVKLIGYCCEDDHRVLVYEFMPLGSVESHLFSRVMVPLTWSIRMKIALGAAKGLAFLHEAEKPVIYRDFKTSNILLDEE

SEQ ID NO: 282851 - protein, 45 aa, Zea mays
  Clone ID: MRT4577_21057C.1.pep
SGSMALQRASMSSHVNGYHSREPYCSWLRIEQGTTLRIRPAGSRY

SEQ ID NO: 282852 - protein, 55 aa, Zea mays
  unsure (1)..(55): unsure at all Xaa locations
  Clone ID: MRT4577_21058C.1.pep
ICSPFFFFFFFFFFFXANTDRTDLPAPEMPGSSHMNRPTEIHTNFLLNKATVSMD

SEQ ID NO: 282853 - protein, 234 aa, Zea mays
  Clone ID: MRT4577_21059C.1.pep
MMSGGAVKVIGALDSPFSHRAEAALRLKGVPYELVLEKDLRDKSELLLRHNPVHKKVPVLLHGGRRAVCESLVIVEYVDEAFRGPPLLPADPSARAAARFWARFIDDKCSTPFWLAMWTEGEAQRGFVKEIKENLKLLEGQVKGKRFFGGGDVGYLDVAASVFAHWLPVCEEVAGVSLVTAEEYPDLCRWAREYTSHDAVKRCLPGREELLARFSARKDSFVAAARSMAPAPEK

SEQ ID NO: 282854 - protein, 121 aa, Zea mays
  unsure (1)..(121): unsure at all Xaa locations
  Clone ID: MRT4577_2105C.1.pep
SWQDTMPPTKITTQPNTNFTKQGYTKDHIDTPIYYPNTAMQQYVHTYGQINDHSRDLIHTPFDTLADDIPELISKWYTKDHTNLDNNLDTGXAIGQLITLQINKKNXKDAGNPSMFNMKSP

SEQ ID NO: 282855 - protein, 483 aa, Zea mays
  unsure (1)..(483): unsure at all Xaa locations
  Clone ID: MRT4577_21060C.1.pep
MGNCWFKGNPYFNRVSSNATKAESPKIQSPSERTEKEDCQLPSNPKEVEALRKDTARNPLIAFTFEELKRMTKNFRQDSLLGGGGFGRVYKGFITKDLREGLEIEEPLRVAVKVHDGDNSFQGHREWLAEVIFLGQLSHPNLVKLIGYCCEDDHRVLVYEFMPLGSVESHLFSRDSYPILDRLLIGFIXSCHFVITLTMVYPHMAFMQILILITEKNRLKTSINLSLTPILNQYNLTCFEWQHYKFLHDLCGQFCIIICPFEIHQCILSDQWSICFHNAGVMVPLTWSIRMKIALGAAKGLAFLHEAEKPVIYRDFKTSNILLDEEYNAKLSDFGLAKDGPVGDKSHVSTRIMGTYGYAAPEYIMTGHLTAMSDVYSYGVVLLELLTGRKSLDKSRPVREQMLADWALPLLAQKKKVLGIVDPRLAEDYPVKAVQKTAMLAYHCLSRNPKARPLMRDIVATLEPLQQLEETPGDSVAVTLEGT

SEQ ID NO: 282856 - protein, 183 aa, Zea mays
  unsure (1)..(183): unsure at all Xaa locations
  Clone ID: MRT4577_21061C.1.pep
MADVLDPASDAPRARRPPPPPPDSPEDRSPQLPPPPPGGPPAASRKRSRSPPPPPPPPLGSSRPQRYXPPQRRRAGREXSPSPPPYRGSRRHSPSRRSPSPPFKRSRRDDGYDRRGGRGSPPRYGYDDRRRGYDHERGGGRGGYEDDRNQGRYLNRAPGVQATSTGDLTHIPFLKALHVALSP

SEQ ID NO: 282857 - protein, 67 aa, Zea mays
  Clone ID: MRT4577_21062C.1.pep
MPSIKLQSSDGEIFEVDVEIAKQSVTIKTMLEDLGMDDEGDDDPVPLPNVNAAILKKVIQWCTHHKD

SEQ ID NO: 282858 - protein, 207 aa, Zea mays
  unsure (1)..(207): unsure at all Xaa locations
  Clone ID: MRT4577_21063C.1.pep
MITTRFIDGLRDDVKSVVIIQRPTNLDTAYALTILQEEGLMHTGRRDMRRADFSNFARXTQVSTNXLSLPPAINHKVASNIEDRRGNVQGTSKSDDGKLTALRSYHRAKGLCLKCGERWGHTHRCSTSAPLHLVEEMWELTIEGEEVVEETEGNTEGPAHENVLAISLDAFCEFPWKSPARSYARNPTFDNTITSESSGWKDTMESI

SEQ ID NO: 282859 - protein, 76 aa, Zea mays
  Clone ID: MRT4577_21064C.1.pep
LHSLSCRIGLETIKIMDFFKFEFGNVDMVTGGGNCVPVGVIKNWEKHKGSLSVIVVLLADFCMPFLVFSYMLCRRP

SEQ ID NO: 282860 - protein, 80 aa, Zea mays
  Clone ID: MRT4577_21065C.1.pep
VVWPLLCYRSCYSHYRPSSYLSCLLHSSFKLVISTSLPCSGCGFSFRSIHWRHVIALVCLAIVFCLSSVQLYLCHIVVVA

SEQ ID NO: 282861 - protein, 39 aa, Zea mays
  Clone ID: MRT4577_21066C.1.pep
MRDGVYYIEHASHNNVTVMYGIYALKRARPHPLRIPRVG

SEQ ID NO: 282862 - protein, 145 aa, Zea mays
  unsure (1)..(145): unsure at all Xaa locations
  Clone ID: MRT4577_21067C.1.pep
GVPYHLFIPGPTRVKPGVNFCQFVLGEKWTMESQLQSAAAWGEGGIQDACDDSCSICLEAFCESDPPTVTQRXHEPSRFRAFSEWRQRSSQWAMCWQXVGXKDPTSQELFEGTQNERKIRSNQIRNPTMFHHPALGERELPHSQD

SEQ ID NO: 282863 - protein, 70 aa, Zea mays
  Clone ID: MRT4577_21068C.1.pep
SRQFLPCQLKAKGFSRLSPMYTTKTVRESSIFLTFENVPVHSILFVGFSSLFFPALVIDYSIVFFSRSPL

SEQ ID NO: 282864 - protein, 168 aa, Zea mays
  unsure (1)..(168): unsure at all Xaa locations
  Clone ID: MRT4577_21069C.1.pep
KGVGQLVKFFTKRGPKNRPNFKGGLFGETGGKPSLGAFFPKGGXDXVFCPPFRGPIFRPTSAQGVVLGCPPLGNRNAPRWGMWGSPGLIKNPALWTFLGTGVIKSPIPWPFFSPARKNFQMAQGLKICFSKTSPQFGVFLKKKKKKKKKKKKKKKKKKKKKKKKKKNS

SEQ ID NO: 282865 - protein, 102 aa, Zea mays
  unsure (1)..(102): unsure at all Xaa locations
  Clone ID: MRT4577_2106C.1.pep
ELSQSPLPARMAYAARLPPPPTMGKEKSESQHCGYWPCRLCQVHALFLPVPHILLKALEVSRNCQIWITVLMCLLILSEFGVNACGADXPLMAGLVDSLELD

SEQ ID NO: 282866 - protein, 102 aa, Zea mays
  unsure (1)..(102): unsure at all Xaa locations
  Clone ID: MRT4577_21070C.1.pep
MPGGHGLSSRTRDLFSRPFRKKGYIPLTIYLRTYKIGDYVYVKVNGAAHQGMPHKFHHGRTGCVWNVIKRAIGAQATKQATGRXILRHRIHVRVEHVQPPRC

SEQ ID NO: 282867 - protein, 54 aa, Zea mays
  Clone ID: MRT4577_21071C.1.pep
KSLVFLPKPETFPVYLKGNHILKNSFSKNHCNFCGVGNAVLSGKINQACVGHVI

SEQ ID NO: 282868 - protein, 264 aa, Zea mays
  unsure (1)..(264): unsure at all Xaa locations
  Clone ID: MRT4577_21072C.1.pep
PAGSGPEFPGRPTRPRELQCLTPRGRYDIRIYPTFLHLHGKTFDYKIPYTTVLRLFLLPHKDQRQMFFVISLDPPIKQGQTRYHFLILLFSKDEDISLTLNMNEEEVEKRFEGRLTKNMSGSLYEMVSRVMKALVNRKITVPGNFQGHSGAQCITCSYKASSGLLYPLERGFIYVHKPPVHIRFDEISFVNFARGTTTTRSFDFEIETKQGTQYTFSSIEREEYGKLFDXVNAKKLNIKNRGLKEGIKPSYDDYADSDEDXHDA

SEQ ID NO: 282869 - protein, 466 aa, Zea mays
  unsure (1)..(466): unsure at all Xaa locations
  Clone ID: MRT4577_21073C.1.pep
MELVTIVTLTLLAYSAAMLARVLVARAQRRRCYLLDYVCYKATDDRKLPTDLCGEIIQRNKLLGLEEYKFLLKVIVNSGIGEETYGPRNMIEGGEARPDRLREGMEEMDETFHAVLDELFARSAAPGGVGIRPADVDVLVVNVSMFSPAPSLSARVVRRYGLREDAKVYNLTGMGCSATLIALDLVNGYFRTHAGQVALVMTSESIAPNWYAGNKRTFMLGNCLFRSGGCAYFLTNDPRLRPHAKLRLRHVVRTHTGASDEAYNCALQMEDEAGRPGFHLGKELPRAAVHAFVHNLRVLAPRVLPLPELLRLACATLXAPGAQEAAARRGPWPWPXLTIRMKAGVDHFCVHTGGAAVIDGVGKGLTLTEHDLEPSRMTLHRFGNTSASSVWYVLAYMEAKGRLRQGDRVLMLTFGAGFKCNSCVWTVERPATDAGVWKDRIHHYPLKDVSNPFMDKYGFVKDLIDL

SEQ ID NO: 282870 - protein, 93 aa, Zea mays
  Clone ID: MRT4577_21074C.1.pep
PSRMTLHRFGNTSASSVWYVLAYMEAKGRLRQGDRVLMLTFGAGFKCNSCVWTVERPATDAGVWKDRIHHYPLKDVSNPFMDKYGFVKDLIDL

SEQ ID NO: 282871 - protein, 266 aa, Zea mays
  unsure (1)..(266): unsure at all Xaa locations
  Clone ID: MRT4577_21075C.1.pep
FFLYAHTRWSSCSPGCASRSSHRGAASSQAAXTSDGAWPPSSPAVRPPGAQTMAAAXSSSSPSSPSPDLPVPGRAPGPCHGGRSLVGVDXSSEASSSSTAHLPARSXSSACSSSSTPSSSLSAPWSSHRRPSXSSSSRAWCALSLAHVPNAVGSSLSLGVVPSSSSSSTRRSDSRHPXLVMVPSRRAPGSALLAPVLSLSSLWSLSTMVLCILLRSRPSDPALTPAATSSSFLSSRVPLFRVLGHQRSTAVTTSPVYRVMLRSSIG

SEQ ID NO: 282872 - protein, 82 aa, Zea mays
  Clone ID: MRT4577_21076C.1.pep
HSNSRKKKKKKKKKKKKKKKKKKKKKKKKKKGKKKKKKKKKKKKKKKKKGGGLFRGSNFPSRSFQFIIFFLGPLNLISLAGF

SEQ ID NO: 282873 - protein, 76 aa, Zea mays
  Clone ID: MRT4577_21077C.1.pep
IVTQRSSTKGNGNIKQSSCIRWNVQIEPNQKEEHHYWSSNSYYPSTIYERSLPRAQHEAESAACQIEIDGNDFTQQ

SEQ ID NO: 282874 - protein, 63 aa, Zea mays
  Clone ID: MRT4577_21078C.1.pep
QEKTIWLRHGHAQIVMTRGDASAESWCIEKVLAYVSLSWDVALTPVLICGPACASHTMSALSD

SEQ ID NO: 282875 - protein, 664 aa, Zea mays
  Clone ID: MRT4577_21079C.1.pep
APRRCENKQNEEKRSSGRQQAGRQEHSPARPAPTPAPAASARPRPLLRFVPSPFAISFEEKGKQARKYSTDTTHLPLRSGHQAQPISRSLSLSPSPSSAQRTRRRPLPGGPSLSLSAGSSGLSRSGGAEIRPLGRRLLPRSAGARSWHPAMSSPMPSPTLKDHLSTPTGPLHLKVWEVICIALGAFMVLVLFATVWLTLRSKKRVRRRASANIPITQIPAISKEIKEVRVEQVPASDFVAHDGVLLTFQDKTSDRDSDKVMAHLGVSKSKRGDESHSGSFRYMDKDAGFQSAEEGGSGTFRQASANAIVAPSPLVGLPEFSYLGWGHWFTLRDLELATNRFSKDNIIGEGGYGVVYRGQLINGSPVAVKKLLNNLGQAEKEFRVEVEAIGHVRHKNLVRLLGYCVEGTQRMLVYEYVNNGNLEQWLHGAMSQHGSLTWEARIKILLGTAKALAYLHEAIEPKVVHRDIKSSNILIDDEFESKVSDFGLAKLLGAGKSHVTTRVMGTFGYVAPEYANTGLLNEKSDIYSFGVVLLEAITGRNPVDYGRPPNEVNLVDWLKMMVASRRSEEVVDPTIETRPSTRALKRALLTALRCVDPDSEKRPKMGQVVRMLESDDPIPRGDRRSKHHRGGSTEMDSQKDNNSDTEKSDNADSKPSRTRASSSK

SEQ ID NO: 282876 - protein, 220 aa, Zea mays
  Clone ID: MRT4577_2107C.1.pep
MALNKEYTYADLEKEPYWPFEKLRISITGAGGFIASHIAKRLKGEGHYIIASDWKKNEHMEEDMFCHEFHLADLRVMDNCLKVTTGVDHVFNLAADMGGMGFIQSNHSVIMYNNTMISFNMLEAGRINGVKRFFYASSACIYPEFKQLETVVSLKEADAWPAEPQDAYGLEKLATEELCKHYTKDFDIECRIGRFHNIYGPYGTGKGGKGEGTAAFCRKL

SEQ ID NO: 282877 - protein, 361 aa, Zea mays
  Clone ID: MRT4577_21081C.1.pep
MARVELLALLCLAGTLGAQATAGPRPDARVGVYELKLGDFSVKVTNWGARLMSVVLPDCKGNLADIVLGRDTVAEYFNDTSYFGPITGRVAQRISRGRFVLDGKVYHLQRNDGRNTIHGGGTAFSKSVWTVKEYVGGGDSPYVTLYYHSFDGEQGFPGNLDAYVTYRVSGPYTLGVHMSATALDRATPVNLLLHAYWNLGGQGSGDVLGHELRLHASRYAVLDEELLPSSGRVAPVAGTPLDFRTPTPIGARIRQVTGGKVVGYDANYVVDGEGMRPVAQVRDGASGRAVELWANQATVQLYTGNWLNHTQGKGGGVYDQYAGFTLETMGYVDAVNHPEFPSQTLLPGQEYKHDMVFKFSF

SEQ ID NO: 282878 - protein, 165 aa, Zea mays
  Clone ID: MRT4577_21082C.1.pep
HWVPRGRPDRDPGMVERLHAEVRLLRSLSHDHIIGFHKVWLDRDAGVLNFITEVCTSGSLREYRHRHRHVSVKALKKWARQILEGLNHLHTHDPCIIHRDLNCSNVFINGNNGQVTYIRYDRLLPGPHPIDPSPFLDTSFISSILEIFVVFQPILFYSFNSIRTR

SEQ ID NO: 282879 - protein, 68 aa, Zea mays
  Clone ID: MRT4577_21083C.1.pep
EKKKKKKKKKKKKKKKKKKKKKKKKKKKKKKYKNRGALFYGPAVVSHCLRLCKPLVSAHLDPPWLGPR

SEQ ID NO: 282880 - protein, 142 aa, Zea mays
  Clone ID: MRT4577_21084C.1.pep
GKKGASFGTINGKPGPGRTGPKRGFFANKKNRGAVWEQERPFQNRGQTQFGVNFFPASRGTLSGPNKGGGFPRAPPGPPGGPFSGKPEGPFFCARAFGNFGNPFFFFFSFPRSGAAFKAPGGGGDPNKSLLTTAVAQRVGVP

SEQ ID NO: 282881 - protein, 62 aa, Zea mays
  Clone ID: MRT4577_21085C.1.pep
SYPSDDETGCGTHVYAPRAPLRHASLIWRIRTGTAVMTHEGTTSNGRTTNEPSASRLPALDS

SEQ ID NO: 282882 - protein, 186 aa, Zea mays
  Clone ID: MRT4577_21086C.1.pep
MQHSSPFLSLLLLLAASPLLAAAETIYCFGGVHNTNSTYGANLRRLAAVLPSKTASSQGLRASGDVGYWPNRVRASSSCEPPSVNSSSCAACVAAAFREAESACPYGRKVLVLAGNCTLRLGLGHFSRSLGLGGWVLWHLFSRRWKHYLFICHRRQQLVSPLGSDDTDISSNWICMAFLHASARMA

SEQ ID NO: 282883 - protein, 88 aa, Zea mays
  Clone ID: MRT4577_21087C.1.pep
MAGGVHEVRAGGRRPRWRRPRRVLMFLLPLQGHINPMLHLVDALHARGLTVTVLHARLNAPDPARHPEFRYRAGARRSPVPRHRRAGT

SEQ ID NO: 282884 - protein, 115 aa, Zea mays
  Clone ID: MRT4577_21088C.1.pep
NLNLAMVPWAPPKVDAHAASSSTAAVVEMVDADQDGDGASMEVEHDVEGQATPPAGGALQVEAFNHHYQQQHQWPAHTGCVAAATSSGPELPCKPCHVVVVMAAGGDIIVVVVIS

SEQ ID NO: 282885 - protein, 517 aa, Zea mays
  Clone ID: MRT4577_21089C.1.pep
GLKDRAVRYIACGANFTAAICQYKWVSGADQSQCSSCRQPFGFTRKRRNCYNCGLVHCNSCTSRKALRASLAPSPGKPYRVCDSCFLKLNNASDPNAANRRKDPVPYQPVESNGDAKVGKASLPSNMEMIRNLDIKAAWQGKKTDGLSFLRNPQVSSLLQLSDIALSGGLGMNRSAPRAVHISAARSVTTSRAVSPFSRKPSPPRSTTPVPTAHGLSFSKSATDNIVKANELLNQEVERLRAQVDNLRNRCELQELELQKSAKKVLEAMTLVAEESAKSKAAKEVIKSLTAQLKDMAERLPPDHGAYNVNETKQSHNPNGIDSHAASYSSMNGIHQTRNELLNASIAHSLNSGRPSSHCNGISGQHKLLGNVSEHSDCSTHSLRITAPHDSELPSRRARSSSDEMLTAGSRVDDNLNVDAVSLQSGEDGYKPRGTIPLPSNQVQAEWIEQYEPGVYITLTTLRDGTRDLKRVRFSRRRFGEHQAENWWNENREKVYERYNVKSSERVSSAASTRSAY

SEQ ID NO: 282886 - protein, 1095 aa, Zea mays
  unsure (1)..(1095): unsure at all Xaa locations
  Clone ID: MRT4577_2108C.1.pep
MDPKGKGIVINDKEKESFVNEPRDDKSNDSGSGHKRRDGKKKKTRRIKEIVYYDSDKSSSSQKDDDHDKQRKPVNSNFSFDYSRIPQSSNSHLLSIPLGKPPHFDGEDYGFWSHKMRSHLFSLHPSIWEIVDSGMHFNSSDSPIFINEQIHKNAQATTVLLASLCRDEYNKVSGLDNAKQIWDTLKISHEGNDATLLTKMELVEGELGRFAMIRGEEPTQTYNRLKTLINKIRSYGSTRWTDHDVVRLMLRSFTVLDPHLVNNIRENPRYTKMSPEEVLGKFVSGRMMIKEARYVDDALNGPINEPQPFALKATGNKEALPSKVAQIEAAGLNEEEMALIIKRFKTVLKGRNGQPSKTKTKGKRSCFKCGKLGHFIANCPDNDSDQEKGNKREKKKHYKKAKGEAHLGKEWDSDCSSSDSDNEGLAATAFNKSTLFPNERHTCLMAREKKVCTRNSTYASSSEDESSDEDEVDYSCLFKGLDRSKIDKINELIDALNEKNILLEKQEDLLYEEHDKFVEAQKSYTLEVKRNEMLSFELSTCHETISTLKGVNNDLNAKLEVANKSNSCVEHVEICTRCKDFDIDACSEHLVSISKLNDELASLNAQLKTSKNDFDKLKFARDAYTIGRHPSIKDGLGFKREAKNLTSHKAPILAKEKGKAPMASNVQKNHAFMYYDRRYSRNAFRGHDVFDSHAYDSYAMTASSSHVMHGRNMSRRNAIHHVPRKNVIHAPRKVVNEPSTIYCALNTSFAICRKDRKVIARKLGAKCKGDKTCIWVPKEIVTNLVGPNKSWVYASGGSSWIIDSGCTNHMTGEKKMFTSYVKNKDSQDSIIFGDGNQGKDKSETQGTLKRFLRRAQNEFELKVKKIRSDNGSEFKNLQVEEFLEEEGIKHEFSAPYTPQQNGVVERKNRMLIDMARTMLGEFKTPESFWTEAVNTACHTINRVYLHRLLKKTSYELLTGNKPNVSYFRVFGSKCYILVKKGINSKFAPKAVEGFLLGYDSNTKAYRVFNKSSGLVEVSSDVVFDETNGSPREKVVDLDDVDEEDVPTAAIRTMAIGEVRPQEQDKRDQPSPSTEDDEKVPQVEALDQXGAQDDQV

SEQ ID NO: 282887 - protein, 125 aa, Zea mays
  Clone ID: MRT4577_21090C.1.pep
PTKAQPRPAQRRSLGPNRPKSPLPGLPIFTVVIGNTESRQIARAPINFSVPNIVVEVISAYGNVGFSTGYSCSRQVTPGGGCCKDAWVSLSGKWSVEGKLTLMAIMFYGRLKKFSMLGGQAWRLN

SEQ ID NO: 282888 - protein, 220 aa, Zea mays
  unsure (1)..(220): unsure at all Xaa locations
  Clone ID: MRT4577_21091C.1.pep
TQHCVPFRRPRPPARGLPPSSPPDLVFFQNGLLDPWFKSKGLVGANQVLAYFAVSKVGEPPVDGITDTNPEGLTAAFGSWAPAVAARLQNGGLTCKVLEKEAFQKQMLEKLIWISAFMLVGARHPGATVGVVEKNYRSEVASLIAELASAAAAEEQLTFAEGIXDRLCAYSRAVAHFPTAVIEFKWRNGWFYSLTEKALAAGKPDPCPLHTAWLKEIRVI

SEQ ID NO: 282889 - protein, 56 aa, Zea mays
  Clone ID: MRT4577_21092C.1.pep
AGKQGSPTHRFLVQPLNPCWIQGDRKVQAMGKPPPCVKTTCLLKVVYFSGGTNRVK

SEQ ID NO: 282890 - protein, 107 aa, Zea mays
  Clone ID: MRT4577_21093C.1.pep
MKQKIVIKVCMPCDKCRSKAMGLAAKAGVSKMGITGDGRDQLEVEGDDIDTVCLVNCLRKKVGRADIVKVEEVKPAEKKPPEEKEKEKPAEAVPLPYCWYPNPNYYW

SEQ ID NO: 282891 - protein, 138 aa, Zea mays
  unsure (1)..(138): unsure at all Xaa locations
  Clone ID: MRT4577_21094C.1.pep
MKQKIVIKVCMPCDKCRSKAMGLAAKAGVSKMGITGDGRDQLEVEGDDIDTVCLVNCLRKKVGRADIVKVEEVKPAEKKPPEEKEKEKPAEAVPLPYCWYPNPNYYHXPLPVVASGAGDQLSCSCMLVCNNRFEGLDW

SEQ ID NO: 282892 - protein, 47 aa, Zea mays
  Clone ID: MRT4577_21095C.1.pep
REQASFMERWYRKLSYTCVLVVAEAVAHLSVYDKRWTYLVRQREQKI

SEQ ID NO: 282893 - protein, 113 aa, Zea mays
  Clone ID: MRT4577_21096C.1.pep
MKQKIVIKVCMPCDKCRSKAMGLAAKAGANKMGITGDGRDQLEVEGDDIDTVCLVNCLRKKVGRADIVKVEEVKPAEKKPPEEKEKEKPAEAVPLPYCWYPNPNYYHYYHYQW

SEQ ID NO: 282894 - protein, 268 aa, Zea mays
  Clone ID: MRT4577_21097C.1.pep
MKSRVALEPLAEEPGCGEEDAARRRSGLHAALHRWARLLSGGVAGDDARPAADLRVLLSVLACPLSPVPLLPRLPRHVASSAQYIIEQFRATTGCGKLEDGAVKSMYASGRVRLSMLQEPGGGGGGGRGHEGSFVLWQLAPSMWLVEMSVAGQSVAAGSDGRVAWRRTPWLGAHAARGGSRPLRRALQGLDPVTIASIFSTAEHAGEKEVDGEDCFVLRLDVGPSVLSSWSDGTAEVIRHGLTGFFSQRSGLLARLEDSQLTRIQSPG

SEQ ID NO: 282895 - protein, 72 aa, Zea mays
  unsure (1)..(72): unsure at all Xaa locations
  Clone ID: MRT4577_21098C.1.pep
GGTRPSXXXPPPPKCRQGMFFSSSCGTIYILCHGVRNAVQATSPREGLKTSSELEGTDGADAWADGGDRECG

SEQ ID NO: 282896 - protein, 293 aa, Zea mays
  Clone ID: MRT4577_21099C.1.pep
MAGILLLTYGARFLGILSVKWNWEGGDGGEWVLTLNPAVSSSVHSARRIHGYGEESWSPRSPVFPANAPEAAKKLNRSPPPRPRTNPKGAIPVVFPHGGAPQSLPPPIGKFARERWSSVPRRGNYASEAARFTPRGFDTLIGAQEPSHAVFHAEELGIRCARKGEGGGTHFHHGADKYISNIANMLNFKDNNINNEGMLRTVLDVGCGVVSFGGYLISSNVIAMSLAPNDVHQNQIQFALERGIPAYLGVLGTKRLPYPSRSFELAHCSRCRIDWLQRDGILLLGLDRWRLGA

SEQ ID NO: 282897 - protein, 254 aa, Zea mays
  Clone ID: MRT4577_2109C.1.pep
MDPKGKGMVVNDKEKESFLNEPRDDKPTDSGSSHKKKDGKKKRRIKKIVYYDSDESSSSPRDDNDEKKKPVSGLDNAKQIWDTLKISHEANDATMITKMELVEGELGRFAMIRGEEPTQTYNTLKTLVNKIRSYGSTRWTDHDVVRLMLRSFTVIDPHLVNLIHENPKYTKMTPEEILGKFVSGRMMVKEARYVDDTLNGPLPVYEPQHVALKATSSREALPSKVAQVEAAGLNEDEMALIIKRFKTALKGRKE

SEQ ID NO: 282898 - protein, 83 aa, Zea mays
  Clone ID: MRT4577_210C.1.pep
YSWNAEAMGCEELVYIFFGSPFVDAIRFALHTHMIGDLEVHRRRWSIGTCISMQRPFLPQLVQFVNLLYPAPIYPNMPSFFLS

SEQ ID NO: 282899 - protein, 113 aa, Zea mays
  unsure (1)..(113): unsure at all Xaa locations
  Clone ID: MRT4577_21100C.1.pep
NREQELFELHKDEQRKEHKRIWLXALNQWDEMXVQRKTXEAGMATKRLKEIXQAMKSCDRDSAAGHNETYDGYNNDERSLQKRVDQQPEVMVXVHEVRKEYEKQDQLDAALAE

SEQ ID NO: 282900 - protein, 72 aa, Zea mays
  Clone ID: MRT4577_21101C.1.pep
TVLGFHSAGMTCVVDSLSASLGGESDGDGSPTLPTPLDRPFLFFYSIKGYKVCDNNTNIVLSMYLLCNPNFI

SEQ ID NO: 282901 - protein, 60 aa, Zea mays
  Clone ID: MRT4577_21102C.1.pep
GGVGGRGQRNLENNNLFSCLSPDRVGESDQRQRPSFRGHLVRNQSRVMVSRLHIYVVRSG

SEQ ID NO: 282902 - protein, 67 aa, Zea mays
  Clone ID: MRT4577_21103C.1.pep
PRMNSNCSTGSKNLICGPVYARYHKPAPKKLTYCCTSQGHCLCKTANVVPHDLHPWTSLVMVSIEPT

SEQ ID NO: 282903 - protein, 553 aa, Zea mays
  Clone ID: MRT4577_21104C.1.pep
MAEAVASAGRLAMDSSTSVSPGQVSAILGFLWVFAAWAYAEVLFHRKNTASIKTRHSDVNLAVMDDSSVKAEDQTMLLEEGGQAMAAKPAYTSLTSQILRLIFMDQLLLLENRLTLRALSEFGGYLLYFYICDRTNLLGESAKNYSRDLFLFLYFLLIIVAAMTSFKVHQDKSSFTGKSVLYLNRHQTEEWKGWMQVLFLMYHYFNAKEIYNAIRVFIAAYVWMTGFGNFSYYYVRKDFSLGRFAQMMWRLNFFVIFCCIVLNNDYTLYYICPMHTLFTLMVYGALGILNKYNEIRSVMAMKFVACFLVVVLVWEVPGVFDIVWSPFTFLLGYTDPSKPDLPRLHEWQFRSGLDRYIWIVGMIYAYYHPTVEKWLEKLEETEMRTKLYIKTSIVTVSMMAGYLWYEYIYKLDKITYNKLHPYTSWIPITVYICLRNFTQEFRGFSLTLFAWLGKITLETYISQFHIWLRSSVPNGQPKWLLSIIPNYPLLNFMLTTAIYVAVSHRLFELTNTLKMVFVPNRDNKRLSYNFVAGTAISAALYFVSFVLIGIAGY

SEQ ID NO: 282904 - protein, 147 aa, Zea mays
  unsure (1)..(147): unsure at all Xaa locations
  Clone ID: MRT4577_21105C.1.pep
ESYLIEFWLFIFVSRHSDVNLAVMDDSSVKAEDQTMLXEEGGQAMAAKPAYTSLTSQILRLIFMDQLLLLENRLTLRAISEFGGYLLYFYICDRTNXFGESAKNYXRDLFLFLYXSXIXVAAMTXFKGHQDSHHSQEKSVLYFDXHQ

SEQ ID NO: 282905 - protein, 214 aa, Zea mays
  unsure (1)..(214): unsure at all Xaa locations
  Clone ID: MRT4577_21106C.1.pep
EKKKKKKKKKKKLDRKIWIVGMIYAYYHPTVEKWLEKLEETEMRTKLYIKTSIVTVSMMAGYLWYEYIYKLDKITYNKLHPYTSWIPITVYICLRNFTQEFRGFSLTLFAWLGKITLETDIXSCFVNSCRSSVPNGQPKWLLSIIPNYPLLNFMLTTAIYVAVSHRLFELTNTLKMVFVPNRDNKRLSYNFVAGTAISAALYFVSFVLIGIAGY

SEQ ID NO: 282906 - protein, 344 aa, Zea mays
  unsure (1)..(344): unsure at all Xaa locations
  Clone ID: MRT4577_21107C.1.pep
MAGALLSSPHTLPSPTSQSPFRPRSRGPLHAGAARVLPPRRRAFVLASCSREPAARNRGLEVERRRLLMSGLVSSFAIMLPISEAYAVMETDEDVKMNTQIDEINAYSFLYPVELPGKKFTFKWVESRKPERYSSAAPLSPDARQRIVSERVDMIHNVVISVSIGPPNSRFLPSKDKSSWDPKDVADCILSDRSTMKVTTGQRMTESSVLDAHVAEVDGEPYWYYEYLVRKSPTKSAPEPNLFRHNVACTAERDGYLYSLNASTLSKQWESXGPFYKRPWHPFAFSPVQKTMFLPTRILGDFGEXEILLVVIIFIPSDDFIASGFRPYFSRQMFSECLSFQLDR

SEQ ID NO: 282907 - protein, 203 aa, Zea mays
  Clone ID: MRT4577_21108C.1.pep
PGSPGIPPFATRLFFVCPRQGGAGFGRVWPQPPPQGAACPRVGPPRAPPPQFWEGGRGQPPPRAFFRRGPRRVPVFPRYRPPGPRPLPPARPPPSSAPLGRSFPFPAPGPPPFGVWGVPPPSPGSVLPGGGGGRFGFWGFFVCVFLPGSFLCGGWRALFWVVVRGRPPPPPVHRGKPPPPPPKKKKKKKKKKKKKKKKKTREG

SEQ ID NO: 282908 - protein, 166 aa, Zea mays
  Clone ID: MRT4577_21109C.1.pep
LCSVPVLGLMPTTVLAGQDAARPTSLSFSLSFTFLLCMMTEPSTREDRPRPSAPTRRHSGGGWRPRPPAPWPAQRAPGSPSGGGTRKQQHRSDEHGCGELLRGRGGGGHCDCRHGCFPSFFLDFDGGCLMPTAVLAGAGRQGCRVALARLDAYCWRPGGTWSLPGR

SEQ ID NO: 282909 - protein, 1430 aa, Zea mays
  unsure (1)..(1430): unsure at all Xaa locations
  Clone ID: MRT4577_2110C.1.pep
MDPKGMGMVVNDKTKESIVNEPRDDKPSDSGSSHKKKDRKKKRRIKKIVYYDSDESSSSPRDDKYEEKKKTVNSNFSFDYSRIPFNSNAHLLSIPLGKPLHFDGEDYPFWSHKMRSHLFSLHPSILEIVENGMLFDSTDNPVFINEQIHKNAQATSILLASLCRDEYNKVSGLDNAKQIWDTLKISHEGNDATMITKIELVEGELGRFAMIRGEEPTQTYNWLKTLVNKIRSYGSTRWTDHDVVRLMLRFFTVLNPHLMNSICENPWYTRITPEEILGKFVSGHMMIKEARYVDEALNGPMPIYEPQPVALKATSSREALPSKVAQVEAAGLNEDEMALIIKRFKTALKGRKEHPNKSKTKGKRSCFKCGKTGHFIANCPDNDSNQGQEKSGKREKKKSYKKAKGEAHLGKEWDSDCSSSNSNDEGLTASAFNKSSLFPSECHTCLMAKERKVSARNNSMYDSSSDEESSDDEVDYSSLFKGLDRAKVEKINELIDALNEKNKLLEKQEDLLYEEHDKFIRVQKSLVLATKRNEILSSEISACHESISSLRSVNDDLIAKLEVANKSSSSVERVVICNRCKNFDVNACNEHLASITKLNGEVASLNAQLKTSKNDFDKLKFARDAYTVGRHPSIKDGLGFRREAKNLTSQRAPISAKEKGKAPMTSNAQRNHAFIYSDRKFSRNAHRSYAYDSHAMIASSSSFVHGRNRPRKNVVHVPRKVYASGGSSWIIDSGCTNHMTGEKKMFTSYVKNKDSQDTIIFGDGNQGKVKGLGKIAITNEHFISNVFLVESLGYNLLSISQLCHMGYNCLFTNVDVSVFRRSDGSLAFKGVLDDKLYLVDFSKEEADLDACLIAKTSMGWLWHHRLAHVGMKNLHRLLKGEHVLGLTNVFFEKDRPCAACQVGKQVGSAHHSKNVMTTSRPLELLHMDLFGPVAYLSLGGSKYDLVVVDDFSHFTWVFFLQDKSETQGTLKRFLRRAQNEFELKVKKIRSDNRSEFKNLQVEEFFEEEGIKHKFSAPYTPQQNGVVERKNRTLIDMARTILGEFKMPERFRSEAVNTACHAINQAYLHRLLKKTSYELLTGNKPNVSCFRVFGSKCYILVKKGRNSKFAPKAVEGFLLGYDSNTKAYRVFNKSSGLVEVSSDVVFDETNGSPREQVDLDNIDEYDVPTDAIRTMAIGDVSQKKACDQGGAQEDQVMEEEAPRPPPTQVRATIQRNHPVDQILCDISKGVTTRSRLANFCEHYSFVSSIEPFRVEEALLDPDWVLAMQEELNNFKRNEVWTLVPCPKQNIVGTKWVFRNKQDEHGVVTRNKARLVAKGYAQVTGLDFEETFAPVARLESIRILLAYAAQHSFRLFQMDVKSAFLNGPIKEEVYVEQPXGFEDERYPDHVXVGKADPTLFTKTCDGDLFVCQIYVDDIIFALPFITCKSIWS

SEQ ID NO: 282910 - protein, 48 aa, Zea mays
  Clone ID: MRT4577_21110C.1.pep
KSVPICDKMILGWRNNRKKRPPPDCNMSPQREFVHGHVDDFPPRSAVL

SEQ ID NO: 282911 - protein, 55 aa, Zea mays
  Clone ID: MRT4577_21111C.1.pep
GDQLILTSCGIEPCCRTPSVSLYHCSIARRHFLVLLSVLQCAYARADLSYLLFNG

SEQ ID NO: 282912 - protein, 90 aa, Zea mays
  unsure (1)..(90): unsure at all Xaa locations
  Clone ID: MRT4577_21112C.1.pep
HHSRQSPLQLSSHFRYRPTPNVVHSASPKYGGASACSAAPPCRACPSCWPRPFRSAAWPESSSPVFFSPGRSQRQHQVXVSVHAVHLMGP

SEQ ID NO: 282913 - protein, 238 aa, Zea mays
  unsure (1)..(238): unsure at all Xaa locations
  Clone ID: MRT4577_21113C.1.pep
GRQGQKFCRSGRPGGGAGTQSRQKHTKRSHRATQQATKKXAXXAXXAXXVSATKAXIIPEGALLXVAFXPQXXPPETRGGGEHPPAQAXRRQQAXAASAXQQPKNQXQQQXXAXXTXQTXATQQQQQGXPAXSQXEGXNXGAXPQQQRXAXNPRXXANXAADQQQQQGQXXRAAXKEPARGNXGAXRQQQQRGGXSPXAGGEGXTXXEQQGAGGGRDRGGGHREGGRGGGEGGARARP

SEQ ID NO: 282914 - protein, 95 aa, Zea mays
  Clone ID: MRT4577_21114C.1.pep
AGRSGRGHSGSRTVLLLLHLPVCVYLPTSYMSPLNDMRVIHQLTSCRRAAVSPPRGITCEAAYPGSSLFIACDFRAGRSRLEEQLRVRRSRRLRR

SEQ ID NO: 282915 - protein, 111 aa, Zea mays
  unsure (1)..(111): unsure at all Xaa locations
  Clone ID: MRT4577_21115C.1.pep
AGPTGRDPXRGGGRQXPTKAXDXGDAATNXTAGQEAAPASGRKDKQPPGRQKEDTPEAXXQRGPTKKTRRNAXAKRNTGDTERGGGAERQXPGRPPGGANGGGESPGRRAP

SEQ ID NO: 282916 - protein, 40 aa, Zea mays
  Clone ID: MRT4577_21116C.1.pep
PGLTDAPDCTFIARGGLLGVCCGGGRRPHNAHIKQGWRIV

SEQ ID NO: 282917 - protein, 96 aa, Zea mays
  Clone ID: MRT4577_21117C.1.pep
RATTNLKEVQPTYVRSQRYNPSITGPGTKRNHKTIGNEPTQLKQRYQRKLAANRYRLGVTSRSQLKGKAKGHRWQETQKRKRKRSSRRTEEKCKRH

SEQ ID NO: 282918 - protein, 122 aa, Zea mays
  unsure (1)..(122): unsure at all Xaa locations
  Clone ID: MRT4577_21118C.1.pep
PYYVEAGSPVPANNNTKCFMDRTVWTTYILMLFFAWFLVLSVSDCSPRVAWTVDNLTHFGITYHFFHWKKXTPFAADDQGIYSTLTWWEQIDNGQQFTRNRKFLTXVXPEMLYLIASYLTDY

SEQ ID NO: 282919 - protein, 92 aa, Zea mays
  Clone ID: MRT4577_21119C.1.pep
GPADHPLPLRTPPSFKNVVNGPHPAWKNGFRGPRFKFCPPMEFPSKGFFSGHPPRKIIQILSSFSTPCLLKLDCFKIVPRLPFPPLVFFFNL

SEQ ID NO: 282920 - protein, 677 aa, Zea mays
  unsure (1)..(677): unsure at all Xaa locations
  Clone ID: MRT4577_2111C.1.pep
MTGEKKMFTSYVKNKDSQDTIIFGDGNQGKVKGLGKIXITNEHFISNXRSDGSLAFKGVLDGKLYLVDFSKEEANLDACLIAKTSMGWLWHRCLAHVGMKNLHKLLKGEHMLGLTNVCFEKDRPCAACQAGKHVGNTHHSKNVMTTSRPLELLHMDLFGPVAYLSIRGSKYGLVIVDDFSRFTWVFFLQDKLETQGTLKLFLRRAQNKFELKVEKIRNDNGSEFKNLQVEEFLEEEGIKHEFSAPYTPQQNGVVERKNMTLIDMARTMLGEFKTPERFWSEAVNTACHAINQLYLHHLLKKTSYELLTGNKPNVSYFRVFGSKCYILVKKVSSDVVFDETNVSPREQVDLDDIDEDDVPTATMRTMAIGDVRPQEQQEQDQPSSSTMVHPPTEDGEQVPQEEGQDQGGAQEEQVMEEEAPWVPPTQVRATIQRNHPVDQILGDIRKVEEALQDPDWVLAMQEELNNFKRNEVWSLVPRPKQNVVGTKWVFRNKQDEHGVVTRNNARLVEKGYAQVAGLDFEETFAPVARLESIRILLAYAAHHSFRLFQMDVKSAFLNGPIKEEVYVEQPPSFEDDRYPDHVFKLSKALYGLKQAPRAWYECLRDLLIANTFKVGKVDPTIFTKTCDGHLFVCQIYVDDIIFGSTHQKSCEKFSRVITQKFEMSMMGELNYFLGVTP

SEQ ID NO: 282921 - protein, 364 aa, Zea mays
  Clone ID: MRT4577_21120C.1.pep
MELAGTWRKVMPYMAMVFLQFGFAGMFLISVASLRQGMSHYVLVVYRNVVAAIVMAPFALWFERKTRPKMSLPVFIKILALGLLEPVLDQNFIYMGVNSTSASFSSALTNILPALTFVNAIILRMERIVIKERRSQAKIAGTAITVCGALLMILFKGPIINFPWSKHASHAVSDSGVHNSGHWLMGTFMILLSCFCWSAFFILQSYTLRSYPSELSLTTLICAMGATESGAVALVMERDTKAWSIGFDMRLFTAIYSGIMCSGVAYYVQGIVIKDRGPVFVTAFSPLCMILVTVLGSFILSEVVTLGRLIGATVIVVGLYALIWGKNKDHVKSQNSFDKHDTFELPFSTSAVNNTTGPVLATSI

SEQ ID NO: 282922 - protein, 46 aa, Zea mays
  Clone ID: MRT4577_21121C.1.pep
RGTFTNFFSRSHTDHKGVDGGFFFQSREKRGQNGSRRPGRGPPILP

SEQ ID NO: 282923 - protein, 34 aa, Zea mays
  Clone ID: MRT4577_21122C.1.pep
FIPYKLASARTLKCSLKKAPTGGGYAQLEARLQP

SEQ ID NO: 282924 - protein, 33 aa, Zea mays
  Clone ID: MRT4577_21123C.1.pep
VREKQHQDRRHLRAGKVSGLGTRREPTCPPTRL

SEQ ID NO: 282925 - protein, 93 aa, Zea mays
  Clone ID: MRT4577_21124C.1.pep
VYVSPSIATLQIRGFHPQSLRARFIIWAVSLLIIFFLSFAMPYLRQLIRSFHPSRVCMIRPISGSSAPLFLEFAFFGSFGAFVGFSPSMIYAP

SEQ ID NO: 282926 - protein, 309 aa, Zea mays
  Clone ID: MRT4577_21125C.1.pep
MHDRSHKPQPAEAGNGGPAGEGGGGNVDRVLFKNLVEMVPLVESLMDRRVNPAYSRRASLVYTPAPPKKASDLKSVKLPQSVSAKKRRDPGDIAKKSTPDSNGDNGSVVPLSLSGAENMPKDEVAVLSEQINDLQKKLLEKEEALRSAESSVTEMNAAYATIDELRRLVADKEALIRSTNSQLHDAKIMLADKQASLEKLEWEVKMSNKKVEDLQGDMSNMGFEISSLMVFFEKISENVSGDSYDDIIPSSYELETLQSMSEIDKIEVDKLDKERVTYAEALAAARENPDEEHLNIAAEARSRLQVLVL

SEQ ID NO: 282927 - protein, 81 aa, Zea mays
  Clone ID: MRT4577_21126C.1.pep
TSHELVTSSSMRLILRYLFLTGNRVLWSRPTTTRDITVLKVLQRAIGGIAGGSPRLERPEQSANNTVDPPIAHRGIDVPRA

SEQ ID NO: 282928 - protein, 177 aa, Zea mays
  unsure (1)..(177): unsure at all Xaa locations
  Clone ID: MRT4577_21127C.1.pep
REREREQPPHAHRATRPSPRRARARARGHCAARAAAAQQAPHTRAPAPQRAPPTARRHRPAAAARAGAPGATAARSTTRXATKQADTCRDSGHTHNDRTPRDXLADNDACPARGAPKRRNRPDEPAAAKNANATDARKARKEEQKKEESKGKAQPNATGAGTTALAGXNFYLNNVYS

SEQ ID NO: 282929 - protein, 115 aa, Zea mays
  Clone ID: MRT4577_21128C.1.pep
QGIRALRTRESKQARVRLLTETKARLPRPDGSLDREKRGCGRSGLRSGGLRAREQVAPQPAAEQGAWGGRQSRAAGDRGPWTARREARSVLRPAGEWPAAEVEAKHGGARTSHVG

SEQ ID NO: 282930 - protein, 103 aa, Zea mays
  Clone ID: MRT4577_21129C.1.pep
LDNKKARTRTLSTHVDLARFQEQKSRQATDRCIGLAGHPSAHKSTTNETKARLPRPDGSLDREKRGCGRSGLRSGGLRTGTGSEGGTGGDALGSVAYSGVRVE

SEQ ID NO: 282931 - protein, 87 aa, Zea mays
  Clone ID: MRT4577_2112C.1.pep
SGHGRYQVAQVPQEVRLVLQVVFLIRSFLCHVFCNKVVSRSVYGMCPASVWPLCVSVCACAGSRFSSIRARCVLIKTNKGRKKRTAA

SEQ ID NO: 282932 - protein, 55 aa, Zea mays
  Clone ID: MRT4577_21130C.1.pep
LGKTPRRDWVGSQPTHDACLHWPGGNNNKPLPLLPVMLAPTMMVSSSFTIFLISI

SEQ ID NO: 282933 - protein, 51 aa, Zea mays
  Clone ID: MRT4577_21131C.1.pep
HSINITQNQGTKKSCNLIGIYSTRSSDTISPYHSQEFQMATSELGKQCISS

SEQ ID NO: 282934 - protein, 63 aa, Zea mays
  Clone ID: MRT4577_21132C.1.pep
KVTTSSHYSTMGGSVKNLRIQLSQQGQRQIRPRLKENITEPADHIFACQTRKLKTLGMNSGPF

SEQ ID NO: 282935 - protein, 104 aa, Zea mays
  Clone ID: MRT4577_21133C.1.pep
LPLPPPARSSPPRAGNRSSVPLDSLLLHLTAPAPTPRRSQQMPTPPHSFLFPAAQALVLAISSHPLPTLAAFLASRRDELLRAMGESNLEVAPCTSAQIPRLAR

SEQ ID NO: 282936 - protein, 73 aa, Zea mays
  Clone ID: MRT4577_21134C.1.pep
SARWTRVQVGRIVHALSHVLLSPLDSHSPSSVFRTPVITSISWLHDGSRDIDVAQVLGTRLIQELSAIFADPY

SEQ ID NO: 282937 - protein, 226 aa, Zea mays
  Clone ID: MRT4577_21135C.1.pep
MSRGGSHGELGQRIDYVFKVVLIGDSAVGKSQLLARFARNQFNLDSKATIGVEFQTRTLNIDARNVKAQIWDTAGQERYRAVTSAYYRGAVGAMLVYDITKRQSFDHVARWLEELRGHADKNIVIMLMGNKSDLGTLRAVPIEDAKEFAERENLFFMETSALEAINVENAFMTVLTEIYRTVSKKNLVANEEPDSSGNSSLLKGTKIVVPGQEPPSTLKATCCMSS

SEQ ID NO: 282938 - protein, 86 aa, Zea mays
  Clone ID: MRT4577_21136C.1.pep
SETCWSVDPLSPSIGPINTTKATQILVGRSFYALDARGAWIDPALYGIRNLVVRSAPYIRIQWHARNSQLYWIVPRPWTLGTTTSP

SEQ ID NO: 282939 - protein, 59 aa, Zea mays
  Clone ID: MRT4577_21137C.1.pep
TWATTLMFRHGKVFVHASCWGHLHVKFVGQRPWAQKFLLAKRYSERKLITPKKIKKTPK

SEQ ID NO: 282940 - protein, 104 aa, Zea mays
  Clone ID: MRT4577_21138C.1.pep
PSVREWYLYCLHDRKYPAVLRTNRATAAGYWKATGKDREVRNGRNGVLVGMKKRLVFYRGRAPRGQKKSWVMHEYRLDGIYAHHFLLVSTRLNLGITIHPWPLL

SEQ ID NO: 282941 - protein, 405 aa, Zea mays
  Clone ID: MRT4577_21139C.1.pep
MATPSLPTQIVEFNYKAIEDKLKRLALEVSHHENNIRFLKSQLNTVEEACVDLGIKLGNYHSSVAAVVNNDTSAQEAEQRTIRSILDQGKTAAGIICQLKVRHHELASKMPLMKDILGFVATLGKVNNDNLSRLLTEYLGMDNMLALVCKTYDGVKGLEKYDKDGIIDNTSGVHGLGRSVGKFLDGRFTVFCLENLRPFSGDVIIDDPQRKLILHRPRLPGGESPPGFLDFAVNMIHLDRAHLRFLTASGHGLRETLFYTLFSHLQVYKTRTDIQSALPLIKDGAVSLDGGLLRPNGSFCLGHSKNLEVKFPVTTDVSSLPENVAEMEEQVKRKNWEKEMVLEDMKREEDLLKQVKELYRKQKQELMDYVTQPAVTQMSRDSPATHSPATPGSNPFGAKLSNKWR

SEQ ID NO: 282942 - protein, 160 aa, Zea mays
  unsure (1)..(160): unsure at all Xaa locations
  Clone ID: MRT4577_2113C.1.pep
LQVVSRQKSYADTHRRXLEFEEGDHVYLKVSPIMGMWRFKVKGKLSPHFIGPFKILKRVGQVAYXLELPNHLADVHDVFNVSXLKKCLRVLEEQLPMDELSDLTYTEYPIKIIDTLTRATRNKMIKMCKVQWSHHVEDEATWEREDELQTEFPHLFPSSS

SEQ ID NO: 282943 - protein, 202 aa, Zea mays
  unsure (1)..(202): unsure at all Xaa locations
  Clone ID: MRT4577_21140C.1.pep
MEQGADSAAARRMARVASHLRPPTSQMEEVAILKGSDCRAKGAAPGFKVAVLGASGGIGQPLSLLMKMNPLVSVLHLYDVVNTPGVTADISHMNTGAVVRGFLGQSQLESALTGMDLVIIPAGIPRKPGMTRDDLFNINAGIVRTLCEGIAKCCPNAIVNVISNPVNSTVPIAAEVFKKAGTYDPKRPIXXVTTLXDVVRAN

SEQ ID NO: 282944 - protein, 49 aa, Zea mays
  Clone ID: MRT4577_21141C.1.pep
SPPKGTPRRMPRRSFTPLSPSRGSPPRALKGWGPRSLPIPIKLSRYLHL

SEQ ID NO: 282945 - protein, 47 aa, Zea mays
  Clone ID: MRT4577_21142C.1.pep
FLFFFIFWFYASSGSLYGEGFIFLNSRGYMVAFPQCPIIVHTYIIFS

SEQ ID NO: 282946 - protein, 161 aa, Zea mays
  Clone ID: MRT4577_21143C.1.pep
MEQGADSAAARRVAILKGSNCRAKGASGGIGQPLSLLMKMNPLVSVLHLYDVVNTPGVTADISHMNTGAVVRGFLGQPQLESALTGMDLVIIPAGIPRKPGMTRDDLFNINAGIVRTLCEGIAKCCPNAIVNVISNPVNSTVPVAAEVFKKAGTYDPKRLL

SEQ ID NO: 282947 - protein, 65 aa, Zea mays
  Clone ID: MRT4577_21144C.1.pep
PTRPPTRTGTRGRRTMVAVPVLYFQIPKFLTRRTDVVCAECFCPFGGLGSDLARAFLRTGARCAH

SEQ ID NO: 282948 - protein, 42 aa, Zea mays
  unsure (1)..(42): unsure at all Xaa locations
  Clone ID: MRT4577_21145C.1.pep
LMPLPIPSRMEATLSAVAGIFMPPSARLTTLCKHFAASTXLE

SEQ ID NO: 282949 - protein, 64 aa, Zea mays
  Clone ID: MRT4577_21146C.1.pep
GTTESTHEGTSHQEDRKGNSQEQTQQARAETRSSRGVDLTGLTGEEDIAAVEQVSPPFNRIHQP

SEQ ID NO: 282950 - protein, 48 aa, Zea mays
  Clone ID: MRT4577_21147C.1.pep
MASQQRARAEGFETALNEAVKNCKALAEAAEQKEAEHVAMSEAISAFC

SEQ ID NO: 282951 - protein, 356 aa, Zea mays
  Clone ID: MRT4577_21148C.1.pep
MARRTSGPKKKLRRGLWSPEEDDKLVNHIAKYGHGCWSSVPKLAGLERCGKSCRLRWINYLRPDLKRGAFSQEEEDLIIHLHSMMGNKWSQIASQLPGRTDNEVKNFWNSYVKKKLRQRGIDPATHKPLPLAAEGISSRTAVFSDAELILSSPAAAAGRHMPPPPVAASAAESYVYSYSHSSGGASDGSLQSLSGYNSNSKQTAADHLGAAAAAGYLQQEQDPAAAAAAADALHCGPSGAPAVVLPSVSSSSTLNSMAGLSPAATTTDEQCTNNCSSCSFHSGLEPWLELGSTSGYYGASAAVDHYGAALDELKWSDYVFDGGYGGQPGQGIYGDSKDAVQFVDANALSSSSWCLN

SEQ ID NO: 282952 - protein, 88 aa, Zea mays
  Clone ID: MRT4577_21149C.1.pep
KTTKFFFSGPTLKGEKEMGSGAFVTLVLQPGDCFHEYTGSPTFWLSRVTGPFGVLPFGPFLDQGFPFHSPRWGIIGGVGPSNIMVFSP

SEQ ID NO: 282953 - protein, 49 aa, Zea mays
  Clone ID: MRT4577_2114C.1.pep
SQSQKVTLVHVYRESKCIYKYDEPIPQPKNIIHAFSHSINVYQSNLPIR

SEQ ID NO: 282954 - protein, 43 aa, Zea mays
  Clone ID: MRT4577_21150C.1.pep
IGLRGLNTHNTTQWEACQQGLARKHLPDHTQGKWDRNYLGGPT

SEQ ID NO: 282955 - protein, 82 aa, Zea mays
  unsure (1)..(82): unsure at all Xaa locations
  Clone ID: MRT4577_21151C.1.pep
SRIKXAHLALALDIGECMSFLVTADQKPGDDVLGVSTLFIKVVNSIRAVICYGGSDTAPLANVAASRIGWASSMQAXRSFRW

SEQ ID NO: 282956 - protein, 58 aa, Zea mays
  Clone ID: MRT4577_21152C.1.pep
VLCLGSSRSNVMVVLLVSDRPCRFGDSSSTVSAYEQSVYDMRIVMHFPTNHYGAFVFQ

SEQ ID NO: 282957 - protein, 103 aa, Zea mays
  Clone ID: MRT4577_21153C.1.pep
GPRKYGFRQKSVGSKDWYFPKWGYKKVYVEPRINNILDPRIAATYEDAARVAPVEGMVKTAMWCLQDRPKMRPFMGKVSKMLEGSVEITEPVKPTIFWVQDDL

SEQ ID NO: 282958 - protein, 345 aa, Zea mays
  Clone ID: MRT4577_21154C.1.pep
MGCKACDKPKPNYRKGLWSPEEDQKLRDYILLHGHGCWSALPAKAGLQRNGKSCRLRWINYLRPGLKHGMFSPEEEETVMSLHATLGNKWSRIARHLPGRTDNEVKNYWNSYLKKRVEAKDQGPSTPAPAASNSDDDSHCVKQRRDDGDTAAGANGPADSGASEPRESSSADDSSCLTDPHACRPHAPVPPKVMFADWLDMDMDYVGGALPSTAPAAPGLLGAAGVATASTGDRDRDQHQVMSMSQGSVQVDGPSGADVSLHGFGDSGAGCWEFQEHFDAIDHMQGGRLLRPALHERLLRPRLDSNPGWSSIVGERICVFFYLHFVRSLGERLACGCKLLSCTYR

SEQ ID NO: 282959 - protein, 60 aa, Zea mays
  Clone ID: MRT4577_21155C.1.pep
IDEWVPNIRSTSSARRYIRAGAHDSNRVFGLVCKPPRLCVDGTHSDTRQASRKSGDGTLP

SEQ ID NO: 282960 - protein, 69 aa, Zea mays
  Clone ID: MRT4577_21156C.1.pep
HDTLPHTQLGIRLEDTLNRQNWYQIQTGIWARLYQAGEGRLCALRGHTVTASMACPEEEASKPTLLNKP

SEQ ID NO: 282961 - protein, 84 aa, Zea mays
  Clone ID: MRT4577_21157C.1.pep
RRKPGLSAGRLKAKPLQILGLFKVLPRLVVLNLNFTFWPFYCKCRSKRDSPSLLRPPRAIMSPLKEKGIDLPMVFCSPTRDIAK

SEQ ID NO: 282962 - protein, 56 aa, Zea mays
  unsure (1)..(56): unsure at all Xaa locations
  Clone ID: MRT4577_21158C.1.pep
TRPVXRRSCSYGAQRKFTTSEQLLILKAGRKGACLNSLAPRHVQQTLRSFRISARP

SEQ ID NO: 282963 - protein, 196 aa, Zea mays
  unsure (1)..(196): unsure at all Xaa locations
  Clone ID: MRT4577_21159C.1.pep
SSSWSPSLRLRSRSSNPPLPPAGRXSVPLPAPANSSSPLDMASCPSVKNILVLDAEGKRVAVKYYADDWPSASSKLAFEKSLFVKTQKTSARAEADVVMFDGYIIVYKFIQDLHFFVTGGDEENELILASVLQGFSDAVGILLRNNVDKRTALENLDLIFLCLDEVVDGGIVLETDGNVIAEKVSGHGLEGAGSFT

SEQ ID NO: 282964 - protein, 206 aa, Zea mays
  Clone ID: MRT4577_2115C.1.pep
MTNRYLKWRRMIKGEHKMIKVEEALLDPDWVLAMQEELNNFKRNEVWTLVPRPKQNVVGTKWVFRNKQDEHGVVTRNKARGKRLYQMDVKSAFLNGPIKEEVYVEQPPGFEDERYPDHSCEEFSRVMTQKFEMSMMGELNYFLGFQVKQLKDGTFISQTKYTQDLLKRFGMKDAKPAKTPMGTDGHTDLNKGVVQTLPGPHKSVAK

SEQ ID NO: 282965 - protein, 94 aa, Zea mays
  Clone ID: MRT4577_21160C.1.pep
GIFSHSHTHLSQKETTYKDQKTHHHSSSPSLTLRKTKSSVTVAAAASDGCLIGEEKKRRRSTQKSIAYINGLSYYAPPFSAFSTSVLASSSARA

SEQ ID NO: 282966 - protein, 77 aa, Zea mays
  unsure (1)..(77): unsure at all Xaa locations
  Clone ID: MRT4577_21161C.1.pep
XXEXPGRPTAVRFLDSLKILSWRFVWMRLPKGWGSWSQTGGLNLKTLKLGFFCNPLITELMIYFCPKFFLNHAPFFL

SEQ ID NO: 282967 - protein, 106 aa, Zea mays
  Clone ID: MRT4577_21162C.1.pep
PTRPTKYATAARRAGYPQWRSPPPPRSPVPPESSAASLLLKTLAPLPRSYICAPCTRTRGSPRAPVAGTGSQSARWRSAHQALLNGLRAAGDSDERGGGQHEVTSA

SEQ ID NO: 282968 - protein, 52 aa, Zea mays
  Clone ID: MRT4577_21163C.1.pep
SARAVFNPLSFFLTWLQHLDRLAPPPCQFLDYPFNCLWRRVFFGLRRFRTGD

SEQ ID NO: 282969 - protein, 84 aa, Zea mays
  Clone ID: MRT4577_21164C.1.pep
WSHQKRGEKGPHWCQGDQGCNKKKKMGPPMGPRLFWTWGRKLRSVKNNWVCALCLLFGDLNCYFETRLICMVIWIGVAFLSHLS

SEQ ID NO: 282970 - protein, 418 aa, Zea mays
  unsure (1)..(418): unsure at all Xaa locations
  Clone ID: MRT4577_21165C.1.pep
GRAGKTSVVVLTTCAPPPPHLLLPLLPSTSLSSSTVPHHCFVSPHPHLRRQHHPSILRACSAPGGAAGMSGATVEEVQIQEALLFSETIKGLKTLRSQLYSAAEYFELAYTQQDEKQAVTNNLKEYAVKALVNTVDHLGSISFKVSSLIDQRFSEATDADLRISCIHQRTQASQACVDREGISQQSLLVTAPKYHKRYILPAQGQSMPSAMPNFREMNKVVVTGRASQMHQVFSAETRAKEKKQPSLRSVSRRPXDSQKLGLPPPRSFRSKLRLTTKQINKKISTVXESCNPSLAYLRSVHVQRRQHSVRIPWHQLRTLHPPTEISDRNHXPSTAPPLTRSASLSKKASLLKTSSVRAQAVSQPQPKKLAPLRTQVDRSDDSKDGERTPKKSKKFLKSILSRRKSRKDEPLPSYFDDY

SEQ ID NO: 282971 - protein, 33 aa, Zea mays
  Clone ID: MRT4577_21166C.1.pep
KKKKKKKKKKKKKKKKKKKKKKKKKKKKPKKKN

SEQ ID NO: 282972 - protein, 74 aa, Zea mays
  Clone ID: MRT4577_21167C.1.pep
LFGGLRSHVSACDSVSEVRARAFWLNPGVWSSGTSHKLLLDLLFHLAILNGSASYVTRNRKLEENKATKERIFY

SEQ ID NO: 282973 - protein, 100 aa, Zea mays
  Clone ID: MRT4577_21168C.1.pep
AWYGSLNICSEDNWPPILTDRAHASTLPPIICSCAEFFSTKGGREQLIHHRTLEEYVVALHWRDVGGSRSDDSDGRYMGFSDTHFPQLADGRRRSSRRRS

SEQ ID NO: 282974 - protein, 85 aa, Zea mays
  Clone ID: MRT4577_21169C.1.pep
LHCKHVRFFLWVSLTGPPLVQQVNPLFSLFFRDKQKKFWLTLACGGVTKGPKLGNWYMGARTPPHQAFKFAPPAYKQVCVPPPPP

SEQ ID NO: 282975 - protein, 109 aa, Zea mays
  Clone ID: MRT4577_2116C.1.pep
MLVHGWSDVHQMMLLVIMCPWVYPDLLSYSIGRTSRCGSSYTHSPSCDVGESHYCFKFLHPLRNAYAVIYVTLCVSHSPIRPWWFSIEYLLLPSIYDKAATLACARAPG

SEQ ID NO: 282976 - protein, 140 aa, Zea mays
  Clone ID: MRT4577_21170C.1.pep
PERRSSYVYCLLHRPFYTRTTIMEFKNTHGSTALHVSHSDTKRPVRTVHVRLALSTISVFFLLLLLYKSQTNHMHANPAGLRFDFAFPFFLKENLILQVLVLAMHDHTNTRTIRRIFYSGTQKKTLWQKQRQQTTLFFFV

SEQ ID NO: 282977 - protein, 91 aa, Zea mays
  unsure (1)..(91): unsure at all Xaa locations
  Clone ID: MRT4577_21171C.1.pep
IHALPSSPSSIISHAPTPHHISSPIFSILVSSPRDFISRTLWKAAFFYPFLARINNNRXNITSNNIWSRRSSILPEFVFSTVLIYNVKSHV

SEQ ID NO: 282978 - protein, 165 aa, Zea mays
  Clone ID: MRT4577_21172C.1.pep
MAQDDPVVSAQWLHEHLGMPDVKFRDILLLSPALLVLDASWYMPVENRDPWKEYQVAHIPGALFFDLDGIVDRTTDLPHMLPSEEAFAAAISELDIKNQDKVIVYDGKGFFSAPRVWWMFRVFGHKKVWVLDGGLPQWQASGFNVEKASPDDDAVLKSIAANRAV

SEQ ID NO: 282979 - protein, 51 aa, Zea mays
  Clone ID: MRT4577_21173C.1.pep
MRTPLFILNAAYDSWQQIGKAVGDWYYDREVPRQIDCPYPCNPTCKNRDDD

SEQ ID NO: 282980 - protein, 311 aa, Zea mays
  Clone ID: MRT4577_21174C.1.pep
MAQDDPVVSAQWLHEHLGMPDVKVLDASWYMPVENRDPWKEYQVAHIPGALFFDLDGIVDRTTDLPHMLPSEEAFAAAISELDIKNQDKVIVYDGKGFFSAPRVWWMFRVFGHKKVWVLDGGLPQWQASGFNVEKASPDDDAVLKSIAANRAVKRVYNGEQTNTISFQTEFQPNLFWALEKVAQNVTAKTYQQIDARAKGRFDGVAPEPREGVRSGHIPGSVCVPFPEMFDGAPPSLLLPADELRRKFQHAGISLDRPIVVTCGSGVTACILALGLYRIGKRDVPVYDGSWTEWEGQSDSDYPKVTAPGTA

SEQ ID NO: 282981 - protein, 75 aa, Zea mays
  Clone ID: MRT4577_21175C.1.pep
PRVFFFFFFFFFFFFFFFFFLQNSGLILLLQRIDQVYGVPRNFGWGINVKSKKAKGDHMTRLIHYSFSTHAKLVL

SEQ ID NO: 282982 - protein, 50 aa, Zea mays
  unsure (1)..(50): unsure at all Xaa locations
  Clone ID: MRT4577_21177C.1.pep
CCSLKSLSRGTNGGSVVLAVKRIDELSSPPPGGGFVKGSAXLXQPKQTRP

SEQ ID NO: 282983 - protein, 197 aa, Zea mays
  unsure (1)..(197): unsure at all Xaa locations
  Clone ID: MRT4577_21178C.1.pep
CFLHRRRKFRDILLLSPALLVLDASWYMPVENRDPWKEYQVAHIPGALFFDLDGIVDRTTDLPHMLPSEEAFAAAISELDIKNQDKVIVYDGKGFFSAPRVWWMFRVFGHKKVWVLDGGLPQWQASGFNVEKASPDDDAVLKSIAANRAVKRVYNGEXTNTISFQTEFQPNLFWALEKVXQNVTAKTYQQIDARAKG

SEQ ID NO: 282984 - protein, 71 aa, Zea mays
  unsure (1)..(71): unsure at all Xaa locations
  Clone ID: MRT4577_21179C.1.pep
MKREKXQRSASLFRAEWYFFXXPRXXAPSGXKNMPEKGPXTRXEGTLKXRQXHLPGXRRXXPESAXRRXXG

SEQ ID NO: 282985 - protein, 1270 aa, Zea mays
  unsure (1)..(1270): unsure at all Xaa locations
  Clone ID: MRT4577_2117C.1.pep
MDPKGKGMVVNDKEKESFLNEPRDDKPTDSGSSHKKKDGKKKRCIKKIVYYDSDESSSSPRDDDYDEKKKPVNSNFXFDYSRIPYNSNAHLLSIPLXNLHTLMERTTPFEVTKCVVTFSLSILVFGRXENGMQFDSTDNPVFINEQVHKNAQATTVLLESLCRDEYNKVSGLDNAKQIWDTLKISHEGNDTTMITKMELVEGELGRFAMIKGEEPTQTYKRLKTLVNKIRSYGSTRWTDHDVVRLMLRSFTVIDPHLVNLIRENPRYTKMTPEEILKKICERAYDSQRGKEQEKSRKREKKKAYKKAKGEAHLGKEWDSDCSSSDSDDEGLATSAFNKSSLFPNERHTCLMAKEKNVSVRETPKYTTSSDDDSSDDEVDYTDLFKGLDIAKVDKINELIDTLNEKDRLLEKQEDILYEEHDKFVSVQKSLALETKRNEMLSSELSVCHESISSLKILNNDLSAKLEVANKSSSCVEHVVICNRCKDFNADACDEHLISISKLNDEVASLNAQLKTCKSDFDKLKFTRDVYTVGRHPSIKDGLGFQKEAKNLTSQRAPIPNKEKGKAPMANIPKRNHAFMYDRKIGSYSNFNKSYIYAGYYDPNAMFASSSTFVHGRSRSRKSNIVHHVPRKVYASGGSSWIIDSGCTNHMTGEKKMFTSYVKNKDSQDSIIFGDGNQVKVKGLGKIAISSEHSISNVFLVESLGYNLLSMVFRRSDGSLAFKGVLDDKLYLVDFSKEEADLDACLIAKTSMGGLWHRRLAHVGMKNLHKLLKGEHDKLETQGTLKRFLRRAQNEFELKQNGVVERKNRTLIDMARTMLGEVKMPERFWSEAINTACHAINRVYLHRLLKKTSYELLTGNKPNVSYFRVFGSKCYILVKKGRNSKFAPKVVEGFLLGYDSNTRAYRVFNKSSGLVEVSSDVVFDETNGSPREQVDLDDVDEDDVPTAAIRTMAIGDDEHGVVTRNKARLVAKGYAQLAGLDFEETFAPVARVESIRILLAYAAHHSFRLFQMDVKSAFLNGPIKEEVYVEQPPSFEDERYPDHVCKLSKALYGLKQAPRAWYECLRDFLIANAFKVGKADPTLFTKTCDGDLFVYQIYVDDIIFGSTNQKSCEEFSRVMTQKFEMSMMGELNYFLGFQVKQLKDDTFISQTKYTQYLLKRFGMKDAKPAKTPMGTDGHVDLNKGGKSVDQNAYWSMIGSLLYLYASRPDIMLSVCMCARYQSNPKECHLVAVKQILRYLVATPCFGIWYCRRFGPAGIVNQPVNLSLRVPA

SEQ ID NO: 282986 - protein, 58 aa, Zea mays
  Clone ID: MRT4577_21180C.1.pep
TGASLPTASCARRDKRGANTRHAVCPFLGARDAVVETRAHTSAIARANTSCGVAHASA

SEQ ID NO: 282987 - protein, 75 aa, Zea mays
  unsure (1)..(75): unsure at all Xaa locations
  Clone ID: MRT4577_21181C.1.pep
PQTNTTGASXCENPIFNPTRSTTPSQLASNXNHPFFFHXHXPYYWFLPGXPXXXXNIXSQQQQQQXLADRAAYSQ

SEQ ID NO: 282988 - protein, 123 aa, Zea mays
  unsure (1)..(123): unsure at all Xaa locations
  Clone ID: MRT4577_21182C.1.pep
GGVFFTAAQVGFGVLVQSSVGGFGGTGHFADDDPDCYMVLCRLRGRLGGGGVVSTLTLFAYLRGGGGSAHINYSRLILSKGAVSNNVQVMGXKTKVYIALVXAXGGETVDTIGSGVHIMHAGV

SEQ ID NO: 282989 - protein, 95 aa, Zea mays
  Clone ID: MRT4577_21183C.1.pep
PPPAPGGGGPPPKPGDPPAPPKIPRPRGRPPKNPLPEGMAPRPPPGVPGLAKKGGPQFSKVGFFLPKGLSPPGRPGGPGKLGQNNILPLFQLFFF

SEQ ID NO: 282990 - protein, 36 aa, Zea mays
  Clone ID: MRT4577_21184C.1.pep
DQPLTQTFSILNPEFVFPKFPGFLNIWLLHFKIVLF

SEQ ID NO: 282991 - protein, 48 aa, Zea mays
  Clone ID: MRT4577_21185C.1.pep
REGARQPWRSAVGDSTSRGLTSSSDRIRRLRAVQHSGECRLQLARDRS

SEQ ID NO: 282992 - protein, 67 aa, Zea mays
  unsure (1)..(67): unsure at all Xaa locations
  Clone ID: MRT4577_21186C.1.pep
QAHILLLLLIYLLPLANPMCXYPIHQPYKIQQAIETRMLPLXPLFLQQPVSLQQQLTLQHLLAHNMM

SEQ ID NO: 282993 - protein, 71 aa, Zea mays
  Clone ID: MRT4577_21187C.1.pep
AHGGGDLFSVSSSWSICCQEEMIYLAGAVLACWLPRGSLKYLVLLTSLQLSREQVIYDGNVCLVMKYYYFR

SEQ ID NO: 282994 - protein, 174 aa, Zea mays
  unsure (1)..(174): unsure at all Xaa locations
  Clone ID: MRT4577_21188C.1.pep
MADKGLEDVPEGQIESNYDETVDSFDDMNLKSELLRGVYAYGFERPSAIQQRAIMPVIKGHDVIAQAQSGTGKTATFSISVLQKIDTNVKQCQALILAPTRELAQQIQKVVVAIGDFMQIECHACIGGTSVREDMKALQDGPQVVVGTPGRVQDRIQRRFLXDDSMKMFVLDEA

SEQ ID NO: 282995 - protein, 132 aa, Zea mays
  Clone ID: MRT4577_21189C.1.pep
PTSKHSTRQIDHFFLAAAFVTLGSSWVLLLHTLDDCHTSHIAVKFAELVTKIDRRSGKELEKEPKFLKNGDAGMVKMVPTKPMVVETFSQYPPLGRFAVRDMRQTVAVGVIKSVEKKDPTGAKVTKAAAKKK

SEQ ID NO: 282996 - protein, 676 aa, Zea mays
  Clone ID: MRT4577_2118C.1.pep
MARTMLGEFKTPERFWTEAVSTACHAINRVYLHRLLKKTSYELLTGNKPNVSYFRVFGSKCYILVKKGRNSKFALKAVEGFLLGYDSNTKAYRVFNKSSGLVEVSSNVVFDETNGSPREQVVDLDDVDEEDVPTAAIRTMAIGDVRPQEQKEQDQPSSTTMVHPPTQDDEQVHQEEACDQGGAQDDHVMEEEAQPAPPTQVRATIQRDHPVDQILGDISKGVTTLSRLVNFCEHYSFVSSIEPFRVEEAFLDPDSVLAMQEELNNFKRNEVWTLVPRPKQNVVGTKWVFRNKQDGHGVVTRNKVMPKSQSAFLNGPIKEEVYVEQPPGFEDERYPDHVGKADPTLFTKTCDGDLFVCQIYVDDIIFGSTNQKSCEEFSGVMTQKFEMSMMGELSYFLGFQVKQLKDGTFISQTKYTQDLIKWFGMKDAKPAKTPMGTDGHTDLNKGGKSVDQKAYRSMIGSLLYLCASRPDIMLSVCMCARFQSDPRECHLVAVKRILRYLVATPCFGIWYPKGSTFDLIGYSYSDYAGCKVDRKSTSGTCQFVGRSLVSWSSKKQTSVALSTAEAEYVAAGQCCVQLLWMRQTLRDFGYNLSKVPLLCDNESAIRMADNPVEHSRTKHIDIRHHFLRDHQQKGDIEVFYVSTENQLADIFTKPLDESTFCTLRSELNVLDSRNLD

SEQ ID NO: 282997 - protein, 78 aa, Zea mays
  Clone ID: MRT4577_21190C.1.pep
NGGCRSHQECGEEGPTWSQGYEGCCQKKMIYLSGPVLACWLPRGSLKYLVLLTSMQLSGEQVFYNGNVCLVIKNYTFR

SEQ ID NO: 282998 - protein, 83 aa, Zea mays
  Clone ID: MRT4577_21191C.1.pep
RDSWTGLGPPNNTDTSAVSPHVKVLTALRGIDSFSSTRFECCPQALITRPTRRRELVPEKTCSGHLSADKRPSGYPLDPGTAS

SEQ ID NO: 282999 - protein, 202 aa, Zea mays
  Clone ID: MRT4577_21192C.1.pep
GRNTVLHPKYPDVQALTATMNRHRHSRCHYKWNSGSTPAGMNNLHIGEPAGRQTPGDSPATSAAAAMGPRADASAGRLSFVSPLEGREPDIKAKEPEVGPRVALTVSSAEKLSPAGTTLAPVAASTCPPTPHQRAPVAPKRNDMSLLPSSLQKREWDRPRIRVPPSRRTTCCETLRCGWPPSLGQRAECCTLAGQQHFAFPN

SEQ ID NO: 283000 - protein, 82 aa, Zea mays
  Clone ID: MRT4577_21193C.1.pep
GIDRRSGKELEKEPKFLKNGDAGMVKMIPTKPMVVETFSAYPPLGRFAVRDMRQTVAVGVIKSVEKKDPTGAKVTKAAAKKK

SEQ ID NO: 283001 - protein, 231 aa, Zea mays
  Clone ID: MRT4577_21194C.1.pep
GWALVPVKEPKRPSDKPLRLPLQDVYKIGGIGTVPVGRVETGVIKPGMVVTFGPTGLTTEVKSVEMHHEALQEALPGDNVGFNVKNVAVKDLKRGYVASNSKDDPAKEAASFTSQVIIMNHPGQIGNGYAPVLDCHTSHIAVKFAELVTKIDRRSGKELEKEPKFLKNGDAGMVKMVPTKPMVVETFSQYPPLGRFAVRDMRQTVAVGVIKSVEKKDPTGAKVTKAAAKKK

SEQ ID NO: 283002 - protein, 149 aa, Zea mays
  Clone ID: MRT4577_21195C.1.pep
FPDTRHSTLLPHVHIEERERKAPDIICALRCPLMRADGTLNSSTHRRPPSLEKTYSTSMNLETEKKCETNTRSISSTSSASEWHPPLLSLLSTNNANTSSPSLTMRTVSVSIRPPFPKPTVAPENVPNFITPRSFHKGQTPHNYITLLL

SEQ ID NO: 283003 - protein, 96 aa, Zea mays
  Clone ID: MRT4577_21196C.1.pep
THHHTHFSWIGTGDFLGARKRSRGGPLLYLHRSDARTTWSVGNGPVHSDQQAKQPSTKALNLLPSDPHNTDQAWRHLLPILRADHNTPISVPTPQY

SEQ ID NO: 283004 - protein, 189 aa, Zea mays
  Clone ID: MRT4577_21197C.1.pep
MSSSKDAPLSPRSQLALSCFEELLDCAVADVASECHRIARLGLDRSVDGEEEELRVWAARAAASAAGGDHHHPGGGGAAEEGGSKGGVDVFGQTHPAIAADVVECMNCGRPVVAGRFAPHLEKCMGKGRRARTKITRSSTAGRMRSSNGSVATPYSPYSTTANPNRASIPNGVTDGGGGVRGDYSNHAP

SEQ ID NO: 283005 - protein, 55 aa, Zea mays
  Clone ID: MRT4577_21198C.1.pep
PERTPTRGRDTHKDSYIEHPWKPTLRTATPSRARKHDDQAHGLRSGTHHKQTTVV

SEQ ID NO: 283006 - protein, 75 aa, Zea mays
  Clone ID: MRT4577_21199C.1.pep
LSFYFFFFYYLFFFFLGIINQAIPSLVISKLQALHENKCPNDVIQTGMPQTLDPNGRYTVTFQTLKTPYILKPSL

SEQ ID NO: 283007 - protein, 94 aa, Zea mays
  unsure (1)..(94): unsure at all Xaa locations
  Clone ID: MRT4577_2119C.1.pep
HKYDMEPQSDNWAKYGKIXPERTQKYVAKSRQVXELDNDHAMSMTTMSAIAGLISSSSKEKNKPAPXVKPSDDRRTLYDRTEMXNVIFKFLRKQ

SEQ ID NO: 283008 - protein, 213 aa, Zea mays
  Clone ID: MRT4577_211C.1.pep
LRFDGALIVDVNEFQTNLVPYPRIHFMLSSYAPVISAEKAYHEQLSVAEITNSAFEPSSMMAKCDPRHGKYMACCLMYRGDVVPKDVNAAVATIKTKRTIQFVDWCPTGFKCGINYQPPSVVPGGDLAKVQRAVCMISNSTSVVEVFSRIDHKFDLMYAKRAFVHWYVGEGMEEGEFSEAREDLAALEKDYEEVGAEFDEGEDGDEGDEYYSS

SEQ ID NO: 283009 - protein, 79 aa, Zea mays
  unsure (1)..(79): unsure at all Xaa locations
  Clone ID: MRT4577_21200C.1.pep
RQPQXXRQSPSAGSGEDNAGAIVMRALAISFMRLAEVPLCLFLWARRSHCYVKHEEISTGVFRYFASICSLFGNWILLA

SEQ ID NO: 283010 - protein, 57 aa, Zea mays
  unsure (1)..(57): unsure at all Xaa locations
  Clone ID: MRT4577_21201C.1.pep
FRIWFAAKQSKQGLSIFRLDQSSFRRGPSPLFACFYENKKSWILIRILXTRGSGRFS

SEQ ID NO: 283011 - protein, 47 aa, Zea mays
  Clone ID: MRT4577_21202C.1.pep
IASCSWGPRFLYALESCMQTMTRSSVAQICITYAVVRCNNHRRSNDN

SEQ ID NO: 283012 - protein, 283 aa, Zea mays
  Clone ID: MRT4577_21203C.1.pep
MAMAPPPACSLFPRVAAAAPSSVTSNSVLTSRGPGILPSPRLAFARRHLSAAWSSKAAASASVEIQDDYTDEMDAVNIAQDVTQLIGKTPMVYLNRVADGCVANIAAKLEYMGPCRSVKDRIGLSMINDAEEKGLISPDKTILVEPTTGNTGVAIASVAAARGYKLIATMPSSLDVERRILLRAFGAEIVLTDPTKGLKGAFDKAEEIVLRTPNAYMFQQFNNEANSEIHFQTTGPEIWEDTLGSVDILVASIGTGGTISGTGRYLKRMNKDIKVPTFAWINF

SEQ ID NO: 283013 - protein, 39 aa, Zea mays
  Clone ID: MRT4577_21204C.1.pep
LTFYKSRKVETLQSLYIKPSLSFSRTGNALPASRTERVL

SEQ ID NO: 283014 - protein, 65 aa, Zea mays
  Clone ID: MRT4577_21205C.1.pep
LNLVTRSVKLLDAQIELVNFGPPRPAAQSFKFFYFSYFVFFIPLFFFKFPLFFPTRPRTRGRTRG

SEQ ID NO: 283015 - protein, 65 aa, Zea mays
  Clone ID: MRT4577_21207C.1.pep
MFLVDWFYGVLASLGLWQKEAKILFLGLDNAGKTTLLFCPWRCCFRRRVEIKSGRDMAAAWKGLW

SEQ ID NO: 283016 - protein, 193 aa, Zea mays
  Clone ID: MRT4577_21208C.1.pep
MFLVDWFYGVLASLGLWQKEAKILFLGLDNAGKTTLLHMLKDERLVQHQPTQYPTSEELSIGRIKFKAFDLGGHQIARRVWKDYYAKVDAVVYLVDAVDKERFAESKKELDALLADDSLANVPFLILGNKIDIPYAASEEELRYYLGLSNFTTGKGNVNLADSNVRPLEIFMCSVVRKMGYGEGFKWMSQYIK

SEQ ID NO: 283017 - protein, 193 aa, Zea mays; identical to SEQ ID NO: 283016
  Clone ID: MRT4577_21209C.1.pep

SEQ ID NO: 283018 - protein, 693 aa, Zea mays
  Clone ID: MRT4577_2120C.1.pep
MDPKGKGIVINDKEKESFVNEPRDDKSNNSGSGHKRKDGKKKKTRRIKEIVYYDSDESSSSQKDDDNDYRKTVNSNFSFDYSRIPHSSNSHLLSIPLGKPPHFDGEDYGFWSHKMRSHLFSLHPSIWEIVENGMKFDSSDSPMFINEQIHKNAQATTVLLASLCREEYNKVSGLDNAKQIWDTLKISHEGNDITMLTKMELVEGELGRFAMIRGEEPTQTYNRLKTLINKIRSYGSTRWTDHDVVRLMLRSFTVLDPHLVNNIRENPRYTMMTPEEVLGKFVSGRMMIKEARYVDDALNGPLHESQPIALKATRSKEALPSKVAQIEAAGLNDEEMALIIKRFKTVLKGHKGQPSKTKTKGKRSCFKCGKIGHFIANCPDNDSDQEQGNKREKKKNYKKAKGEAHLGKEWDSDCSSSDSDNEGLAATAFNKSALFPNEHHTCLMAREKKVITHNANTYDSSSDDESSEDEIDYSSLFKGLDRTKIAKINELIDALNEKDRILEKQEDLLYEEHDKFVSAQNSLALEVKRNGILSGELSTCNETISSLKGEIDVLTAKLEVASNSCVENITICTRCKDFDVNACSEHLVSISKLNDEVASLNAQLKTSKSEVDKIKFARDAYTVGRHPSIKDGLGFKREAKNLTSHKAPILVKEKGKAPMASSAKRNHAFLYHDKRHARNAYNNFDSHAYDSHA

SEQ ID NO: 283019 - protein, 65 aa, Zea mays
  Clone ID: MRT4577_21210C.1.pep
LSQLVARFQRFTSSHATYCHATVYHQLRPFRQGMVIMNMLACTFDYTIMCTWMMHTMVSDRYIRF

SEQ ID NO: 283020 - protein, 88 aa, Zea mays
  unsure (1)..(88): unsure at all Xaa locations
  Clone ID: MRT4577_21211C.1.pep
HKNKAGSPLFIYLWGRMNDPRQAFIFLLCLLWGGGGATSPSHMHYALGGGGEGIIPPSKNHGLLPTPLLVARKAGALLXLPQQLTFNL

SEQ ID NO: 283021 - protein, 52 aa, Zea mays
  Clone ID: MRT4577_21212C.1.pep
QSVHIPSIGYDKSDKVTAAEFILPQLSRTDRSLGNQATSIHGACQVAELSES

SEQ ID NO: 283022 - protein, 51 aa, Zea mays
  Clone ID: MRT4577_21213C.1.pep
KKVSIPCSRQKRGTWQPGNFRKISGQASEKAGLKKGYEPPQSVCTTISCSI

SEQ ID NO: 283023 - protein, 302 aa, Zea mays
  unsure (1)..(302): unsure at all Xaa locations
  Clone ID: MRT4577_21214C.1.pep
MSAGWRTLLLRIGDRCAEYGGSADHKEHIETCYGVLSREYEHSRDAIFEFLLQCTEQLPHKIPFFGVLIGLINLENEDFSKAIVDTTQANLEDALHNENRDRIRILLRFLSGLMCSKVVVPSSIIETFETLLSSAVTILDDETGNPSWQPRADFYVYCILASLPWAGPELFEQVPDEFERVLFGIQSYISIRRHFDDIAFSVFETDEGHSPNKKDFMEDLWERIQALSRNGWKVKSVPKPHLPFEAQLVAGKSHRLSPISCPXHPLPRSHLLEMLKGQEKHEADMKYPQRLRRLHIXPMNKA

SEQ ID NO: 283024 - protein, 61 aa, Zea mays
  Clone ID: MRT4577_21215C.1.pep
VYLLIISLIFARTVSRAREEINACFLLSFYCFKKKLYFFLLINLIINPYFYLLIIKKGRPF

SEQ ID NO: 283025 - protein, 82 aa, Zea mays
  Clone ID: MRT4577_21216C.1.pep
FYFFFFFFFFFFFFSFFFFFFFFFFFTYNYFLFLSHNIKHVLSRYTYIDAVVLVLIKRVKYISWALKQRWFMPYILGRRKYA

SEQ ID NO: 283026 - protein, 55 aa, Zea mays
  Clone ID: MRT4577_21217C.1.pep
NVITADSFVTDLSSFFIFIATIYSCMLYFLFILAAKASQCLVMFSESCTLCPRWY

SEQ ID NO: 283027 - protein, 82 aa, Zea mays
  Clone ID: MRT4577_21218C.1.pep
GIKSKLGKRPTCRAAYHVITLTLSDCMHGHQERHVHRRNHGAYANTALGHLQNILHQGGGERHSRAEQEVLQEAAPPILEKY

SEQ ID NO: 283028 - protein, 124 aa, Zea mays
  unsure (1)..(124): unsure at all Xaa locations
  Clone ID: MRT4577_21219C.1.pep
GRVGESTEGGGGGGGDQADDDCEYAFPEITKWEAIAWLAIFTAWISVFSDFLVGAIEGAAKAWKIPVAFISTVLLPIVGNAAEHASAVMFAMKDKLDLSLGVAIGSXTQISMFVIPFSVKAGWM

SEQ ID NO: 283029 - protein, 137 aa, Zea mays
  unsure (1)..(137): unsure at all Xaa locations
  Clone ID: MRT4577_2121C.1.pep
MSAYCGKYKDELIKSAAYIGTHGKGILAADDFSETMGNRLSSINXDNPEENRRALHKLLFCCPDTIHYISSGILYQDTLYQNTKDGKPFDDVLKEGGILADIKVDKGTIEAAGTGNGNPTHGRDDLDKRCHHYYEGR

SEQ ID NO: 283030 - protein, 160 aa, Zea mays
  unsure (1)..(160): unsure at all Xaa locations
  Clone ID: MRT4577_21220C.1.pep
AVSSVCGDTDLHPYRIRRAIAAGILPLSPMFLHRPSGVLQQLPLVHLLAQKVRAHHLLRLVLGTLSADCQXDQFLPFNRLAALVLAAYVQQRFRFSQLDPEYQQQFLPFNHVAACETTXLYLQXPQRPPVSHAXADVSPQPFSPQRQLLSLALQSAPNGW

SEQ ID NO: 283031 - protein, 102 aa, Zea mays
  Clone ID: MRT4577_21221C.1.pep
MSGGVGLMFLLPEPKPGVGLNVVVKDIKWPNYTPGYETKDPDFLAAFLVTPNFGVPPEKPGPAVPAESFTGPWPTVWPVGLTSFDRSKGQCYNIGPVLGDPN

SEQ ID NO: 283032 - protein, 433 aa, Zea mays
  Clone ID: MRT4577_21222C.1.pep
MARHFKYVILGGGVAAGYAAREFAKQGVNPGELAIISKEPVAPYERPALSKGYLFPQNAARLPGFHTCVGSGGERLLPEWYSEKGIELILSTEIVKADLASKTLTSAAAETFTYETLLIATGSSVIKLTDFGVQGAESNNILYLRDIADADKLVAAMQAKKGGKAVIVGGGYIGLELSAALKINNFDVTMVYPEPWCMPRLFTAGIAHFYEGYYANKGIKVVKGTVAVGFDADANGDVTTVKLKNGSVLEADIVIVGVGGRPLTRLFIGQAADEKGGLKTDAFFETSVAGVYAIGDVATFPLKLYNEQRRVEHVDHARKSAEQAVRAIKAKESGESVAEYDYLPYFYSRSFDLAWQFYGDNVGDDVLFGDNDPASAKPKFGSYWVKDGKVVGVFLEGGSAEENQAIARVARAQPPVADVQALKQEGIDFASKI

SEQ ID NO: 283033 - protein, 54 aa, Zea mays
  Clone ID: MRT4577_21223C.1.pep
MEVVYLYVLMMFYRWISGIVHVYLLILFLTSTKILYVYCNKIENRTLNVPLPFS

SEQ ID NO: 283034 - protein, 188 aa, Zea mays
  unsure (1)..(188): unsure at all Xaa locations
  Clone ID: MRT4577_21224C.1.pep
IYLVGKTYVFRPDTRKAAYLAAMRXVTASYRSAYNDLLKVYRESDEAEERGRVLSTLCFCKDENIVLESLNLLFTNEFRKQDAYYVLQGLDVETRDTAWVWLKDNWDRVTRKYGDTQAGGFIRYVVTLFTSNEKAAEFSRFFATRKKPEFERTLKQSLENVRISARWIQGIKSEPRLAQTVQELLRRP

SEQ ID NO: 283035 - protein, 248 aa, Zea mays
  Clone ID: MRT4577_21225C.1.pep
MVLIELEPEEATRPSLPVAEEQAVAGDAARPSSSAAPEEEEAAAGGKASRAPEEEEDAFEDALTDEQLREKARIQANDAKAEGNKLFGAGQYEEALSQYEISLQIAAELESAEDIRAACHSNRAVCFLKLGKHDETIKECSKALELNPSYLKALLRRAEAHEKLEHYDEAIADMKKVVEVDPSNQQATRSLFRLEPLAAEKREKMKEEMIAKLKDLGNSVLGRFGMSVDNFKAVKDPNTGSYSIQFQK

SEQ ID NO: 283036 - protein, 51 aa, Zea mays
  Clone ID: MRT4577_21226C.1.pep
ELCILVDVIRGLNCLFCGFRGWHFVFCLCYLKVYVCLCECDFGRKGGVSVR

SEQ ID NO: 283037 - protein, 56 aa, Zea mays
  Clone ID: MRT4577_21227C.1.pep
TCQVVKGRVDQEAAQQSKAMENNAIRTETQHQLEIKCKKFKLSLLRKLRRHQQHTK

SEQ ID NO: 283038 - protein, 217 aa, Zea mays
  unsure (1)..(217): unsure at all Xaa locations
  Clone ID: MRT4577_21228C.1.pep
MDRSINFRGIAGSAGNIMQGMGKFVFGNEGLDSKEDSYVERYLDRISNGTIPDDRRSAMTELQSLVAESRLAXMSFGAMGFPILLNIFKEDREDVELVRGALETFVSALTPIEMSQGPKTEVQPASVNSDLLSRETENISLLLSLLSEEDFYVRYYTIQLLTALLTNSLKRXQLQEAILLIPRGITVLMDMLMDREVFDRYFYLKRIETSHPCSPVM

SEQ ID NO: 283039 - protein, 146 aa, Zea mays
  Clone ID: MRT4577_21229C.1.pep
SITLEGESSDTIDNVKEGIPPDQQRLIFAGKQLEDGPTLADYNIQKENTLHLVLRLKGGMPIFGKTLTGKNITLEGENFDTIDHGKGKNQDQEGISPKQQRLNFACKQLEEGRTLADYNIQKENTLQLGLRLKGGMQNFGKNLTGK

SEQ ID NO: 283040 - protein, 672 aa, Zea mays
  Clone ID: MRT4577_2122C.1.pep
MDPKGKGIVINDKEKESFVNEPRDDKSNDSGSGHKRRDGKKKKTRRIKEIVYYDSDESSSSQKDDDHDKQRKPVNSNFSFDYSRIPQSSNSHLLSIPLGKPPHFDGEDYGFWSHKMRSHLFSLHPSIWEIVDSGMHFNSSDSPIFINEQIHKNAQATTVLLASLCRDEYNKVSGLDNAKQIWDTLKISHEGNDATLLTKMELVEGELGRFAMIRGEEPTQTYNRLKTLINKIRSYGSTRWTDHDVVRLMLRSFTVLDPHLVNNIRENPRYTKMSLEEVLGKFVSGRMMIKEARYVDDALNGPINEPQPFALKATGNKEALPSKVAQIEAAGLNEEEMALIIKRFKTVLKGRNGQPSKTKTKGKRSCFKCGKLGHFIANCLDNDSDQEKGNKREKKKHYKKAKGEAHLGKEWDSDCSSSDSDNEGLAATAFNKSTLFPNECHTCLMAREKKVCTRNSTYASSSEDESSDEDEVDYSCLFKGLDRSKIDKINELIDALNEKNILLEKQEDLLYEEHDKFVEAQKSYALEVKRNEMLSFELSTCHETISTLKGVNNDLNAKLEVANKSNSCVENVVICNRCKDFDIDACSEHIASIAKLNNEVASLNAQLKTSKSEFDKLKFARDAYTIGRHPSIKDGLGFKREAKNLTSHKTPISTKEKGKAPVANSVKKNHAF

SEQ ID NO: 283041 - protein, 101 aa, Zea mays
  Clone ID: MRT4577_21230C.1.pep
ETACYFYAGVPPSLRQSPLAEKCPPLRSPCWSTPPAEGFHVARRLYTKRCQALTCAVSTPWLNRAPLGGPAMPYEDHTLPRANIKWTPEAGPPPGWLRSMT

SEQ ID NO: 283042 - protein, 86 aa, Zea mays
  Clone ID: MRT4577_21231C.1.pep
EEVSTLSDAAALHSYPKEHIVAVAKGLALPRRMLMSGYTSNINLDRKEESPDINSCEKLNLNRSSGDELMDEDVMERKHCRFLYQT

SEQ ID NO: 283043 - protein, 97 aa, Zea mays
  Clone ID: MRT4577_21232C.1.pep
TDPFFHWSTTTQGARGERKNAHASQELYDQQSGHLKFPVLKANTGLTHRTPSIFVRGQLGQINTSRFLLAHTIDDYNNNRISYVTVKLTSHARILID

SEQ ID NO: 283044 - protein, 62 aa, Zea mays
  Clone ID: MRT4577_21233C.1.pep
LTEYYWESNSRRLIRTPTLALVTCLEDKLGQPGAWKLNYTARTQTRETLLGYLRTDRAVSTK

SEQ ID NO: 283045 - protein, 46 aa, Zea mays
  Clone ID: MRT4577_21234C.1.pep
SPYGERINVERNHRKNAKSLSSNETSTGGVPLSAVSRPSSYEWSQQ

SEQ ID NO: 283046 - protein, 44 aa, Zea mays
  Clone ID: MRT4577_21235C.1.pep
ACNVAVERRYSQRVAARNSLMSWRIVLNNDTQVAPSVWDTFLWL

SEQ ID NO: 283047 - protein, 101 aa, Zea mays
  Clone ID: MRT4577_21236C.1.pep
LETSRGGLSDGRAGSRRRVTWRSFTPPANNLHYSHGAPRARVPSPAPISATLPVTKVPLDVAGHAFAAALSPYSLFSGGESMDTELSGTGSKEGRGTVTSD

SEQ ID NO: 283048 - protein, 83 aa, Zea mays
  Clone ID: MRT4577_21237C.1.pep
FWILHISLSSVTLSLTYIRCITSTCDVGDSVQLVSIYLNALLCVITLSIKHLLVKCSYGNSRPLRAPLARWCIHGMLCTWEVG

SEQ ID NO: 283049 - protein, 95 aa, Zea mays
  unsure (1)..(95): unsure at all Xaa locations
  Clone ID: MRT4577_21238C.1.pep
DVGTLTSRALVGKPATSTRDVFGEVRVTVRXTAGKPKPAASGSPXWYGXADRVVYLGPLSGQAPSYVAGEFPGEYGWDSAGVSAEPESFAKNREL

SEQ ID NO: 283050 - protein, 90 aa, Zea mays
  Clone ID: MRT4577_21239C.1.pep
IKRTCRHFQGVETVKADLSSNKVTVTGKLDAEKLRDKIAERTKKKVDIISAQTKKEAAATENPPEKKVEEKKPEEKKPEEKPKESMVVLK

SEQ ID NO: 283051 - protein, 669 aa, Zea mays
  Clone ID: MRT4577_2123C.1.pep
MGTKARRSDGSLAFKGVLDDKLYLVDFSKDESDLDACLIAKTSMGWLWHRRLAHVGMKNLHKLLKGEHVLGLTNVCFEKDGPCAACQAGKQVGSTHYSKNVMTTSRPLELLHMDLFGPVAYLSIGEDKSETQGTLNRFLRRAQNEFELKVKKIRSDNGSKFKNLQVEEYLEEEERKNRTLIDMARTMLGEFKTPERFWSEAVNTACHAINRLYLHRLLKKTSYELLTGNKPNVSYFRVFGSKCYILVKKGRHSKFAPKAVEGFLLGYDSNTKAYRVFNKSSGLVEVSSDVLFDETNGSPREQVDLDDIDEDDVPTAAMRMMAIGDVRPQEQQEQDQPSISTMVHPPTQDDEQEELNNFKRNEVWNLVPRPKQNVVGTKWVFHKKQDEHGVVTRNKARLLAKGYAQVAGLDFEETFAAVARLESIRILLAYAAHHSYRLFQMDVKSAFLNGPIKEEVGKADPTLFTKTYDGDLFVCQLYVDDIIFGSTNQKSCEEFSRVMTQKFEMSMMGELTYFLGFQVKQLKDDTFLSQTKYTQDLLKRFGMKDAKPAKTPMGIDGYVDLNKRGQCCAQLLWMMQTLRDFGYNLSKVPLLCDNESVIRMVDNPIEHSRTKHIDIRHHFLRDHQQKGDIEVYHISLENQLADIFTKPLDEKTFCRLHSELNVLDSRNLD

SEQ ID NO: 283052 - protein, 77 aa, Zea mays
  Clone ID: MRT4577_21240C.1.pep
SPVTQLFVWARSCTHNGPYLPLRLKMYRSCKYYQHGRQLAPSSHKSTLSLQQVEASGIGQLLGTGVRTADGVHSLRF

SEQ ID NO: 283053 - protein, 151 aa, Zea mays
  unsure (1)..(151): unsure at all Xaa locations
  Clone ID: MRT4577_21241C.1.pep
PGTVSLREARSQKRKATSPTPQEDELDQEIRNMEMLHQQVQKKKEKMARLADLQRQIDEAIEEVRHLAQDEQERRPQHRELHQEGLFDDDGWXDDSHHENFAFDDASPLSTELQATPWPPSYKPPXLPMYDGHSDPKQFLMSYEATISSYG

SEQ ID NO: 283054 - protein, 44 aa, Zea mays
  Clone ID: MRT4577_21242C.1.pep
DSLDHSKVFRVSSVGNNLDELIDRLVPKSSASRDSPCTHFPNVK

SEQ ID NO: 283055 - protein, 297 aa, Zea mays
  Clone ID: MRT4577_21243C.1.pep
MTKKAKRLDTPSEMMIPSPAGKMGCQTRLLLWEPSCYRARHWGATESNRRGKGRLLYIPSRLQSASIHPAVSGQPRGRVRVDLSVEGMKITALLVLKPSTSGAGSSSSGGQSGPEAVVLANATDVSHFGYFQRSAAREFIVFVARTVAQRTQPGQRQSVQHEEYKVHSHNRNGLCAVAFMDDHYPVRSAFSLLNQVLDEYQKAFGDSWKSATADGTQQWAFLTDALARFQDPAEADKLMKIQRDLDETKIILHKTIDSVLARGERLDSLVEKSSDLSAASQMFYKQAKKTNQCCTIL

SEQ ID NO: 283056 - protein, 56 aa, Zea mays
  Clone ID: MRT4577_21244C.1.pep
GLLINLIYFLPFSFSYFTLYISFYSYFLKSLFYNLYFFLFLLFYFFYFFFYLFFFF

SEQ ID NO: 283057 - protein, 109 aa, Zea mays
  Clone ID: MRT4577_21245C.1.pep
KTLQKKFWFFTIPCKVPRSWGVGDLKITCKGPLILLKRVDPPFPKKNFCFPPKNWQLGPSKNLKWLNQMPRAVFFFKTNKKNKKWTKKKKKKKKKKKKKNHGAPSRGSP

SEQ ID NO: 283058 - protein, 65 aa, Zea mays
  unsure (1)..(65): unsure at all Xaa locations
  Clone ID: MRT4577_21246C.1.pep
RTFYHILPHKMTETVSPPRSXAATRSXRSEQSHARPSLSIDLSSIRALSQTSLRSTRSLVTSSST

SEQ ID NO: 283059 - protein, 93 aa, Zea mays
  Clone ID: MRT4577_21247C.1.pep
IKPVPNTSPSHLVSLIKIHVKVPNLKQTALTLSWSISQKICPIKVPNQKRLKNQPYSLASLPFFLFHLKYIWIERPKKTITTLPHCLKIMDCH

SEQ ID NO: 283060 - protein, 242 aa, Zea mays
  unsure (1)..(242): unsure at all Xaa locations
  Clone ID: MRT4577_21248C.1.pep
HSLLILSFRTDSKTLKEEQREELFESLKANSSIGWEVDVICPKDLSAKMLKRSKVNLNEISHNSAMGLVRKVLRMGVLLAEVYVDTVGDPEKYRTKLTEKFIGIKFVVXKKADSLYPVISGASIVAKVTRDRALRNWVFDETALSLHMRTRSGYLGDPDTKRWLEDHKHLVFGFFKTQXRCDWESDKVDQEEIDSGDTKRQVKLLSLGFTGFKRKTEEIESTGXGCCKFFQVHKLELVRKFP

SEQ ID NO: 283061 - protein, 71 aa, Zea mays
  Clone ID: MRT4577_21249C.1.pep
GEKHSALSFLLRFWHLFPCSVSTMTYPFFPKAPLCLARAKTLARMGDTSTRKRQPGDCWPGGCGTGNTGCG

SEQ ID NO: 283062 - protein, 394 aa, Zea mays
  Clone ID: MRT4577_2124C.1.pep
MGKAFSLLRPPQPPREDDTEMMELRKRPRPRRLDPDFLSSPPPMPPRKRARKQAAAPKPVEAAGALKWQPPRKGSRRATVGIGCPVAGLHPATCGRQPPLRMSTRVLFRPRHPFNWYEPDLWTEVAKHLCGFDLLRLSLTCRWFHRLLADDSIWRYAFFRDLNLTDANPHVHRPLSRSWRYLYFAAFDGSHAFSLCQNGEHRSSWRIGSFVLDSPHMVLIGKLPLPKWLPSCPEDVRLTIAILGACKLLNVRPGIWITDMHVMRCPLCKRNSCRGNKQILDARHSELFLEKAYWDETLEYESLGEHFQDEEVAAAFCAVVNAKQFASPSTASVLNRAWTGKHDDPMTRHCASATAAAIHTNLQSNGGLLSTFEAMRDTARDGQIVSIRISQVLF

SEQ ID NO: 283063 - protein, 237 aa, Zea mays
  unsure (1)..(237): unsure at all Xaa locations
  Clone ID: MRT4577_21250C.1.pep
MDIDPSSVSHADGGGDLWPFDSLTTSLFFSSVSSSPPLHPLPVASSSWLTPPSPLWLFEDRQMMPIEVGPAPAAAPDNTAAVAEEAQRARSGNSDTPIKKTERLNNKWQFNLALHDDSTNSSCLFKEKLTHALRYFKESTDQHLLVQVWAPVKSGDRYVLTTSGQPFVLDHQSIGLLQYRAVSMMYMFSVDGDNAGELXLPGRVYKQKVPEWTPNVQYYSSTEYPRLNHGISYNVHG

SEQ ID NO: 283064 - protein, 131 aa, Zea mays
  Clone ID: MRT4577_21251C.1.pep
SRTRQSRKLNLIINRLIQPHRQTNVNHTQTHTLMLPMRRHRLTIKITPIRPPIKSSSIIRINMNRSSTKRNTPNTTRMRHTKPHRPTISRQRPHILRRTLPILHHRHPMIPHSHIRITVLMRQRHITRTST

SEQ ID NO: 283065 - protein, 122 aa, Zea mays
  Clone ID: MRT4577_21252C.1.pep
MYGSPVSKDLNVPVQPPMISSGLLRYRSAPSTVLGDLCEDFLPSASGAASPDNVFSRFLAEHHTRDDKPSPPPPAPAAVHFPSEADMASHQQQQQMMFHSHHQQQQQQEMVGAKSGLYRTVS

SEQ ID NO: 283066 - protein, 77 aa, Zea mays
  unsure (1)..(77): unsure at all Xaa locations
  Clone ID: MRT4577_21253C.1.pep
FIQHTPFFRHLLIHTAPIHVGRLLIGEGGLLHLSXLFSSLSFVFHYTVLSTLTNIIIFFILYTFYLYIIYLSYISFY

SEQ ID NO: 283067 - protein, 385 aa, Zea mays
  unsure (1)..(385): unsure at all Xaa locations
  Clone ID: MRT4577_21254C.1.pep
GYLEAGRADLSFQDRSWTLANGTGVIDIQHPCRSNVAVRKELHKPASDRSCIHLEFDISGTGLVYETGDHVGVYAENSVQTVEEVERLLDLSPDTFFSIHADAEDGSPRKGGGSLAPPFPSPCTLRTALLRYADLLNPPKKXSHASDPAEAERLRFLASPSGKDEYSQWITASQRSLLEVMAAFPSAKPPLGVFFAAIAPRLQPRYYSISSSPKMAPSRIRVTCALVFGPSPTGRIHQGVCSTWMKNTIPLEHSEECSXAPIFVRQSNFKLPADPSTPIIMIGPGTGLAPFRGFLQERLALKQSGAELGTSILFFGCRNRNMDYIYEDELQTFLEAGALSELIVAFSQEGPTKEYVQHKMVEKVSIKLCIPNKFVAKGVHNYSLR

SEQ ID NO: 283068 - protein, 125 aa, Zea mays
  unsure (1)..(125): unsure at all Xaa locations
  Clone ID: MRT4577_21255C.1.pep
FAKIQPVPPPSLSWASDGRARASHFEPTAAAAMVALASLSSICPCGIARRRAAAATSPAAVAISCCAVATPSSSGKGPQDSRTPRRTLXRTEGATKSLEDSVSRLMEQFCDGSAGPPLRALPVGG

SEQ ID NO: 283069 - protein, 152 aa, Zea mays
  Clone ID: MRT4577_21256C.1.pep
DWVSRGRPGNYAISPQYVQSIVGHNTSRLDPARVGTPYHPMQVGATYTTPSPQPVMAGKFSPVVYVHPVPQDPLHGTPSGFQGWPRPVLLNSYQASMQKFQGNTPVYLAPPIMATGNLPLVVPSPAPLVQPFQAIHPIMVPAASSVVPGKYM

SEQ ID NO: 283070 - protein, 214 aa, Zea mays
  Clone ID: MRT4577_21257C.1.pep
MAALEAVRSWAVSVIPPELAAAAGGDPLAALAATAAALVAGLLILAVWFRSGGGAPSKPVATPLRPPPVKVDADADVDDGRKRVTIFFGTQTGTAEGFAKSMADEARVRYEKAVFKVVDLDDYAQEDEEYEEKLKKETVALFFLATYGDGEPTDNAARFYKWFTEGKEKEVWLKDLNYGIFGLGNRQYEHFNKVAKVVDELLEEQGGERIVPVG

SEQ ID NO: 283071 - protein, 694 aa, Zea mays
  Clone ID: MRT4577_21258C.1.pep
MAALEAAREWAGSVIPPELAAAAGGDPLAALAATAAALVAGLLIIAVWFRSGGGTPSKPVATPVRPPPVKVDADADVDDGRKRVTIFFGTQTGTAEGFAKSMAEEARARYEKAVFKVVDLDDYAQEDEEYEEKLKKETVVLFFLATYGDGEPTDNAARFYKWFTEGKEKEVWLKDLKYGIFGLGNRQYEHFNKVAKVVDELVEEQGGKRLVPVGLGDDDQCIEDDFTAWKELVWPELDQLLRDEDDTTGASTPYTAAIPEYRVVFIDKSDLSFQDRSWTLANGTGVIDIQHPCRSNVAVRKELHKPASDRSCIHLEFDISGTGLVYETGDHVGVYAENSVQTVEEVERLLDLSPDTFFSIHADAEDGSPRKGGGSLAPPFPSPCTLRTALLRYADLLNPPKKAALLALASHASDPAEAERLRFLASPSGKDEYSQWITASQRSLLEVMAAFPSAKPPLGVFFAAIAPRLQPRYYSISSSPKMAPSRIHVTCALVYGPSPTGRIHQGVCSTWMKNTIPLEYSEECSWAPIFVRQSNFKLPADPSTPIIMIGPGTGLAPFRGFLQERLALKQSGAELGTSILFFGCRNRNMDYIYEDELQTFLEEGALSELIVAFSREGPTKEYVQHKMVEKATDIWNIISNGGYLYVCGDAKGMARDVHKMLHTIVQEQGSLDNSKTESYVKSLQMEGRYLRDVW

SEQ ID NO: 283072 - protein, 203 aa, Zea mays
  Clone ID: MRT4577_21259C.1.pep
SLLMTERYLNEDIDSGLLYYLHTDQTLGIKVKRTDLIGLIMRRNELATEILKASMSESFPPMLQSPSTCNRCRHLISCTIYHKAHGGSGTTSGLGDLFDNLVNHLTVTHHNFLKHWDRLIDLEARASQILQEKAKDTYITFVQQKMQPETADQLDAQFDSIDFSLKVGDLVVLSTQSGRIAVANGCIREIISHSHITVSLPRR

SEQ ID NO: 283073 - protein, 64 aa, Zea mays
  Clone ID: MRT4577_2125C.1.pep
PAAAVPPRRRHRQAHRRLRRRPRRPRRHGYGAIKRAVLGSVSDYCAHHAHCTVMIVKKPKQHKH

SEQ ID NO: 283074 - protein, 199 aa, Zea mays
  Clone ID: MRT4577_21260C.1.pep
MYLPLGRIHQGVCSTWMKNTILLEYSEECSWAHIFVRQSNFKLRADLSTPFIMIGPETGLAPFRGFLQERLALKQSGAELGTSILFFGCRNRNMDYIYEDELQTFLEEGALSELIVAFSREGPTKEYVQHKMVEKATEIWNIISHGGYLYVCGDAKGMARDVHRMLHTVVQEQGSLDSSKTESYVKSLQMEGRYLRDVW

SEQ ID NO: 283075 - protein, 88 aa, Zea mays
  unsure (1)..(88): unsure at all Xaa locations
  Clone ID: MRT4577_21261C.1.pep
QPVPRLPPSSSVSLVCXLQVWQGLAWARAPQPNAWVSLGLFDQDQRVLSGRWRLPLRALPLDPSLSLGQLNGIPQAGQAELFLRLVNA

SEQ ID NO: 283076 - protein, 62 aa, Zea mays
  Clone ID: MRT4577_21262C.1.pep
GIAATDSKAASGAGGICPLTIYSLHIGHISHFLIIMLMSFASVDTLLYTLTLSLLLLFDATN

SEQ ID NO: 283077 - protein, 86 aa, Zea mays
  unsure (1)..(86): unsure at all Xaa locations
  Clone ID: MRT4577_21263C.1.pep
MRGLLVALALLALGESATCTHTSGGCSCQPPPSVHLPSTVHLTAPVNLXPPVHIRNDRQLPPAVHLTPSVHVPTTVHLIEPPCQYH

SEQ ID NO: 283078 - protein, 62 aa, Zea mays
  Clone ID: MRT4577_21264C.1.pep
NISSFGPFFYFFFFVNFGLFFFFFPWFPPLEFPFPMGPFGVFVLTLSPDRQAFFFKGVFFGP

SEQ ID NO: 283079 - protein, 316 aa, Zea mays
  Clone ID: MRT4577_21265C.1.pep
TVGQYESHIAFTLPGLYRVVHGIDVFDPKFNIVSPGADMSVYYPYTETDKRLTAFHPEIEELIYSDVENDEHKFVLKDKNKPIIFSMARLDRVKNMTGLVEMYGKNARLRELANLVIVAGDHGKESKDREEQAEFKKMYSLIDEYNLKGHIRWISAQMNRVRNAELYRYICDTKGAFVQPAFYEAFGLTVIESMTCGLPTIATCHGGPAEIIVDGVSGLHIDPYHSDRAADILVNFFEKCKADPSYWDKISQGGLQRIYEKYTWKLYSERLMTLTGVYGFWKYVSNLERRETRRYLEMFYALKYRSLASAVPLSYD

SEQ ID NO: 283080 - protein, 70 aa, Zea mays
  Clone ID: MRT4577_21266C.1.pep
PKEGIRAQSTRMNYALPFFSRTSNQYCSLSGETPHESHSHDTSDDLPKMIDWLILDVCRIPFHNITNLCT

SEQ ID NO: 283081 - protein, 586 aa, Zea mays
  unsure (1)..(586): unsure at all Xaa locations
  Clone ID: MRT4577_21267C.1.pep
RPYTNQIRYNVSIVKTDTSTLPPIINADEIFIVISTTNVGTDSEDVSAMKAIKAKYQVKKNWMGDPCVAGTFRWDGLTCSYAISDPPKITALNMSFSGLTGDISSAFANLKAVQSLDLSHNNLTGSIPSSLSQLPSLTTLDLTGNQLSGPIPSSLLKRIQDGSLNLIYADNPDLCTNAGDSCQTAPQGKSKLVIYYVAVPMALIVVALAVLLCCLLRRRKTRGLADVSVKPRDKTPTSLASMAADEHRLSSLRLENRRFTYEDLEMITDSFKRVIGRGGFGYVYEGFLEDGTQVAVKMRSQSSNQGAKEFLTEAQILTRIHHKNLVSMVGYCKDGVYMALVYEYMSEGSLQEHIAGKRLTWGQRLRIALESAQGLXICTXCNPPLIHRDVKTSNILLNAKLEAKVADFGMSKALDRDTYASTNTLVGTPGYVDPEYLETMQPSTKSDVYSFGVVLLELVTGRPPILHSPQPTSVIQWARQHLARGDIEVVVDASMGGNHDVNSVWKAAEVALQCTEQASAQRPTMGDVVAQLLECLDLEKGRSANESFCDGDDSGSATASLSHSSAFVTGRIFGTVPMVETGPATR

SEQ ID NO: 283082 - protein, 183 aa, Zea mays
  unsure (1)..(183): unsure at all Xaa locations
  Clone ID: MRT4577_21268C.1.pep
DVDDDGSVKDTASPELRRYXREQVQRLENRLYQLMDKLMRNADDEASLSEVCIVNGRCCIRTTMDNSSFFDGLLLSSRSDAGSMIEPIVAVPLNDELQESRALVAKAELDVLSKLTDKIRLDLDSIQNLLQXTIKLDKIAARAKYSIAYDGTFPDLYLPNFENETVTSATGGSIKQISSAQLP

SEQ ID NO: 283083 - protein, 171 aa, Zea mays
  Clone ID: MRT4577_2126C.1.pep
MAEEASAPAAGTEAPPGKMTMVVGVDESEHSFYALQWALQHFFPPGQPQQYRLVVVTAKPTAASAVGLAGPGAADVLPYVEADLKRSALRVVEKAKGLCTQASDAVFEALEGDARNVLCEAVERHGAEMLVVGSHGYGAIKRAVLGSVSDYCAHHAHCTVMIVKKPKQHKH

SEQ ID NO: 283084 - protein, 57 aa, Zea mays
  Clone ID: MRT4577_21271C.1.pep
RKKKKKKKKKKKKKRREEKKKKKKKKKKKKKKGAAGFRRTQALRYRVACERSLASFL

SEQ ID NO: 283085 - protein, 52 aa, Zea mays
  Clone ID: MRT4577_21272C.1.pep
RPGFFFFFAFKLPRGIHKNMCIPKPSGAIDWSVYFSLNNKHVERGTSTPRRL

SEQ ID NO: 283086 - protein, 133 aa, Zea mays
  Clone ID: MRT4577_21273C.1.pep
FPFTHQGALNLVFFLDNHKFPLGRFLLASPPHFFPFTHGGGWTFPVFFPRPQFFPFARLVGGAPLPFFIHPRCGRFSRPVGPKGGPLFKWDQLCPFTPLVLQNPRGFFPHPPLGGAPFWFFLGVRSQKKVFGL

SEQ ID NO: 283087 - protein, 237 aa, Zea mays
  unsure (1)..(237): unsure at all Xaa locations
  Clone ID: MRT4577_21274C.1.pep
EAPLRPPGLPTSPNCCRSSSHARLPAPRGVPNPGPEPLTRAPSRFISSTPARLSSKHSAKLRELKLHTVCEEARCPNLGECWSGGETGTGTATATIXLGDTCTRSFFCXVCVPDFRGDPSCVEXMVATSGLHVFAHNIETVEELSKXVRDFHANFKQSIDVLKMAKEYAPPGTLTRTSIMLGCGETPDQVISTMEKVRXLAAGVDXVITFGQYMRPSKRHMPVSEYVTPEAFEKYQP

SEQ ID NO: 283088 - protein, 93 aa, Zea mays
  unsure (1)..(93): unsure at all Xaa locations
  Clone ID: MRT4577_21275C.1.pep
YXENFAILYILHSVLIRDLPLSTRNTVSRCDAIRRLIRCLWIQSDLHFXKDTHLKQSYSASIPKLFCGPTRKHVALKHLAYILRSLFRWWYLF

SEQ ID NO: 283089 - protein, 85 aa, Zea mays
  unsure (1)..(85): unsure at all Xaa locations
  Clone ID: MRT4577_21276C.1.pep
SDNSDXLKELENGSKTWQPNPPGKLIADFIEGDLPPGQGSPLERLGLLMKNELEEEXDQEVRDGDKPSRDVDMRKDSAGNEMQDS

SEQ ID NO: 283090 - protein, 57 aa, Zea mays
  unsure (1)..(57): unsure at all Xaa locations
  Clone ID: MRT4577_21277C.1.pep
XSHHFFXKKXXFFGGPMGEVYGLTRVLCKINNYLIRGQRASNPKLTGRRRAKPFTNS

SEQ ID NO: 283091 - protein, 164 aa, Zea mays
  unsure (1)..(164): unsure at all Xaa locations
  Clone ID: MRT4577_21278C.1.pep
RQRPPGTAAAGRGFRPSRCCRGFSRPAGRLLLLLLLALPLSPPPRXRALAPRLRVSNRPRRLIVSASSSGEANSDAAPSPTEAAIDIKLPRRSLLVQFTCNACGERTKRLINRVAYERGTVFLQCAGCQVYHKFVDNLGLVVEYDLREENELQGENAVDTSSED

SEQ ID NO: 283092 - protein, 100 aa, Zea mays
  Clone ID: MRT4577_21279C.1.pep
PFSPLEGLNKKDRIGDVGGRNFYLHKNDSSNDGLYLQGQEEPGADPSGGDISRHSSSGVGQASGGATSQHQVLTIVISKLDKIGRRTRRIWRFITCNNCA

SEQ ID NO: 283093 - protein, 156 aa, Zea mays
  unsure (1)..(156): unsure at all Xaa locations
  Clone ID: MRT4577_2127C.1.pep
IDPPLSSFLNEVFIKLDGVWGLLGTAAFAFFCFYLLIAVIAGEMMLGLKLVFITIHPMKWGGTLMNSFLFNVGLILLCSISVIQFCATAFAYYAQATAAQEIFGHTLQSLRGIKYLYKYNVFQYGFVALAILTLFYYAIFGWRKKXKPTGRFQLSK

SEQ ID NO: 283094 - protein, 103 aa, Zea mays
  unsure (1)..(103): unsure at all Xaa locations
  Clone ID: MRT4577_21280C.1.pep
MMSHRRRSRAAGSPPSDASTGTAPTPEKSGWIRPWAATGTDLKVLELALGFRAHNALLVRTYFNPDEHWQCLQAAHRVEFGYGHLTWEWKRGXLRSYLPPMIF

SEQ ID NO: 283095 - protein, 103 aa, Zea mays
  unsure (1)..(103): unsure at all Xaa locations
  Clone ID: MRT4577_21281C.1.pep
MDTLTLIVADAYADCIVGDDCGYDYEFLDINAIDDDGHDEGDDLKDPYLYAAYLTVQQLALLIXKAEYAIHYQHFMCDTGDHATTGVSGDHWFEPERYAMCRL

SEQ ID NO: 283096 - protein, 52 aa, Zea mays
  Clone ID: MRT4577_21282C.1.pep
LIYMDISRYRPFDALLTPQQRHCFVALLICYIAPYVNLLDVKLDLLILYVPF

SEQ ID NO: 283097 - protein, 167 aa, Zea mays
  unsure (1)..(167): unsure at all Xaa locations
  Clone ID: MRT4577_21283C.1.pep
MMERRLGRHVYLIPRTLPFMQLNAMSSFSAGHGRQPKKKVYHREPGLDRAMDLQKKPALLLRLRDLILAQKTGSLLVRDLEKEVGFVQKWNFLSLIERHPNIFHVSGGSASREPISVTLTEKARKISSEEAEARELMEPILVRNLXEVLMMSMDCQIPLDKXELIQS

SEQ ID NO: 283098 - protein, 48 aa, Zea mays
  Clone ID: MRT4577_21284C.1.pep
GPLPPFVPKKAPVFSGSPKKKKKKKKKKKKKKKKKKKKKKKKKKKKKK

SEQ ID NO: 283099 - protein, 54 aa, Zea mays
  Clone ID: MRT4577_21285C.1.pep
RLAIPFLFVKRVQKLAFTSHMREEAKEKRYRLLWVGSMVGETSQCYVRYGVYSI

SEQ ID NO: 283100 - protein, 57 aa, Zea mays
  Clone ID: MRT4577_21286C.1.pep
LHLSTVLPRENPETPHLTHLNRLPPFPPLPNFYNTQTALPFQHFHQLTSLNGTRYTP

SEQ ID NO: 283101 - protein, 149 aa, Zea mays
  unsure (1)..(149): unsure at all Xaa locations
  Clone ID: MRT4577_21287C.1.pep
RAFIALAIVLIDRVGRXPLLYVSTVGMPGCLTALSTAVLSGDVAFFSVGIGPICWVVSSEIFPLRLRSQAAALGAVANRVTTGAVTMSFLSVCRAISVSGAFAAFAAISALSVLFVHRFVPETIGKTLEQIESPWTRRQWGPVPAVEPA

SEQ ID NO: 283102 - protein, 73 aa, Zea mays
  Clone ID: MRT4577_21288C.1.pep
REPPLMPPYLQHPLVSFPPSQNELRPLPQPQTVVFNPLFIEKKNPRSMVALGIPPRFKAKFVTVVLFKPIFRR

SEQ ID NO: 283103 - protein, 85 aa, Zea mays
  Clone ID: MRT4577_21289C.1.pep
SPLDFPMRQRWRSPQVVGSHLLRMIRVDFAPEAVCWVEHHARSWLSGVHFRFGMASGPFQWRVRGLVVWGTSTRLFKGFYVTVGR

SEQ ID NO: 283104 - protein, 66 aa, Zea mays
  unsure (1)..(66): unsure at all Xaa locations
  Clone ID: MRT4577_2128C.1.pep
TKLPPRDLLPPPPPYTGATTKFVFRCHTPQIKAPQRDRWPXKPYYSPTTSFSLRPNFNRAPEAGQG

SEQ ID NO: 283105 - protein, 85 aa, Zea mays
  Clone ID: MRT4577_21290C.1.pep
GLGIRLEAKCSRLFLHGFTTLSTDGRVPTPVGKCPSLRSLSEHIGWRRADPHCVKRSAPLDTGCLSSINHTGASRARTLGVQLPC

SEQ ID NO: 283106 - protein, 81 aa, Zea mays
  Clone ID: MRT4577_21291C.1.pep
MKTMLEKGVNAGVGAMRSVDETYGVRETTKTVATATGRTAAKVVNGIVTSSYFSAGAMILSDALTRAAKAAADLAAHGRQN

SEQ ID NO: 283107 - protein, 131 aa, Zea mays
  unsure (1)..(131): unsure at all Xaa locations
  Clone ID: MRT4577_21292C.1.pep
GSEGYGATAYVTFKERFALETAVLLSGATIVDQPVCITYWGQPEGTFNFWDRPTWEVEEEIEYRNYQTCQYNTTPQEAFTVAQDIMKTCXKKGYVLSKDALAKAXAFDESYGLTAAAXSRAAELSQENGFT

SEQ ID NO: 283108 - protein, 244 aa, Zea mays
  Clone ID: MRT4577_21293C.1.pep
MSETGHTVQVTNLSSRVSESDLHEFFSFSGPIEHIELIRSEGYGATAYVTFKERFALETAVLLSGATIVDQPVCITYWGQPEGTFNFWDRPTWEVEEQIEYRNYQTCQYNTTPQEAFTVAQDIMKTMLEKGYVLSKDALAKARAFDESYGLTAAAAARAAELSKRIGLTDRVNAGVGAMRSVDETYGVRETTKTVATATGRTAAKVVNGIVTSSYFSAGAMILSDALTRAAKAAADLAAHGRQN

SEQ ID NO: 283109 - protein, 42 aa, Zea mays
  unsure (1)..(42): unsure at all Xaa locations
  Clone ID: MRT4577_21294C.1.pep
KEEESPENERKPSDXANAHWSPPKLSXXXEVIPCRGGAEXHP

SEQ ID NO: 283110 - protein, 56 aa, Zea mays
  Clone ID: MRT4577_21295C.1.pep
YVCFLCMFASRLLHYGALQLALSTFDSILFTCTQVFNDSSDPGFVVISPTSESNYH

SEQ ID NO: 283111 - protein, 244 aa, Zea mays
  Clone ID: MRT4577_21296C.1.pep
MSETGHTVQVTNLSSRVSESDLYEFFSFSGPIEHVELIRSGEYGATAYVTFKERFALETAVLLSGATIVDQPVCITYWGQPEETFNFWDRPTWEVEEEIEYTSYQSCQYNTTPQEALTVAQDIVKTMLAKGYVLSKDALAKARAFDESRGLTAAAAAKAAELSKRIGLTDRVSAGVGAMRSVDETYRVTETTKTVATATGRTAAKVVNGIVTSSYFSAGAMMLSDALTRAAKAAADLAAHGRQS

SEQ ID NO: 283112 - protein, 42 aa, Zea mays
  Clone ID: MRT4577_21297C.1.pep
RDSESAEARTLLQPLRIHLSIRTTILLYTMRRKAHVFVQAIS

SEQ ID NO: 283113 - protein, 81 aa, Zea mays
  Clone ID: MRT4577_21298C.1.pep
RPCHTRDGATLAAREAKKRLTATLPTAFSPYTLNFCLAAPTSLTPANPLRSSLLDKVHSKLLISNIGFINIYKYTQKFTAS

SEQ ID NO: 283114 - protein, 49 aa, Zea mays
  Clone ID: MRT4577_21299C.1.pep
HKWKCRSAQLANGQTFYCRVLNESFKRKRGGPRIMRNGGSSLKRETGKR

SEQ ID NO: 283115 - protein, 106 aa, Zea mays
  Clone ID: MRT4577_2129C.1.pep
ADTHRPPKRRMANRETARRTRLRKQQHQDELEQEVARLQADNAREAARAADRATQNTRVEQENTGLRARAAELGDRRRSDNEVLPPREEFSGVAMDKQEEMPADDP

SEQ ID NO: 283116 - protein, 102 aa, Zea mays
  unsure (1)..(102): unsure at all Xaa locations
  Clone ID: MRT4577_212C.1.pep
SRAGIDFQPPSVVPGXGNLAKGQRPVYMIFNSSIVVEVFSLMDHKFDLMYAKGALVPWYVGEGMEEGEFFEAREVLAALEKVSEEVGAXFDEGEDGDEGDEY

SEQ ID NO: 283117 - protein, 71 aa, Zea mays
  unsure (1)..(71): unsure at all Xaa locations
  Clone ID: MRT4577_21300C.1.pep
ADAWVTTQVQIKVMPXMSRXGGALYRILQVKLTMGLFXNLYPDSSLCGQLVKQEHLILARVAGRKCLFLWK

SEQ ID NO: 283118 - protein, 49 aa, Zea mays
  Clone ID: MRT4577_21301C.1.pep
EQSPTFFWDLINNTHTFGGEVSLKFNTKLKNHIPIFVLPRPNNNTSALN

SEQ ID NO: 283119 - protein, 52 aa, Zea mays
  Clone ID: MRT4577_21302C.1.pep
GLKGKKEGFLTWSFTVGQVLDPFPLHKLFIPPPNIIGNKKGGRACRPNRTVP

SEQ ID NO: 283120 - protein, 82 aa, Zea mays
  unsure (1)..(82): unsure at all Xaa locations
  Clone ID: MRT4577_21303C.1.pep
QTGSTRRSXPPSKRVDKGMPNLICEGTAKSSKAPESRSKVNANRARNAIRLQRHPETHTEMYSGAMDEDIEFMDADGLGTRR

SEQ ID NO: 283121 - protein, 49 aa, Zea mays
  Clone ID: MRT4577_21304C.1.pep
RKLPVGPARPRKPVWLPISLPYTKGFIFVQLVCCCPNEFLIARSLWDNY

SEQ ID NO: 283122 - protein, 229 aa, Zea mays
  Clone ID: MRT4577_21305C.1.pep
MPASASPPAQPAEPPPPPPPASPAPPEDVEATAGSPSRASAVGTVNWGTATLVGVFAGLLYGGSREASASVSKDAEVMLKMGSTTDKREQYRLMRDAMEKRFIRVAKGSLVGGVRLGMFTATFFGIQNLLIDTRGVHDVFNIAAAGSATAAAFGLILPGSMMWRARNVLVGSALGAGICYPLGWVQLKLAEKANLEIANSKPSSDLTEGKGNQSRVGAAIERLEGSLKK

SEQ ID NO: 283123 - protein, 248 aa, Zea mays
  unsure (1)..(248): unsure at all Xaa locations
  Clone ID: MRT4577_21306C.1.pep
MVRGPXKHQKRLSAPKHWLLDKLSGAYAPKASAGPHKTRDSLPLIIFLRNRXKYALNGDEVKAIVKQRLIKVDGXVRTDATFPTGLMDVISIEKTGENFRLIYDTKGRFTVHRITAEEAQYKLGKDKRVQLGKGGIPYLATHDARTIRYPDPAIKVNDTVQVDLATGKIEDFIKFDTGVIDMVTGGRNMGRVGVITHRERHDGGFNIVHLKDAVDNEFTTQXSNVIVIGQEKPWISLPKGKGVKLSIA

SEQ ID NO: 283124 - protein, 79 aa, Zea mays
  Clone ID: MRT4577_21307C.1.pep
FISMMCLLIVSRSSNGHTPDCVLIVFIVLISTCNLYYLLRLQGVACLSLVLPPINLRRPRVLICIVHHAYVFDVYRSRA

SEQ ID NO: 283125 - protein, 97 aa, Zea mays
  Clone ID: MRT4577_21308C.1.pep
GHVPVIAIGLYQDNVEEWTLASMSMILVYIPGDKFCCCPPFMKVIMSHIPKVELQRGRVQILQVATSPILSEVVCPCNESVVIVFMELLRAVICMLN

SEQ ID NO: 283126 - protein, 53 aa, Zea mays
  Clone ID: MRT4577_21309C.1.pep
SEFPSTHLREPWADTWTSYCEDSPKGVLIHQTGSKPKLDNLKGLQDIKHKIYF

SEQ ID NO: 283127 - protein, 104 aa, Zea mays
  unsure (1)..(104): unsure at all Xaa locations
  Clone ID: MRT4577_2130C.1.pep
MICPDHSCARSKKKKKRGKGYIFVCLNFARXHYTIGKEIVDLCLDRIRKLADNCTGLQGFLVFNAVGGGTGSGLGSLLLERLSVGLRKKSKLGLTVXPSPQVPN

SEQ ID NO: 283128 - protein, 62 aa, Zea mays
  Clone ID: MRT4577_21310C.1.pep
GGFKSISGFIYKETPGVLKIFFEKVIREAVTYTENAPRKIVSAMEVVYGFKGQGRTLFGFGG

SEQ ID NO: 283129 - protein, 66 aa, Zea mays
  Clone ID: MRT4577_21311C.1.pep
STLPGSSTKTYFYLKTSSLMISRYIFKDLIQISTGVLSYAYHTVEDLIGIPTTLESFHPMYHIKKF

SEQ ID NO: 283130 - protein, 121 aa, Zea mays
  Clone ID: MRT4577_21312C.1.pep
ICLSQYYISFCFQTKNTYHELSDLNPHLNDIQEAEEREKIVKDPKSIVPAAFVSFRSRWGAAVCAQTQQTSNPTVWLTEWAPEPRDVYWDNLSIPFVSLTVRRLIIAVAFFFLNFFYVFPI

SEQ ID NO: 283131 - protein, 67 aa, Zea mays
  Clone ID: MRT4577_21313C.1.pep
LGLSLGSPGFALIVSGLNVWGHFIRIPISRRVVLWPCFQRACLRLTFRGLWLAVRNWSVIPGWPPGS

SEQ ID NO: 283132 - protein, 41 aa, Zea mays
  Clone ID: MRT4577_21314C.1.pep
LFHRTMTDTTFELSSNLFTLITNNCSQHYLKRDDRRVQGCI

SEQ ID NO: 283133 - protein, 72 aa, Zea mays
  Clone ID: MRT4577_21315C.1.pep
ACPPWCSARPVRTPLAGCCPSSGQPSTRPSGTTISASCSSCTRTASPRCLRLAAWSTYQQSRSASGVSAHEK

SEQ ID NO: 283134 - protein, 64 aa, Zea mays
  unsure (1)..(64): unsure at all Xaa locations
  Clone ID: MRT4577_21316C.1.pep
GMGRSXLGRAPIDELSVSTSSSTYFSSMKKPSLLLFPGAAKCASFPYPPPLPLPYAVNPKCDAR

SEQ ID NO: 283135 - protein, 120 aa, Zea mays
  Clone ID: MRT4577_21317C.1.pep
AANFFFFFLFIENLKSLFSDIRRVPAGKESNPYPTRIKIGSGTGKTRGSNFVPEPVPDGSDIRQISKLTGKIAIPTRDRLDRTACGLLNCGCGRQLQFLHYWVGCTHPHEVGVSSTLGSA

SEQ ID NO: 283136 - protein, 95 aa, Zea mays
  Clone ID: MRT4577_21318C.1.pep
TPPPMTPTTMDFMPTSNPMPPMDPTPTPLLAIPPPPPIHEKTTPPPPPRNPKKKATLIPPDPRRHLPLTTPPTTPPPPTRVGTLCPSRTPPSSLL

SEQ ID NO: 283137 - protein, 70 aa, Zea mays
  Clone ID: MRT4577_21319C.1.pep
SESYYKKTKQKKKIKNKKNQKKTETNKNSLTHNKHIKRGKENHKHCKPNLHQKRGGPPKGYRARSPCFTT

SEQ ID NO: 283138 - protein, 76 aa, Zea mays
  Clone ID: MRT4577_2131C.1.pep
TILLGFFCSTKKHHFFLRINLEQTLTGVTASIDPQTMLVDAWVFWSRGLTQYYQLSQSVLALKNIDGLLTNVYDRN

SEQ ID NO: 283139 - protein, 177 aa, Zea mays
  unsure (1)..(177): unsure at all Xaa locations
  Clone ID: MRT4577_21320C.1.pep
MMNHSQETAHPTTAAKAMGKDLRVHFKNTRDTAFALRKMPLTYAKXYLDDVIAHKQAIPFRIYCGGVALTTLAKSRHSNVQVRWPAKSMRFILHLLKNDESNADVKGXNEHNLYDAHIQTNLAQKNKLRTYRAHERIYPYMSSSXTLMLILSEKEDSGNREDDYIVAARKHRSISSA

SEQ ID NO: 283140 - protein, 95 aa, Zea mays
  Clone ID: MRT4577_21321C.1.pep
FGFEPLDSHYACGLTALKIKCSSKVIKDIYACVHHHSIQGTTQKTKNSASGLNVLVSYNVVSSLPCGIYSSGDLDACPLEVSHCIKKLCGLHVKI

SEQ ID NO: 283141 - protein, 131 aa, Zea mays
  Clone ID: MRT4577_21322C.1.pep
TFHHVYLISKVTFMVRVSQVFRSAGRTHLLSSACRFEQLGACWNSPKSSSACCDVYGHWTVINDDTTDIHPLICKLKQKGSMERAGVAHQAQQAVAAAAAVSAEWKVTKDAWIQRLASKLWSLVPAGLEVP

SEQ ID NO: 283142 - protein, 74 aa, Zea mays
  Clone ID: MRT4577_21323C.1.pep
WIGTYCDTRVVSIIDCLRQSERKGFCHTINSSLHNSSTATPQHASTSVFQHPNIDHYVSDIYKFWYSISPSARP

SEQ ID NO: 283143 - protein, 74 aa, Zea mays
  Clone ID: MRT4577_21324C.1.pep
MDLDLDDYVDPYEEAEAEAAAAEDGSDDPDEDDSDAESDYEEESFGLLKSGKHRVRNPDGTFRCPFCPGKKKQG

SEQ ID NO: 283144 - protein, 88 aa, Zea mays
  unsure (1)..(88): unsure at all Xaa locations
  Clone ID: MRT4577_21325C.1.pep
QTEXRETKPGPNTKTRGAARGQRSSRTGTRAASTQHRGAPEQDTKTSSPPARRTAGARARQNERRERQHQRRRRAPRTEPSRSRGQQA

SEQ ID NO: 283145 - protein, 104 aa, Zea mays
  unsure (1)..(104): unsure at all Xaa locations
  Clone ID: MRT4577_21326C.1.pep
LTTIASLSSAAINGHSFTGAPARAVVSRRSFTVRASLRKAIANAAVVVAASVLHAGGXAMAHDVLLGAGDGGLVFDLRQFTVNVGDTITFKNNAGFPHKVVFDE

SEQ ID NO: 283146 - protein, 384 aa, Zea mays
  unsure (1)..(384): unsure at all Xaa locations
  Clone ID: MRT4577_21327C.1.pep
MASSSPLTRAHRASTSTSSVAAALLASASPIPPRRFIQLHAHLLRTGLLAFSPVTTTSAFLSLAAVSLPSHRALAVLDHHLTTPHSLPSTFQCNSILRALSDPSDALRFLCRMRALGRRGNAFTLAILLKPRCSLAHARQLHANVVAEGHLRDALLATSLMRCYANRGDGDGARKLFDEMPVRDAVAWNVLITCYARNRRTKDALKLFEEMRGRDSESEPDDVTCILLLQACSSLGALDFGEQVWAYAEEHGYGFXLKVRNSLITMYLRCGCVDKAYRVFSGTPQKSVVTWTAMISGLAANGFGNDAISVFEEMIRSDDAPDEQTFTGVLSACSYSGLVDEGFRFFDMMRCEYGLKQNVRHYGCIXDLMGRAGLLDEAYEFVIN

SEQ ID NO: 283147 - protein, 66 aa, Zea mays
  Clone ID: MRT4577_21328C.1.pep
HASAHASGRSSGRADASAPVQYVHSWRFCQFGCVDNYFTAHYQSPRQMLCLWEKLSAGRAHCCNYR

SEQ ID NO: 283148 - protein, 206 aa, Zea mays
  Clone ID: MRT4577_21329C.1.pep
RIDLPVALGRLHIMPLVADYLRQWPGVEADISFTDDYTDLVRDGIDVAIRIGGEADSRLVRRVLAPHRLITCAAPDYLARHGAPASPDDLARHQTLAFTHMGAPVPWRYASHGQDRPVAVAGRLRLGNTEALRDAALAGAGIVQLGAFLVGNDLRQGHLVAVLEPHAPPGAPVCAVYPHRRHLAPKVRLLIDGIVARWQQGAPWPA

SEQ ID NO: 283149 - protein, 82 aa, Zea mays
  unsure (1)..(82): unsure at all Xaa locations
  Clone ID: MRT4577_2132C.1.pep
FHEATLKNELGCRELKKGTHPRFLVAKFDVAKKACLNFLDKFKASVVTGXTTLRTKLYKGLADQLMDIVVNAVRLISVVVFL

SEQ ID NO: 283150 - protein, 47 aa, Zea mays
  Clone ID: MRT4577_21330C.1.pep
SSPAAESKLQTICTNLSIMRSLCCRTSTRSIDIEPSWRKTYDEYAPS

SEQ ID NO: 283151 - protein, 71 aa, Zea mays
  unsure (1)..(71): unsure at all Xaa locations
  Clone ID: MRT4577_21331C.1.pep
LNLAAXNLLPFPALDGGTLALILLEAARGGRKIPREVEQGIMSSGILVVLMVGMFLIVRDTLNLDFIKEML

SEQ ID NO: 283152 - protein, 146 aa, Zea mays
  Clone ID: MRT4577_21332C.1.pep
FLRVGGRVGEGAVRLDLPPRAKLHDVFHVGLLKKFIGDPPARPPPLPPLLHGAVTPEPERAVRFRQAPGGRQVLIHWKGQSAASATWEDMAELRDKFPQFQLEDELDVEGGGRDVMYGRKYRRRRDIRHAAERAAHATQDGATIRG

SEQ ID NO: 283153 - protein, 168 aa, Zea mays
  unsure (1)..(168): unsure at all Xaa locations
  Clone ID: MRT4577_21333C.1.pep
MGSLMSGWSSSVLSDKEARLMRNRSLTKEEVAAFWRQHGSMPNAGSGSPRAVPVXNTAARGATTMASSSPRTPSIAPPPRTAXLVPYVCSQLAXSQTWSHHXYCCTLLRIYARSRRWTRSSWAFLNEPPPPTTTREEVVLGSRAPRSFAVVACDQQLHAAARIVTGNA

SEQ ID NO: 283154 - protein, 135 aa, Zea mays
  Clone ID: MRT4577_21334C.1.pep
MGSLMSGWSSSVLSDKEARLMRNRSLTKEEVAAFWRQHGSIPNAGSPRAVPVQYCCTRNDDDGFFLPENAVDSSAAANGGSWWTRSSWAFLNEPPPPPTTTREEVVLGSRAPRSFVVVACDQQLHAAARIVTGNA

SEQ ID NO: 283155 - protein, 89 aa, Zea mays
  unsure (1)..(89): unsure at all Xaa locations
  Clone ID: MRT4577_21335C.1.pep
MVAIATVQHHRRDSEAELNLPPAFRFHPTDEDLLAHYLCTRAAXRRPPVSIIAYVDLYRFYPCYLPERALFSPREYYFFIPRDRMYPNV

SEQ ID NO: 283156 - protein, 131 aa, Zea mays
  unsure (1)..(131): unsure at all Xaa locations
  Clone ID: MRT4577_21336C.1.pep
GKPAPPKPRGGGGGTSPSHRARPKHGGKGEPGXPNTVGGGQRKKEPSPGQGXKNGGGGPHPGKGFGGPRGNLFRGGPTPPAARELAGPPQTRGARTETPVLGHPEHDQKGVCGDQHHWELFYAHIKGGGGP

SEQ ID NO: 283157 - protein, 38 aa, Zea mays
  Clone ID: MRT4577_21337C.1.pep
GAKSRFKMNARCCDIAHPCSHCRHIETLSSFSISPTHV

SEQ ID NO: 283158 - protein, 272 aa, Zea mays
  Clone ID: MRT4577_21338C.1.pep
PGVSSCERQLVELRRSHLHRRRAFTSIGTGYDLSVTTFSPDGRVFQVEYATKAVDNSGTVVGIKCKDGIVLGVEKLVTSKMMLEGSNRRIHSVHRHSGLVVAGLAADGRQIVSRAKSEAASYEKVYGEPIPVKDLADRVASYVHLCTLYWWLRPFGCGVILGGYDRDGPQLYMIEPSGVSYKYFGAALGKGRQAAKTEIEKLKLSELTCREGIVEVAKIIYGVHDESKDKAFELELSWICDESNRQHQKVPNELLEQAKAAAQAALEEMDAD

SEQ ID NO: 283159 - protein, 75 aa, Zea mays
  unsure (1)..(75): unsure at all Xaa locations
  Clone ID: MRT4577_21339C.1.pep
MSSIDTGYDLSVTTFSPDGRVFQVEYATKAVDNSGTVVGIKCKDGIVLGVEXLGTSKMMLEGANQKIHSELRHSG

SEQ ID NO: 283160 - protein, 94 aa, Zea mays
  Clone ID: MRT4577_2133C.1.pep
GGLWSSGGGLSGVFGVVGLVCARLWLPRSPCCWLPRGRSVVPLGGFSGCFSGRALPASWSPGWSGFLCLLLAFGLLRFPGLPGFGPPFGESGPP

SEQ ID NO: 283161 - protein, 251 aa, Zea mays
  unsure (1)..(251): unsure at all Xaa locations
  Clone ID: MRT4577_21340C.1.pep
MSSIGTGYDLSVTTFSPDGRVFQVEYATKAVDNSGTVVGIKCKDGIVLGVEKLVTSKMMLEGSNRRIHSVHRHSGLVVAGLAADGRQIVSRTKSEAASYEKVYGEPISVKELADRVASYVHLCTLYWWLRPFXCGXIFGGYDLRDXGPKLXCIEPSRVSYKNLXAALGKGRQAAKTEREKLKLSELTCREGIGEVAKIIYGVHDEAKDKAFELELSWICDESNRQHQKVPNELLEQAKAAAQAAREEMDAD

SEQ ID NO: 283162 - protein, 249 aa, Zea mays
  Clone ID: MRT4577_21341C.1.pep
MSSIGTGYDLSVTTFSPDGRVFQVEYATKAVDNSGTVVGIKCKDGIVLGVEKLVTSKMMLEGSNRRIHSVHRHSGLAVAGLAADGRQIVSRTKSEAASYEKVYGEPIPVKELADRVASYVHLCTLYWWLRPFGCGVILGGYDRDGPQLYMIEPSGVSYKYFGAALGKGRQAAKTEIEKLKLSELTCREGIVEVAKIIYGVHDEAKDKAFELELSWICDESNRQHQKVPNELLEQAKAAAQAALEEMDAD

SEQ ID NO: 283163 - protein, 83 aa, Zea mays
  Clone ID: MRT4577_21342C.1.pep
PRVRDAWLTRGSWNRSLTHNNIVSLPSQLHNDDDPKKLPLPPPEPLPRSLPLVSSTICTSTSSLAPSLTSTPRSARPPAHRCR

SEQ ID NO: 283164 - protein, 67 aa, Zea mays
  Clone ID: MRT4577_21343C.1.pep
IYNRSYPWSWMDMIIRSWSSGRSFFFFFKCGSHLLIIKRPGATRAVALLYTVPRRAMKVACSKALSP

SEQ ID NO: 283165 - protein, 249 aa, Zea mays
  Clone ID: MRT4577_21344C.1.pep
MSSIGTGYDLSVTTFSPDGRVFQVEYATKAVDNSGTVVGIKCKDGIVLGVEKLVTSKMMLEGSNRRIHSVHRHSGLAVAGLAADGRQIVSRTKSEAASYEKVYGEPISVKELADRVASYVHLCTLYWWLRPFGCGVILGGYDRDGPQLYIIEPSGVSYKYFGAALGKGRQAAKTEIEKLKLSELTCREGIVEVAKIIYAVHDEAKDKAFELELSWICEESKRQHQKVPNDLLEHAKAAAQTALEEMDAD

SEQ ID NO: 283166 - protein, 247 aa, Zea mays
  unsure (1)..(247): unsure at all Xaa locations
  Clone ID: MRT4577_21345C.1.pep
ASSRLYRMFKVSXWKNVTIKTALMFPGIVFAIFLVLNALIWGEKSSGAVPFTTMFALVLLWFGISVPLVFIGSYLGFKKPAMEDPVRTNKIARPIPEQPWYMNPVVSVLIGGILPFGAVFIELFFILTSIWLHQFYYIFGFLFLVFVILILTCAEIAIVLCYFQLCGEDYQWWWRSYLTSGSSALYLFLYATFYFFTKLEITKTVSGVLYFGYMLIASYAFFVLTGTIGFYACFWFTRLIYSSVKID

SEQ ID NO: 283167 - protein, 249 aa, Zea mays
  unsure (1)..(249): unsure at all Xaa locations
  Clone ID: MRT4577_21346C.1.pep
MSSIGTGYDLSVTTFSPDGRVFQVEYATKAVDNSGTVVGIKCKDGIVLGVEKLVTSKMMLEGSNRRIHSVHRHSGLAVAGLAADGRQIVSRTKSEAASYEKVYGEPIPVKELADRVASYVHLCTLYWWLRPFGCGVILGGYDRDGPQLYMIEPSGVSYKYFGAALGKGRQAAKTEIERLXLSELTCREGIVEVAKIIYAVHDEAKAKAFELELSWICDESKRQHQKVPNDLLEHAKAAAQTALEEMDAD

SEQ ID NO: 283168 - protein, 246 aa, Zea mays
  unsure (1)..(246): unsure at all Xaa locations
  Clone ID: MRT4577_21347C.1.pep
MSSIGTGYDLSVTTFSPDGRVFQVEYATKAVDNSGTVVGIKCKDGIVLGVEKLVTSKMMLEGSNRRIHSVHRHSGLAVAGLAADGRQIVSRTKSEAASYEKVYGEPIPVKELADRVARYVHLCTLYGWLRLFGXEVILGXYDRDGPQLYMXGVSYKYFGAALGKGRQAAKTXDKKVETSELTFREGIVEVAKIIYAVHDEAKDKAFELELSWICEESKRQHQKVPNDLLEHAKAAAQTALEEMDAD

SEQ ID NO: 283169 - protein, 79 aa, Zea mays
  Clone ID: MRT4577_21348C.1.pep
WMDVPLRSFLYLSLNRSCCSLTGFGSVYGGNSAVPRQQSWSCLLRGEGHGHHQVRPGVKTETVLETKRLESIFVCFVYT

SEQ ID NO: 283170 - protein, 62 aa, Zea mays
  unsure (1)..(62): unsure at all Xaa locations
  Clone ID: MRT4577_21349C.1.pep
XSIVEVAKIIYGVHDEAKDKAFELELSWICDESKRQHEKVPNDLLEQAKAAAQAALEEMDAD

SEQ ID NO: 283171 - protein, 132 aa, Zea mays
  unsure (1)..(132): unsure at all Xaa locations
  Clone ID: MRT4577_2134C.1.pep
EVIYDLTVFLTWFSLFISGVVTARRKAGGIVADEVQPARSRSVNPTTNQLSQVIQLFVRLADRRLTFSGRNLCTLHCLDSPSRSLKIARIVTTKQQTRQWDEDQLASPWASALSTLDAXPGENGIPAGLEVP

SEQ ID NO: 283172 - protein, 81 aa, Zea mays
  Clone ID: MRT4577_21350C.1.pep
KLIRNAYQFNVPDPLANNETVQKIKGGAPGVKLSDLKRVGVAKECWVATNGQKTVFGPMNSQGKSGVFHQVFKGENVNPSS

SEQ ID NO: 283173 - protein, 249 aa, Zea mays
  Clone ID: MRT4577_21351C.1.pep
MSSIGTGYDLSVTTFSPDGRVFQVEYATKAVDNSGTVVGIKCKDGIVLGVEKLVTSKMMLEGSNRRIHSVHRHSGLVVAGLAADGRQIVSRAKSEAASYEKVYGEPIPVKDLADRVASYVHLCTLYWWLRPFGCGVILGGYDRDGPQLYMIEPSGVSYKYFGAALGKGRQAAKTEIEKLKLSELTCREGIVEVAKIIYGVHDESKDIAFELELSWICDESNRQHQKVPNELLEQAKAAAQAALEEMDAD

SEQ ID NO: 283174 - protein, 128 aa, Zea mays
  unsure (1)..(128): unsure at all Xaa locations
  Clone ID: MRT4577_21352C.1.pep
MGLHDGSPKQVEKARKATDGHEELSDSGPTTPLPNKKLLLFILDRLQKKDXYGVFSEXPVDPEELPDYHDIVKHPMDFSTIRKKLDKGAYSNLEQXEDDVFLITXNAMCYNSPDXIYYRQARGIFRDR

SEQ ID NO: 283175 - protein, 275 aa, Zea mays
  unsure (1)..(275): unsure at all Xaa locations
  Clone ID: MRT4577_21353C.1.pep
MGRSPCCEQAHTNKGAWTKEEDQRLIAYIKAHGEGCWRSLPKAAGLLRCGKSCRLRWINYLRPDLKRGNFSEEEDELIIKFHELFGNKWSLIAGRLPGRTDNEIKNYWNTHIKRKLLARGMDPQTHRPLAAAPAGGPQQQHCHYQMEPQKRAAAADHXRGRRCHQLAGRPAAAAATTTXPALAPPPRRRQRHLDIDLNLSISLAAYQPPEGTGSAIEPLTATTKREEGTAAAVCLCLNSLGYRAGVECACGSGGSPSSRSQWARDFLQAAPCYRG

SEQ ID NO: 283176 - protein, 97 aa, Zea mays
  unsure (1)..(97): unsure at all Xaa locations
  Clone ID: MRT4577_21354C.1.pep
FGKPGINHFLLLVLNIHNHVLFSPESLHKFPRRGNSGVSSVQAQQQSEEQKPVPQNSNQSGQNSAPATGMXVSASGNGDATXKHSLNFAPSTSAPSS

SEQ ID NO: 283177 - protein, 78 aa, Zea mays
  Clone ID: MRT4577_21355C.1.pep
TCYQRLKMRCMEEEKVIPLEWGDAIHHLYEEWLIKGSLFPVAAPVLVIEADHNMQKMLELFEQNRHRILTLENRKLGP

SEQ ID NO: 283178 - protein, 153 aa, Zea mays
  unsure (1)..(153): unsure at all Xaa locations
  Clone ID: MRT4577_21356C.1.pep
HSYGITNYLKPAVTRFLLHYELDFLVSAVANXPNNPFAGIDGGSKVSSKIGVIENLLAQVLILILSGRLNYXTFYNAQGYSVGKYLVQEDKPDLITNVIEKAEAXKGFLFILPHXIVVADNSADNTDSNIVPPTDIPDDCMGLDASPDATKTF

SEQ ID NO: 283179 - protein, 87 aa, Zea mays
  Clone ID: MRT4577_21357C.1.pep
MATAQAASASPTHHRASPGTSPPQPPYPSAARIADSACFPQYTASLKCLEANQDKTKCQQQFDDYKECKKKEREARLERNKTRSLFG

SEQ ID NO: 283180 - protein, 67 aa, Zea mays
  Clone ID: MRT4577_21358C.1.pep
VGFFFFFFFFFFFFFFFFFLKKIICKFKKRGGGGSPAPLKKGRFPPWGGPKVVNLGGKNHYGNGLLM

SEQ ID NO: 283181 - protein, 201 aa, Zea mays
  unsure (1)..(201): unsure at all Xaa locations
  Clone ID: MRT4577_21359C.1.pep
DAWAPHAQLHPRKAERERDRAAGAQPHVRRHHQEPAKNGVLGGGAAPTSAPSTLGLVXRGGSGPAXWRYRECLRNHAARLGAHVLDGCCEFMPSGGDGAAALACAACGCHRSFHRREAVPGGGVAVSPSAAVTPTPTAGANSSRAIPLLLAPPHMHTRPPHHVPASPASAPAALAESSSEELRGPAPAPGPXTHAQVAVVG

SEQ ID NO: 283182 - protein, 75 aa, Zea mays
  Clone ID: MRT4577_2135C.1.pep
LILSPFPQRQKQLRGMNFITTIDSTSPSFSPNTEISLPFSPKVPSALKPGPPLVPCTCTFITPPMLCMITSYHTY

SEQ ID NO: 283183 - protein, 59 aa, Zea mays
  Clone ID: MRT4577_21360C.1.pep
PLFFCGRRPNSSREKKTPGPRPKKKKKKKKKKKKKKKKKKKKKKKKKKKKKKKKKKKTH

SEQ ID NO: 283184 - protein, 152 aa, Zea mays
  unsure (1)..(152): unsure at all Xaa locations
  Clone ID: MRT4577_21361C.1.pep
PPPGGHAPQPRKPPQHPPQVRRQHPQHKQPPPQRPQGELKPXPPRTTGPLIERPPIPPAPPAGSPXRRQNKTHPPTRKEQRPPVHRKGQPKKTPPGGPVPLHGQGSKYGPPRPRKGVERVSQKKTPTXPQDRPKNGQAPMPGWLIPTPPSRG

SEQ ID NO: 283185 - protein, 61 aa, Zea mays
  Clone ID: MRT4577_21362C.1.pep
CSVIYLLNARLVAICMATSIHKKTHDSSSYLGCLNKQSSRTIIYCMTYKFFLAAEIQSQDK

SEQ ID NO: 283186 - protein, 42 aa, Zea mays
  Clone ID: MRT4577_21363C.1.pep
RQQTYIFFFMLAKRRVQLPHLVPFFFYSCFCLGDMETKNGLF

SEQ ID NO: 283187 - protein, 101 aa, Zea mays
  Clone ID: MRT4577_21364C.1.pep
NTRTRNASDSLSLSLFHSFVPCLPQDRHSSSDSTAANQTKVTATLRERRLVGQGKKKRANSLTHASSVVSSPPRPATRTLYVIVSNTAVPVGPSPPLQKLP

SEQ ID NO: 283188 - protein, 68 aa, Zea mays
  Clone ID: MRT4577_21365C.1.pep
GKTTISLWWFPERDFFDATEPFQILLLDRHYPSFTWVLQQAGAATKFFDGFWGPVSIRGGPTDKFYWH

SEQ ID NO: 283189 - protein, 103 aa, Zea mays
  unsure (1)..(103): unsure at all Xaa locations
  Clone ID: MRT4577_21366C.1.pep
MADARAAVAVKEECMLKVGEVESKRLHRFITFXMDHEFKEKIVDPIXDRGSSLGGLANSLPENDWPYPIXEFEFGTAEDVQKNKIFYXIVRAPSSGHAEEQKL

SEQ ID NO: 283190 - protein, 89 aa, Zea mays
  unsure (1)..(89): unsure at all Xaa locations
  Clone ID: MRT4577_21367C.1.pep
CARTAELSAQVALLRAINSCCFIGPPPAPRGSNSSRYPSRYTTGKSCTSREFADLVVDXDVVESTVELDYMDRFAYSDGSHGRAGGDAL

SEQ ID NO: 283191 - protein, 92 aa, Zea mays
  unsure (1)..(92): unsure at all Xaa locations
  Clone ID: MRT4577_21368C.1.pep
RXGVHATLTSAFNSSRSPSSSSTHPGGGQTSLFDRPPYWLTNTSPTKPIYIHPHLPSNLYFTSECESHTTPPFHNMSRIKIFYPTIKVKSEF

SEQ ID NO: 283192 - protein, 101 aa, Zea mays
  Clone ID: MRT4577_21369C.1.pep
MDTVTHYLQIHTVLKKKKKKKKKKKKKKKKKKKKKKKKKKKKKKKKKKKKKKKKNKKKKKKKHKKKKQEPKKQKKLLKTKLTIQRLRAVRIDQDFKERPLV

SEQ ID NO: 283193 - protein, 57 aa, Zea mays
  Clone ID: MRT4577_2136C.1.pep
MSFNSRTRNWKVTEGDPSFCNENNIKNSGQFRNQTKRLNTYAKKFIIGPPLTVVSVC

SEQ ID NO: 283194 - protein, 136 aa, Zea mays
  unsure (1)..(136): unsure at all Xaa locations
  Clone ID: MRT4577_21370C.1.pep
MSEYKNVVWGRLKLKGKALDLKEGGVKKKKKKPQLEKLFQIEPHELPKGXETLAFQLIPPMSLFKLARWEIKXRNFHPDFGPLPPAERRFIDPKPKIAMQKLAKVANKSPRGRIQGFHQYLANLSEPYDIPKVGPG

SEQ ID NO: 283195 - protein, 45 aa, Zea mays
  Clone ID: MRT4577_21371C.1.pep
GALFGPPSCSKMGGCFRLAWGYVPLSQKSLPFGHRIFCFPFPVLR

SEQ ID NO: 283196 - protein, 83 aa, Zea mays
  Clone ID: MRT4577_21372C.1.pep
MSRVSSLSPSLSGDEVEVEEEDDEGVDGYRKGGYHAVRPGDQFAAGRYVAQRKLGWGNFSTVWLAFDVQSQVGGRALWPPPAA

SEQ ID NO: 283197 - protein, 179 aa, Zea mays
  unsure (1)..(179): unsure at all Xaa locations
  Clone ID: MRT4577_21373C.1.pep
MLLCHGATSTACPRPRLPPGPLPWPALXKLAQIKPEQGRGSQEWMRAHRSIICVWYXPGLTAIKTTSAVAKEVQTENDQHVPNRPRNHITQRKEDNXGQDLIWSDSGPDYMKVRQLWNLGTXTPRSDEALRAKGGGERADMSRNVIRTGTAPGNEEKPMKRRKHLSMVSLNNITRLAFG

SEQ ID NO: 283198 - protein, 195 aa, Zea mays
  unsure (1)..(195): unsure at all Xaa locations
  Clone ID: MRT4577_21374C.1.pep
MSGQEGSQVCQDFSGNAGDEELPKSKKPVRDSTSAKEAPSTDISTRLLTVNGGLVPESSLMPVIGRNFHILKQLKINLLDIEXALPEEAFRASKSQQIRRRSWRAFVKDAELISYVVLAINFLQSMIKAEFLKKDWWYWSSFTAAIKTTTVSSLALRIYTLDDCIMYTKDPAPNLQPADNARSGNKGKRKKDIDS

SEQ ID NO: 283199 - protein, 47 aa, Zea mays
  Clone ID: MRT4577_21375C.1.pep
IFISLIKLHVCFSQKLALPFCIVFDNHPPDIALDFPKRLPESTMTWP

SEQ ID NO: 283200 - protein, 363 aa, Zea mays
  Clone ID: MRT4577_21376C.1.pep
MNKLASCFLQHGAPHTQIFKSYHVQRSPSLQLLENRSVSMTRHRAADRAARGTIVDVAVDSGTSFDFESYLSAKARAVHDALDLTLQGLRCPEVLSESMRYSVLAGGKRLRPVLAIAACELVGGTAAAAVPVACAVEMIHTASLIHDDMPCMDDDALRRGRPSNHVAFGEPTALLAGDALLALAFEHVARGSAGAGVPADRALRAVVELGSVAGVGGIAAGQVADMASEGAPSGSVSLGALEYIHVHKTARLVEAAAVSGAVVGGGGDGEVERVRRYAHFLGLLGQVVDDVLDVTGTSEQLGKTAGKDVAAGKATYPRLMGLKGARAYMGELLAKAEAELDGLDAARTAPLRHLARFMAHRQH

SEQ ID NO: 283201 - protein, 72 aa, Zea mays
  Clone ID: MRT4577_21377C.1.pep
PHMTPPVDISGRSWLKNLMLFQAYCSVTFLHALSSILSMNFSSASNMISTRFCTTTCSSSYRCTSMCAHSAS

SEQ ID NO: 283202 - protein, 101 aa, Zea mays
  unsure (1)..(101): unsure at all Xaa locations
  Clone ID: MRT4577_21378C.1.pep
RRLSVRDLKEKFAKGLSGACKLAEDGXRKNALXLYRQVLLKKLINGLNTLKGRVAGRNRYNAVEAILLREALTVQLTQQEGELMYEKAEVKKWVIFLKQAT

SEQ ID NO: 283203 - protein, 73 aa, Zea mays
  unsure (1)..(73): unsure at all Xaa locations
  Clone ID: MRT4577_21379C.1.pep
NRHEETSVQXPPPPXFXXSLTSRPPFXVFPAPVCLXFFLLLYRRLFSPTAFFFPRASCRGGRPLXSCWXAPLA

SEQ ID NO: 283204 - protein, 58 aa, Zea mays
  Clone ID: MRT4577_2137C.1.pep
NTHLKRNTIKGPFKHGLVTKLGGFHKKEPGRGALLTNAAGRQKNTGLPTARGLKNGWP

SEQ ID NO: 283205 - protein, 66 aa, Zea mays
  unsure (1)..(66): unsure at all Xaa locations
  Clone ID: MRT4577_21380C.1.pep
YAVCERPISXPYTFQPAMAXGSVPFLPWWLQQSLALFQQVPLVHLLAQNIRGQQLQQLVLANLAAY

SEQ ID NO: 283206 - protein, 70 aa, Zea mays
  Clone ID: MRT4577_21381C.1.pep
RKDGNQEKEDSSISEVSSVSQVSSVDTSSYSNECSVIRSQYRVGNLSRLKSFVFVGRCQVYLSCCSSENA

SEQ ID NO: 283207 - protein, 106 aa, Zea mays
  Clone ID: MRT4577_21382C.1.pep
SPETRSEENFQAEGGCVNIGVSFFPPSADPSTTFSEGLRALSLPYKTEPACSETLAVIQMVVHPARIGQGLLERGQLKSGNGCRNGKRSSTESLSRAASGPTSFAT

SEQ ID NO: 283208 - protein, 142 aa, Zea mays
  unsure (1)..(142): unsure at all Xaa locations
  Clone ID: MRT4577_21383C.1.pep
THIRYHLGNDVWTGHLXQTCTAVVKKGDHRGHTVAVMIISKANMTSGISSADVRMDVKILKSLSGQHNLVIFHDACXDXLNVYNVIVLSAGEDLLDRILPKCGRYPWEYAIAIIVQILSVQAFSHHHGVMHRDLKPENFLVT

SEQ ID NO: 283209 - protein, 675 aa, Zea mays
  Clone ID: MRT4577_21384C.1.pep
SGVGGEAAMLVPPPDVHLVWLCHCFHHESYSAYCTSRFGRLINRPSIFDMENEEYAEDLCRDVWATHFPSEPFDLDSNEIDGNSVDNITCDSVNGEIVKMVRQYAGLADRFASLFVQEGVYHVAARRRYVRFLDLMKKVACATQECTRLVPSLDILLMWLAHQSFPVCYATDMVAMGISDNVAKVGVCYGEVVSNEAVRRTKELWEDAYDEPYDMAGSEVDVGAVSTAREAFYWVPAASEEDANRLYKSLQPGFLIEVYVFLKGEFDKEPTSKEFLRLRTQRCHRSLKLNISMSNLSCKSWQKVWHLYCEFATRGLFVEFRRTLSGCFRKSKFLKNISFSWSDVLHEKALALTEQLDVRMRAMASITPPVQAPYLLKCVPDRVTDDGGAMISDVILRMRNYRPQEGRWLTRTVLDHSGRECFVIRMRVGRGIWRRGAETPMAVKWEDRSIEVREGSWSYIASTSSVGYAPEKIVGTGTVMKDQLENKVVWSLSTGDTLTISLGDELSFQLKNDSSEEEARLLVGRRLSYRVNTDNASSNLVEEEQYLTLVRKSPYHHGDRATVLLNWKLLAVEFLPEEDAVFVLLLCMVIARTMTEIRREDVAGLLVRRRISEARAGQRDWGSVMLPGSLSPDPHLQPWYRNATQVLSSAETGPVLTKYSPADGKDMLYRQALIP

SEQ ID NO: 283210 - protein, 294 aa, Zea mays
  Clone ID: MRT4577_21385C.1.pep
MARVRSTARVAREGEEAGASETGPISGMMKHSGLVVQEERKLGYFGENDDELVRFAEGRKVILDPRDVEVVVFKSFFKAGLRFPLYEMIAEVLKKFEIYLHQLTPNAIARLNVYIWALQSQGKSANAEGFCWVHELHYQTKARADGLHKNFGCYNFAYRKDTKAHVIGYRTKWPTGWTEWFYVKTDEKKREKLMTMTRFGKPCAEWLELIETLCNEILGNYTKKEDQLMTAAFGTRKKRRLNRVMDALNFEYPNYERLDEGAGGAKKKRVARILKRQAMWSIEKDQRARKNRKF

SEQ ID NO: 283211 - protein, 81 aa, Zea mays
  Clone ID: MRT4577_21386C.1.pep
TKDSWKPWAQSLFWPCELTLNVERGPPTVNRCGWKKMNAVHSWVGGRVPPFVFAVAGLRFFTRSLCLWLLQKKTKPWTKIS

SEQ ID NO: 283212 - protein, 125 aa, Zea mays
  Clone ID: MRT4577_21387C.1.pep
LFFCFLGYCAFVDAEHALDPALAESIGVDTNNLLVSQPDCAEQALSLVDTLIRSGSVDVVVVDSVAALVPKTELDGEMGDAHVALQARLMSQALRKLSHSLSLSQTVLLFINQVLSIHNFLGVSH

SEQ ID NO: 283213 - protein, 43 aa, Zea mays
  Clone ID: MRT4577_21388C.1.pep
PVDSTRPPSDRLHQRFRSILSMASASTRGCRMHQTLPLQTSRL

SEQ ID NO: 283214 - protein, 76 aa, Zea mays
  unsure (1)..(76): unsure at all Xaa locations
  Clone ID: MRT4577_21389C.1.pep
RGKKVLFQKKKKKKKKKKKKKKKKKKKKKKKIKLKKKKKKKFXKKKKKKFRGRNFFKKKKKKKKNSLGGAPFRGNF

SEQ ID NO: 283215 - protein, 82 aa, Zea mays
  Clone ID: MRT4577_2138C.1.pep
MAAKPVTVGDLIHRVASSCLSNRLPCNHTFRDSVDSDFDDDDDDPFADAVSSSEKCQRSPPAAEVEEEEEEDEKLKIWEERE

SEQ ID NO: 283216 - protein, 127 aa, Zea mays
  Clone ID: MRT4577_21390C.1.pep
RLPTVHRISAAAVSTVANKPAYAGMEIKKMACICLNTPSPNLCTRHGGNHSNYHQVVHPVTTLHMQVHPVHNLLKAHSMIPQEEVQTAATTDEGRGINLCEIYYLDAADNLRGWKGVILFPDAVTIH

SEQ ID NO: 283217 - protein, 122 aa, Zea mays
  Clone ID: MRT4577_21391C.1.pep
FFFFFFFFIIWGPLQLLWGKHPPKPPILQNTYNSFNPTKTPRPQKTNHPNKTLSPKPTHLGQTPQNQPAPLLTPPPETNHSPQKLVFNPNLKKLTLEKINFPQTIPQSHGRYPITPPRFFPP

SEQ ID NO: 283218 - protein, 92 aa, Zea mays
  unsure (1)..(92): unsure at all Xaa locations
  Clone ID: MRT4577_21392C.1.pep
VPRGRPGRESGTAQLSRRQSRRYADRNQYELSQQHQSKKKRKKNYDDHNMKKKHIKRKQRERNDNDLNKLNXRPTQQKKKNTKKTKKKKKKN

SEQ ID NO: 283219 - protein, 66 aa, Zea mays
  Clone ID: MRT4577_21393C.1.pep
VMLLSMNLGLFGLILGPYVRVDERAYYQVFDQCWNPTVHNVVCGNSKIRSIVTSTQDRCSFLDGIL

SEQ ID NO: 283220 - protein, 70 aa, Zea mays
  Clone ID: MRT4577_21394C.1.pep
FREQLPGESTPHLYWVALSWVVLLTALDRRLTANRAATDDALARSGGRTRAPLPRCHTYEPPHHFRQLLV

SEQ ID NO: 283221 - protein, 65 aa, Zea mays
  Clone ID: MRT4577_21395C.1.pep
GHGREGSERCTVVALGDLDGNGQADETCKMCNSGLGSALYRPAPQACACHSVFLVLLLDLYSPPS

SEQ ID NO: 283222 - protein, 44 aa, Zea mays
  Clone ID: MRT4577_21396C.1.pep
GGVCMYRLFLWWWCFVLIEGLCYEILSCVLATKNLFPAVFVYKV

SEQ ID NO: 283223 - protein, 183 aa, Zea mays
  unsure (1)..(183): unsure at all Xaa locations
  Clone ID: MRT4577_21397C.1.pep
QPGTXRVLAGXKGPWRTVVRPSMPPRXVVEXSLARRRXXELGXSGQRRGLPPAQRAXARARXXRSSPRSGTLPAGCXLKDAXXVRGPTRXXRSWCXGPGTLTSTTSPPPVSAGRAPAPXREWPAGPHGEPRXVVGDGEXVAALAAHRQXKAARQDAAGGPEPPATPPAIVGVLLCFMRRARPR

SEQ ID NO: 283224 - protein, 121 aa, Zea mays
  Clone ID: MRT4577_21398C.1.pep
PRVRPRVSRRTRSSSKQVVVATVALALLLHASHLAAGAEGETVTPLSTCETPICVPCWGKNQVCIAACVALRYTGGFCNGDTCVCTKQCLAEAEAVAEAGGPSPPPVQPPPLGKRGMGMLK

SEQ ID NO: 283225 - protein, 91 aa, Zea mays
  Clone ID: MRT4577_21399C.1.pep
FWSNPKPSGIPSVIISWKILPNTRLLSIKFSFDVVTVSHVQPIHSKKSEITQAWINAQMEYTRILRLTVCRYELIGLCVQKAPVWRCRPQV

SEQ ID NO: 283226 - protein, 43 aa, Zea mays
  Clone ID: MRT4577_2139C.1.pep
LLLLTELLLLSHLFLGHRLLLRHGASTSLNRSSKIKQELVSKS

SEQ ID NO: 283227 - protein, 154 aa, Zea mays
  Clone ID: MRT4577_213C.1.pep
LPASVRPSSTSRPAASHSRNPSPTRRPPALPLPIFSRRAAYSARTARASALPATRRELLPSTLPVARRKLCAGDGGALPVTGGYGGIVPLGPSSIPVRRRQPTGDGETMDEFEERLFGGKDTDKGSLYEKLDRAENTGRRYNMGSGMGWFDWVK

SEQ ID NO: 283228 - protein, 88 aa, Zea mays
  Clone ID: MRT4577_21400C.1.pep
TNSTPVARRGTYEDPTFKFQIPLQVAAEREMARLLIGDPNFSWTVGFKEFAHPATETFSTIAQAGPTFFLAIAMFGFVFQISALVAEK

SEQ ID NO: 283229 - protein, 220 aa, Zea mays
  Clone ID: MRT4577_21401C.1.pep
LSFFASNNASHIFLTKTHASAHASAPWLPDLRRGRGSLQALNMGGVEGGRRSGEDGGQVGLLDGIHSKAGVAGLEKGRKPDGRGSVRAESKQGAQAKGTSSPARAQTLRNALRAGLEMESSGSVPWLRSTLEEGRRSRGRKMAGEELGADAPTALTTVEARAGARVGHGDLLLSARAKEGPSRRGSCRGGCVAPWEREEIPSLLSCGRRRSSTGETACPA

SEQ ID NO: 283230 - protein, 613 aa, Zea mays
  Clone ID: MRT4577_21402C.1.pep
MQEVSDPPETVRKAETKNITSIGKDVIFEQDPCSSYQLWGSMKFEEDGHLLSQAKRDLSHLDYRAQSADTKYVTELGSHACLKDPLPMGRDYHRQKLQFSTSDCSFEKASALEAASSSPDALGTMRTKIKSSTLSASPDYLSSYPTAAPCMRKCPGAVELDHGLGHSEQSYRRSDQFTFFSSRNARSVENCKEMVQYARGFHHADEINPVPSQWCFEDEGPSVSRGLQYGDEIPSLSRKKYNVAPSRSSQWHYGPQTALSSRRPDYGDEIPSLSLHYGYRDRTRLRSGNWCHDAEAHIPSRYQQGTSHGNGHSRNCFSRINTNEQAKVITSKHTFAKPRMINRNCSDQHRINMKGNRWRNSEDLMDQVRGPRANKLNNASVSSTVKDITSPLIRRNQYNRSDFSVQYNQAKFFMIKSYSEDDIHKGIKYNVWASTPNGNNKLDAAYHEAQNLMDSGERCPVFLFFSVNTSGQFVGLAEMLGPVDFKKTMDFWEEDKWSGFFPIKWHIIKDISNRLFKHIILENNDNRIVAFSRDTQEIGLPQGVQMLKIFKEQPQGTSILDDFDFYEEKANARRTQKRGNSESTYGARFSDDSKSMENLEANMESWSLFETLE

SEQ ID NO: 283231 - protein, 44 aa, Zea mays
  Clone ID: MRT4577_21403C.1.pep
LYKETHWIIDQRVFPEYQLNTSYISMPQDRTLVQTTYKTLRTYK

SEQ ID NO: 283232 - protein, 171 aa, Zea mays
  Clone ID: MRT4577_21404C.1.pep
QAPRIRVWIPSRRPWIRSRQRPWVRSRAAPLDPLPRGAPGSAPARRPWVLYRRRPWVLYRRRPWVSSARRPWVSSARRLQSSDGCKMQEVSDPPETVRKAETKNITSIGKDVIFEQDPCSSYQLWGSMKFEEDGHLLSQDYRAQSADTKYVTELGSHACLKDPLPMGKRLS

SEQ ID NO: 283233 - protein, 115 aa, Zea mays
  unsure (1)..(115): unsure at all Xaa locations
  Clone ID: MRT4577_21405C.1.pep
VICTPLFVENYASYTAAGNLIWNKENKHGGLNSMGESCGPETRGLGVRNRNSVLSVYPVCSTYSNIFFCYMSFSDIFLIGRKIWRQTWRVGVCSRLWSNAXIDICTIEIKIKMGQ

SEQ ID NO: 283234 - protein, 194 aa, Zea mays
  Clone ID: MRT4577_21406C.1.pep
MADEEQTPGSRKRVAGTQINKDNPEPDDDEPEQEMGTFKKATEEVMATRIIVKVRRQQTSSAPSNPFSAIRFAPTDSSVQTCAPVPQVQPSDVKGDEGCNGTGKNTLSVPDKNAGSGVNTDSGATTEAPPQPVGTSDKAEGTEAESGGDKVVAGKPNEGSCMSSEVQGKTKEGDAEEKEADEAGNNGTFSKDDT

SEQ ID NO: 283235 - protein, 441 aa, Zea mays
  Clone ID: MRT4577_21407C.1.pep
MADEEQTPGSRKRVAGTQINKDNPEPDDDEPEQEMGTFKKATEEVMATRIIVKVQPSDVKGDEGCNGTGKNTLSVPDKNAGSGVNTDSGATTEAPPQPVGTSDKAEGTEAESGGDKVVAGKPNEGSCMSSEVQGKTKEGDAEEKEGADEAGNNGTVSKDDTEKKGGGESETKDCLSEEQRDAGKISKDKSEQKDGGESHQKDADNKGQTSSATSLFSFTNLSSGQNAFTSLTGTGFSSTSFSFGSASTDGPSTGPLFGLKADGSSFPSFSLGAASNGSSATVLATSAEAPKKFAMAEGPVETGEENEKAVFTADSALYEYLDGGWKERGKGELKLNVPVSSSGGERARLVMRAKGNYRLVLNASLYNDMSLKDMDKKGVTFACMNSIGESPSSLATFALKFKDTATREEFKDAVEFHRASKAPDEPLKAPENSSKAAEAEA

SEQ ID NO: 283236 - protein, 68 aa, Zea mays
  Clone ID: MRT4577_21408C.1.pep
GQLRTFLRGNSINTVCLYCGVPCYRLERQLHSVSGSYVIVQTEGRGNIFYIKQQFRWILKGRDYAQTT

SEQ ID NO: 283237 - protein, 160 aa, Zea mays
  unsure (1)..(160): unsure at all Xaa locations
  Clone ID: MRT4577_21409C.1.pep
KDHIAKENAGFTAQLILMNLRGRFDVAYAPVMSCHSSXFALKFLHVLXNIGRRSVKELXERXKFVKSGISVLVNMVXPHRPMLVQSFSEYLCLGILAVHDIRQSFSWGVIESVNNMDSAIAKVAKTSPNNIMMIIPHVIHGCLVSLLVVVFCWVVLVVVS

SEQ ID NO: 283238 - protein, 245 aa, Zea mays
  unsure (1)..(245): unsure at all Xaa locations
  Clone ID: MRT4577_2140C.1.pep
MPEAPSAQPAPASGYAPGAHREALDFIEHVTANAGKVQQRVLAEILAQNETAEYLRRYGVSSSSSPLDPVDAFRRCVPLVTYEDLQPDILRIANGDSSPILSGKPISEFLTSSGTSGGERKLMPTIADELDRRSLLYSLLMPVMSQTLPGLDKGKAMYLLFVKAESRTPGGLAARPVLTSYYRSRQFLDRPHDPYTAYTSPNEAILCVDSYQSMYAQLLCXLVHRTDXLRVGAXVXSGFLAHTLP

SEQ ID NO: 283239 - protein, 68 aa, Zea mays
  unsure (1)..(68): unsure at all Xaa locations
  Clone ID: MRT4577_21410C.1.pep
TSWRKIKIGINGFCWIRWLVARVALQSDDVXLVCVNDRFISTDYMTYMLKYXDTVHGQWKHHEVKVND

SEQ ID NO: 283240 - protein, 92 aa, Zea mays
  Clone ID: MRT4577_21411C.1.pep
VGPRPSGPLMLGCVALVPGVALVQPRAALVRPLAVLVRLAAQSVRGVGVRAPRPLRVFHVLLVLVAPAPAPVDPPAWAALDAMNAVRLAPGA

SEQ ID NO: 283241 - protein, 93 aa, Zea mays
  unsure (1)..(93): unsure at all Xaa locations
  Clone ID: MRT4577_21412C.1.pep
WVKKDFFWVGPFLGRFFFMGRVVHGLSWGRGFGLGLFIFGWVQWGFGLFHFISLGSKDXGFRSQKIFVVPLLPMLLDDIGSRAVLRACVRVPR

SEQ ID NO: 283242 - protein, 409 aa, Zea mays
  Clone ID: MRT4577_21413C.1.pep
MTPSVHADEYVRPPQRPLALMAHDKPASHPQQVHISAVGAHHMRITWVTDDRSAPSVVDYGTSPGQYDASETGYQATYQFLSYTSGAIHHVTIGPLEPSTTYYYRCGRAGDEFSFRAPPATLPIEFVVIGDVGQTEWAASTLSQIGAADHDMMLLPGDLSYADRQQVLWDSWGRLVQRLASARPWMVTEGNHEKETLREHETVQRFVAYNARWRMPHEESGSRSNLYYSFDASGGAVHVVMLGSYADLEEGWSEQHAWLRRDLAAVDRRRTPWLLVLMHVPWYNTNRAHQGEAEAMRRDMESLLYEARVDVVFACHTHAYERFARVYDKKANSQGPMYITIGDAGNNKAEKFMSGHELAHLSLFREPSFGYGRLRIIDNRRAVWTWHRNNDKDAQVSDEVWLESLATSP

SEQ ID NO: 283243 - protein, 41 aa, Zea mays
  unsure (1)..(41): unsure at all Xaa locations
  Clone ID: MRT4577_21414C.1.pep
PGVLLAFVMPLXQDRPITPSKHLQLDQKLLTHTLIKTHQAT

SEQ ID NO: 283244 - protein, 133 aa, Zea mays
  unsure (1)..(133): unsure at all Xaa locations
  Clone ID: MRT4577_21415C.1.pep
HAGVAARHGVVGSGKWNPGMAGNSGFGGSSTSGNGGISTLGSGGSSTSGNGGISTLGSGGKSCSGTGRSGTVRWGSPSLGVATSSSLRAAXAHGGAGKEQQESEGGRGGSRGHVDRNVSRGVQSWGSARPASR

SEQ ID NO: 283245 - protein, 264 aa, Zea mays
  Clone ID: MRT4577_21416C.1.pep
MADHQRIHPADLEAGNRPLMPGGSFRSDKGDPAQRAKQQQQQGYVPGALPPPPRRVAPPAPLPPPKRRGRGCCCRLLCCAVISAAVLAVLAAAAAGALYLALDPKAPRYSVDRLSVSAFQVDPATLAARARFDVAVTAANPNSRIAIQYEPGSSLGVWYQSYRLARGALPPFYQGHRNTTVLALAMAGEAQLGGAAVAGMQDAQRTGAVPLVFRADVPVRVQLGTFKLWKVTARVRCDLVVDRLMDVTSLIKIKAGNCKFSLKL

SEQ ID NO: 283246 - protein, 275 aa, Zea mays
  unsure (1)..(275): unsure at all Xaa locations
  Clone ID: MRT4577_21417C.1.pep
MADHQRIHPVDLEAGNRPTTPLVPGASFRSDKGDPAQRANNHHHQQQQRGYVYVPGPLPPPPRRAAPPAPPLPPPKRRGRGCCCRFLCCAVITAVVLAVLAAAAAGALYLLLDPKAPRYSVDRLAVYRXFQVDPSTFTARAGFDVAVTAANPNSRIGIQYEPGSSLGVWYQSYRLARGALPPFYQGHRNTTVLALAMAGEVQLGGAAVAGMRDAQRSGAVPLVFRADVPVRVELGTFKLWKVTSRVRCDLVVDRLMDVSSPIKIKASNCKFGLKL

SEQ ID NO: 283247 - protein, 121 aa, Zea mays
  unsure (1)..(121): unsure at all Xaa locations
  Clone ID: MRT4577_21418C.1.pep
GRCFRVPFGRFFXLVGLGGCRWRVFLRCLVLPVALVPLRLVFCALCXXRLWPLRSXFRLLFPVCXGWFFLCLCAXLVPPPCXXGXCGXXCXWRXAVGGXCCWCRGRRRRRLAFSRPLLLCA

SEQ ID NO: 283248 - protein, 81 aa, Zea mays
  Clone ID: MRT4577_21419C.1.pep
GPQGMQWPTCTDASTADCSNNLTPKEVNRHGDGTDPLLAQLVQGAKEVWTGAPCTTTCCAGQARIGMPLPQRSSCNQWLRL

SEQ ID NO: 283249 - protein, 107 aa, Zea mays
  Clone ID: MRT4577_21420C.1.pep
MDASEEISQRLRPEKKPCADGESQQHSPPASMVPVSKVLDDDNLLIEILLRVSFPTTLVCAALVCKRWLCHASDPKFLSLFRKRHPPRLLGFYIYMGSAWVWLGAPL

SEQ ID NO: 283250 - protein, 65 aa, Zea mays
  Clone ID: MRT4577_21421C.1.pep
ISSGAFLFFSLAQIRWCRVPVVALGGVQGSLMPMHSATASALLTSMLGLKPDSWGWLSEGFATPL

SEQ ID NO: 283251 - protein, 91 aa, Zea mays
  Clone ID: MRT4577_21422C.1.pep
VRRALVALRSGSPSTISATLSRQAAARSSELAGAPLPRASRRRLGISRVPVVALGGVQGSLMPMHSATASALLTSMLGLKPDSWGWLSEDC

SEQ ID NO: 283252 - protein, 40 aa, Zea mays
  Clone ID: MRT4577_21423C.1.pep
SQARDKLEPSLPGSRRSTQGAITATPVNSVSDYTCMHERV

SEQ ID NO: 283253 - protein, 155 aa, Zea mays
  unsure (1)..(155): unsure at all Xaa locations
  Clone ID: MRT4577_21424C.1.pep
MSYLSSAAVTAPYFAAPATGRAVITTKPFTVCASLRKATGTATAAMCASALLAGGAMAQEVLMFAGDDALIXETRQVTVKDADTITFXNNAGFPHNDLFYEDEEPSVAYATKISHDEYLNAPRETYSVTLTVTGTYGFYXETHQGAVMCGKITDN

SEQ ID NO: 283254 - protein, 107 aa, Zea mays
  unsure (1)..(107): unsure at all Xaa locations
  Clone ID: MRT4577_21425C.1.pep
EILMRTEKETAVPASHDAGYEKLLVDRLTLMPGKISALAKSIRTFARLXEHPINQLLKRTEIASNLILENTSCTSGVLLDIFESRPDALVHIASLAIXSSSALLLIS

SEQ ID NO: 283255 - protein, 77 aa, Zea mays
  unsure (1)..(77): unsure at all Xaa locations
  Clone ID: MRT4577_21426C.1.pep
ARIXYCGRPGFFFLNRGYIVHDPQGSSCMQPISMPYSPLPRAVRTINDGKAHPANNAFSRRDVQRPRCLVKTTTTPC

SEQ ID NO: 283256 - protein, 37 aa, Zea mays
  Clone ID: MRT4577_21427C.1.pep
DYKIPILACLTCRIMSLNLISITSCVCLSHVMAWHHM

SEQ ID NO: 283257 - protein, 583 aa, Zea mays
  unsure (1)..(583): unsure at all Xaa locations
  Clone ID: MRT4577_21428C.1.pep
MDSGIWASVWSFIKFLPFFFALLLLGIIKGALFGPWAWLVMTIGISALILGLWPMHVIWTYYCIIRTKMVGPVVKLLLLIVATAVLVIWLIIGVVGSILAGLAYGFLAPVMATFDAIGEGKENPLVHCFLDGTWSTITGSCTVVRDMKDMLVHSYFSIMDEVRLXTSRRQXYEIRLLQIPGAIFAAACGLVVDAIMFTLIALYKFPVMLFKGWKRLIEDLIGREGPFLETACMPFAGLAILLWPFAVIGAFIASVICSVPFGVYAAVVVYQESSLFLGLSYAISSVSIFDEYTNDVLDMAPGSCFPRFKYRTNEASSHGGSLSRPASFKDKHDGKKAPQRVTSFKSSFDEFNPFKLLDHLFIECKHHGKDLVAEGVITSKDIEGTKAGKASTGVLNVGLPAYVILKALLRSAKANSDGLVLSNGSEITSDNRPTSKIFEWFFDPLMVIKDQIKAENFTEEEEAYLEKQVLLISDPKRIKENLIRLPPLSERKQAEIEAFARRLQGITKSISRYPTSKRRFDALVKALSEELXDNGXNQSANGSQVRKMRSGIVRMLSQRSLGKATGIPGDDHEAQLTSDGFTS

SEQ ID NO: 283258 - protein, 67 aa, Zea mays
  Clone ID: MRT4577_21429C.1.pep
SSIIVSFSTTSLLFQSNGAETKTLGKPHISKGGKQNTPLTKKKKPPIIQQKPPPISGTKSSHSQHTQ

SEQ ID NO: 283259 - protein, 677 aa, Zea mays
  Clone ID: MRT4577_2142C.1.pep
MDPKGKGMVVNDKEKESFVNDPKDDKPTDSGSSHKRKDGKKKKTRRIKEIVYYDDSDESSSSQKDNDDNDYEKKKTVNSNFSFDYSRIPQSTNAHLLSIPLGKPPHFDGEGYGFWSHKMHSHLFSLHPSIWEIVESGMKFDSTDSPIFINEQIHKNAQASTVLLASLCRDEYHKVSGLDNAKQIWDTLKISHEGNDVTMHTKMELVEGELGRFAMIRGEEPTQTYNRLKTLVNQIRSYGSTRWTDHDVVRLMLRSFTVLDPHLVNNIRENPRYTKMTPEEILGKFVSGRMMIKEARYVDDALNGPIHEPQTVALKATRGKEVLPSKVAQVEAMGLNEEEMALIIKCFKTALRGRKEHPNKSKTKGKRSCFKCGKIGHFIANCPDNDNDQEQEKKREKKNNYKKAKGEAHLGKEWDSDCSSSDSDNEGLTASAFNKSSLFPNEHHTCLMAKEKKVCTRNNTTYASSSEDESSDDEIDYAYLFKGLDRTKIDKINELIDALNDKNRLLEKQEDLLYEEHDKVVEAQKSLALEVKRNEMLSCELSTCHETISSLKSINDDLNAKLEIANKSTSCVNHVVICNRCKDFNVDACSEHLVCISKLSDEVASLNAQLKTSKSEFDKLKFARDAYTIGRHPSIKDGLGFKREAKSLTSHKAPISSKEKGKAPMTNSSQKNHAFIY

SEQ ID NO: 283260 - protein, 67 aa, Zea mays
  unsure (1)..(67): unsure at all Xaa locations
  Clone ID: MRT4577_21430C.1.pep
SFSFQLIXXXXITXTPLLXXXXQPXIIXLLLFNLIFQIPLTFXXVNTXFGXSKLXXSKSPFXXQTKA

SEQ ID NO: 283261 - protein, 347 aa, Zea mays
  Clone ID: MRT4577_21431C.1.pep
MGSLDTNPNAFSAFGVDATTGFQPLHPDDVRAYLHKAVDFISDYYKSVESLPVLPDVKPGYLRQQLRSAPPTSSAPFDVTMKELTDSVVPGMTHWASPNFFAFFPSTNSAAAIAGDLIASAMNTVGFTWQAAPAATEMEVLALDWLAQLLRLPPSFMNRTGAAGRGTGGGVILGTTSEAMLVTLVAARDAALRRTGSQGVSGLPRLAVYAADQTHSTFFKACRLAGFDPANIRCIPTGPETDYGLDPARLLEVMQADVDAGLVPTYVCATVGTTSSNAVDPVRAIADAAAVFNAWVHIDAAYAGSACICPEFRHHLDGVERVDSISMSPHKWLMTCLDCTCLWVRDT

SEQ ID NO: 283262 - protein, 101 aa, Zea mays
  Clone ID: MRT4577_21432C.1.pep
RPVREKKSTDSLKNGELKANAVSHHTAAAGSGGGAIAPYRLLLARVKAACAGGGGARGAELRLHPEAGALHLQPQHPRRVPPAGQAARPAYQGPDHSRRAM

SEQ ID NO: 283263 - protein, 125 aa, Zea mays
  Clone ID: MRT4577_21433C.1.pep
PRVRPRVRGRVGTSDSLNKKKKKNTRRNREQMLSSTTLRPPASPAPAHLTICSCFLPAAWRRAPAAAVRAVRNYDSIPKREPFTSSRSTLDEFLRLDKPLVQRTKDQITGMRYLLGRPHRRRLGA

SEQ ID NO: 283264 - protein, 248 aa, Zea mays
  unsure (1)..(248): unsure at all Xaa locations
  Clone ID: MRT4577_21434C.1.pep
MDGGGGGGGGGGSTSGDDGKQEKHLVLAHKLFLLSHPDVDDLSKVDLRSDVLSAVKSDDMAPLFESLAAAGVLEPDAVLLSEMRARIDEEIRKLDEKIADAEENLGESEVREAHLAKSLYFVKVGEKEKALEQLKVTEGKTVAIGQKMDLVFYTLQIGLFYMDFDLISKSIDKAKKLFEEGGDWERKNRLKVYEGLYCMATRNFKKATXXLFLDSISTFTTYELFPYDTVIFYTVLTSIISLYRVSLK

SEQ ID NO: 283265 - protein, 102 aa, Zea mays
  Clone ID: MRT4577_21435C.1.pep
FALQSVCGYVPKEFISDHGFKSSNPRKHSMHGAFGARLVRSSHLDYSSCLKAPTRCEVEQAITCIALSAPSHCVEIFILYRLKAPVLVRGGGRRQVSASNRE

SEQ ID NO: 283266 - protein, 43 aa, Zea mays
  Clone ID: MRT4577_21436C.1.pep
FEIFNYFWEWDIGGGRNFWGKQKISCSIFRRLSPQHYEGSEVS

SEQ ID NO: 283267 - protein, 91 aa, Zea mays
  Clone ID: MRT4577_21437C.1.pep
KIGREDFTPKETFAPGPKPKSPRPQTKQFPPNPKTKSLKTHLRGLAPTPERDPGPKIGFKLRNSPNSLDQSKTHSLWGILLENRQELGCPL

SEQ ID NO: 283268 - protein, 57 aa, Zea mays
  unsure (1)..(57): unsure at all Xaa locations
  Clone ID: MRT4577_21438C.1.pep
PPSRAIGGGRNGAMTVLGDFMGGVGSRNGKMLPGAIIKPKFETLXKEKGAEPGFFGF

SEQ ID NO: 283269 - protein, 76 aa, Zea mays
  Clone ID: MRT4577_21439C.1.pep
LPYNVSLMPPKNETIRKDKLSFVTTKHAPYIPRLSLKGNFYKAKMSAYNPQLLVAAKNHRALPPSPLCLRSHHIPD

SEQ ID NO: 283270 - protein, 98 aa, Zea mays
  Clone ID: MRT4577_2143C.1.pep
SPWSACLHNLLTNLSLLTLPPSQHRGKGSPGISRTSSRRGVASSQSHRICIGFSVRSTKRLRECRKMSLHVEELICEGLGMKARHTFHSMPALDDSEA

SEQ ID NO: 283271 - protein, 111 aa, Zea mays
  Clone ID: MRT4577_21440C.1.pep
VLDREGRPFFFFFFFLFFFLWQAITILGFFIQNSILVYYSPNLYFLFTEREDRFPQRILHDQLQGAQDFQSYVHPRISSCARPSASSFHIFSCHNTGQLARASSMPNSDPF

SEQ ID NO: 283272 - protein, 41 aa, Zea mays
  unsure (1)..(41): unsure at all Xaa locations
  Clone ID: MRT4577_21441C.1.pep
GSGYATCLATGXRPRPARHRRAPLHLSSVLVLALAPCVALA

SEQ ID NO: 283273 - protein, 207 aa, Zea mays
  Clone ID: MRT4577_21442C.1.pep
MGKRKRSSCQRDNHNDSLASKIMRTRIPDLPEVVDAPMLPTKFLCLKHLTVRLSSGTTITQAFDYFSLVSFLDASPSLETFILNVSGKGMIHESISAHPQLRHTPEHHHGHLRSVKICGFSSEKSLFELTRYILENAVSLKFLTLDTFYGDRCGQGKCTSCLPTPDVFMDVSKAISGIKTYIENKVPSTVKLTVLEPCSRCHVRRVI

SEQ ID NO: 283274 - protein, 140 aa, Zea mays
  unsure (1)..(140): unsure at all Xaa locations
  Clone ID: MRT4577_21443C.1.pep
MGKRKRSLCQQDNHNDSLASKIMRTRIPDLPEDIWSHVHSLMPMRDAGRAACLSRAFLRSWRRHPNLIFNKDTIGMKKNSYGENFHHIISRILRNHSGISLKTFKLDYSGMXGSMELYLDSWLQAALNPGIEELTENIQA

SEQ ID NO: 283275 - protein, 260 aa, Zea mays
  unsure (1)..(260): unsure at all Xaa locations
  Clone ID: MRT4577_21444C.1.pep
MTDHFALGLGALLLLLLSSSCFSSDLDVQCLRDVKQSVTDPTGILKSSWVFDNTSVGFICKFPGVECWHPDENRVLALRLSNFGLQGPFPKGLKNCTSMTTLDLSSNSFTGAIPLDIQQQVPFLASLDLSYNGFSGGIPVLIYNITYLNTLNLQHNQLSGEIPGQFSALARLQEFNVADNQLSGTIPSSLQRFPASNFAGNDGLCGPPLGECQASAKKQEHCINHRGXVGVVVVVIIGAIVVFFCLRRVPAKKAAKDEDD

SEQ ID NO: 283276 - protein, 84 aa, Zea mays
  Clone ID: MRT4577_21445C.1.pep
HYTHKLSELLFGPSVAFYSTESTPRILRGETVFFRGYRYRTNLPCLIYFVLATITILFVWQISLLPPWVKESGRCVNKITIMIL

SEQ ID NO: 283277 - protein, 482 aa, Zea mays
  unsure (1)..(482): unsure at all Xaa locations
  Clone ID: MRT4577_21446C.1.pep
MGKRKRSSCQRDNHNDSLASKIMRTRIPDLPEDIWSHVHSLMPMRDAGRAACLSRAFLRSWRRHPNLIFNKDTIGMKKNSYGENFHHKISRILRNHSGISLKTFKLDYSGMCGFDGTSYLDSWLQAALNPGIEEVTLWLFHTRRIYEFPCSLLSDGVRNSLRYLKLRCCALRPTVELAPMRSLTSLHLSFVSIKWNGLKRLLSNSLALEELELVCCDKIVCLKIPSALQRLNSLNIFGCSALKVLESKAPNLSXVFLFQXGGGLVFSLVKTLQMKKLITESTVYDARTRLPSIMPNLETLVINSFHQVVDAPMLPTKFLCLKHLTVRLSSGTTITQAFDYFSLVSFLDASPSLETFILNVSGKGMIHESISAHPQLRHTPEHHHGHLRSVKICGFSSEKSLFELTRYILENAVSLKFLTLDTFYGDRCGQGKCTSCLPTPDVFMDVSKAISGIKTYIENKVPSTVKLTVLEPCSRCHVRRVI

SEQ ID NO: 283278 - protein, 93 aa, Zea mays
  Clone ID: MRT4577_21447C.1.pep
NKKRGILNFRAFFRGRGTFGHTFKIHFWEGFLANRSTGDFLSSKGGGTTRNTTGATATKAWPSTKKATGAKPITRFSPGRGKTPTKGRTPKAP

SEQ ID NO: 283279 - protein, 222 aa, Zea mays
  unsure (1)..(222): unsure at all Xaa locations
  Clone ID: MRT4577_21448C.1.pep
GQKTISPLPRIYNIVDSMAGCEVMSLLDCFSGYHQIYMKEEDKAKTSLITPFGTYCFVRMPEGXKNVGSTFSRXTKSILESKMGRNNFTYVDDIVIASKNKEDNLXDLTETFANMREARLCLNPQKCIFDIRQGKILGYLVSHRGIEANPSKIXTIMDMAPPQSTRDVQXLTGRLAAFNRFISRSTERCLPFMKMLRGAKDFAWGRKQAAAFESLMQARVPD

SEQ ID NO: 283280 - protein, 81 aa, Zea mays
  Clone ID: MRT4577_21449C.1.pep
GKSLVSLPWGMPLIVLAKKKLLCASVAILYCPGCSEHTHPLLRNPNRVFGYKGSASKAWDWSKNFPSFSGLQKRVKTGLPL

SEQ ID NO: 283281 - protein, 741 aa, Zea mays
  Clone ID: MRT4577_2144C.1.pep
MTTSRPLELLHMDLFGPVAYLSIGGSKYGLVIVDDFSRFTWVFFLQDKSETQETLKRFLRRAQNEFELKVKKIRSDNGTEFKNLQVEEYLEEEGIKHEFSAPYTPQQNVVVERKNMTLIDMARTMLGEFKTSERFWSEAVNTACHSINRVYLHRLLKKTSYELLTDNKPNVSYFRVFGSKCYILVKKGRNSKFAPKVVEGFLLGYDSNTKAYRVFNKSSGLVEVSSDVVFDETNGSPREQVVDLDDVDEEDIPTAAIHTMAIGDPFRVEEALLDPDWVLAMLEELNNFKRNEVWTPVPCPKQNVVGTKWVFRNKQDEHGVVTRNKARLVAKGYAQVAGLDFEETFAPVARLESIRILLAYAAHHSFRLFQMDVKSAFLNGPIKEEVYVEQPPGFEDERYPDHVGKADPTLFTKTCDGDLFVCQIYVDDIIFGSTNQKSCEEFSRVMTQKFKMSMMGELNYFLGFQVKQLKDGTFISQTKYTQDLLKRFGMKDVKPAKTPMGTDGHTDLNKGGKSVDQKAYRSMIGSLLYLCASRPDIMLSVCMCARFQSDPKECHLVAVKRILRYLVAMPCFGIWYPKGSTFDLIGYSDSDYDGCKVDRKSTSRTCQFLGRSLVSWSSKKQTSVALSTAEAEYVAAGQCCAQLLWMRQTLRDFVYNLSKVPLLCDNESAICMADNPVEHSRTKHIDIRHHFLRDHQQKGDIEVFHVSTENQLADIFTKPLDEKTFCRLRSERNVLDSQNLD

SEQ ID NO: 283282 - protein, 113 aa, Zea mays
  Clone ID: MRT4577_21450C.1.pep
DAWADAWADAWVFVDEEPVEENTPKVLLSKRKIMSPTSQEKLCSALTGIDLCDGVQRFKSKIIIEDHENTPKSLLLMSFLFLQQCATNGWKAERNNQTSGQSSKFVLSFMDWR

SEQ ID NO: 283283 - protein, 357 aa, Zea mays
  Clone ID: MRT4577_21451C.1.pep
MGRAPCCDKASVKKGPWSPDEDAKLKAYIEEHGTGGNWIALPHKIGLKRCGKSCRLRWLNYLRPNIKHGDFTEEEEHIICSLYISIGSRWSIIAAQLPGRTDNDIKNYWNTKLKKKLLGKRAPSRRARTNQDPCYLAAGAASSSSSSAATATQALSASALERIQLHMRLQGIYGALACNDDSNAAFGSAAAALPQWPKLEALSQANRLLPGSLPADAMATTVSVQPHPQHLVEVDHHQSLAAAALEGEQQLSSAGEGGFFERPKVDFYSPSAEVAAAAAASVEMNSVAPMVVGGYAGAAGFGPQHHHDELYDFLYSKYGSVGGLAHDGGHVPTLPELQCPDGAAAVVGADEKFSAWT

SEQ ID NO: 283284 - protein, 52 aa, Zea mays
  Clone ID: MRT4577_21452C.1.pep
MAQQQTQLTTGSGILDAVPLFVVILLAAHVLALVFWMYKLASEKQPPRRKTQ

SEQ ID NO: 283285 - protein, 53 aa, Zea mays
  Clone ID: MRT4577_21453C.1.pep
QVLSFPSISDTTCYYLHIDVNSSAEETLINVMNPYTITNHRKLHTKADHKHIL

SEQ ID NO: 283286 - protein, 244 aa, Zea mays
  Clone ID: MRT4577_21454C.1.pep
MAAPSAAVIGVLVLLVVGASGARLPGRGSTTRGAALPRGGAPATAVFALGSFWRSEAAFGCLHGVIRTSVGYAGGSKSNPEYRNLADHAECVKVEYDPRLIHYRQLLDVFWASHDPREVFGQGPDVGNQYRSVIFTNGTIEARLAGLSKEKEQAKDRSSVVTTQIQPLGVFHHAEPEHQKFELKRKPFLLQLIGNLPEEELLTSTLAAKLNAYAAELCPVNTQKRINSKIDEVTKKGWPILRDI

SEQ ID NO: 283287 - protein, 138 aa, Zea mays
  unsure (1)..(138): unsure at all Xaa locations
  Clone ID: MRT4577_21455C.1.pep
QGLLNNIINLNANAMGAGKTGMETFYKFCKYHNHSHPLIRAHYDPDACGWTFGMNSLDLVEWRTKNDTGVYHYWQKRNADHTLWKLGSLPPGLLAFYGXCQAFDPKWHVLELGXTTVDLATIKEGALLHYCGYLGPWL

SEQ ID NO: 283288 - protein, 97 aa, Zea mays
  Clone ID: MRT4577_21456C.1.pep
FPFSLWKKKPPFRPFEQAPSPPFLPIFLFNLRPHFSCFKNPLCPPPHYFVYLLPLVPPPFLFFNPDGTFCGTLSLDQFFPGNFFVARLGSPIVLNHP

SEQ ID NO: 283289 - protein, 69 aa, Zea mays
  Clone ID: MRT4577_21457C.1.pep
YMPYKLQRPYSEHGLLSVCKGLQPSSLPSHPEQYGQLSHISTCIDLCTSHNWSTTVIYTSVFFYILLHR

SEQ ID NO: 283290 - protein, 71 aa, Zea mays
  Clone ID: MRT4577_21458C.1.pep
ELWELFNKADHSQVTPPLLLNLKVMYYIESICIENAAHKRTSQVSNRKAFFSVRPIYKRRAYEQCRPLFSF

SEQ ID NO: 283291 - protein, 190 aa, Zea mays
  Clone ID: MRT4577_21459C.1.pep
MACPAATATTARIGARRGPCLWRSERRASFLVRSTSLLPDRPVRDTRARAASELQQAPRPASATVPAHKVTVHDRQRGVIHEFIVPEDQYILHTAEAQDIRLPFACRHGCCTSCAVRIKSGQIRQPEALGISAELKDKGYALLCVGFPSGDVEVETQDEDEVYWLQFGRYFARGPVERDDYALELAMGDE

SEQ ID NO: 283292 - protein, 1431 aa, Zea mays
  Clone ID: MRT4577_2145C.1.pep
MDPKGKGMVVNDKEESFVNDPKDDKPTNSGSSHKRKDGTKKKTRRIKEIVYYDDSDESSSSQKDNDDNDYEKKKTVNSNFSFDYSRIPQSTIAHLLSIPLASLCRDEYHKVSGLGNAKQIWDTLKISHEGNDVTMLTKMELVEGELGRSFTVLDPHLVNNIRENPRYTKMTPEEILGKFVSGRMMIKEARYVDDALNGPIHEPQIVALKATRGKEVLPSKVAQVEAAGLNEEEMALIIKRFKTALRGRKEHPNKSKTKGKRSCFKCGKIGHFIANCPDNDSDQEQEKKREKKKNYKKAKGEAHLGKEWDSDCSSSDSDNEGLTASAFNKSSLFPNEHHTCLMAKEKKVCTRNNTTYASSSEDESSDDEIDYAYLFKGLDRTKIDKINELIDALNDKNRLLEKQEDLLYEEHDKVVEAQKSLALEVKRNEILSCELSTCHETISSLKSINDDLNAKLEIANKSTSCVDHVVICNRCKDFNVDACSEHLVCISKLSDEVASLNAQLKTSKSEFDKLKFARDAYTIGRHPSIKDGLGFKREAKSLTSHKAPISAKEKGKAPMTNSSQKNHAFIYGDKRYFRNVHRSCNDSNAMFASSSSYMHGRDMPRRNVHVPRKINEPSTIYHACNASFAICRKDKKVYASGGSSWIIDSGCTNHMTGEKKMFTSYVKNKDSQESIIFGDGNQGKVKGLGKIAISSEHSISNVFLVESLGYNLLSVSQLCNMGYNCLFTNVDVSVFRRSDGSLAFKGVLDGKLYLVDFAKEEAGLDACLIAKTSMGWLWHRRLAHVGMKNLHKLLKGEHVIGLTNVTFEKDRPCAACQAGKQVGSSHHTKNVMTTSRTLELLHMDLFGPVAYLSIGGSKYGLVIVDDFSRFTWVFFLQDKSKTQGTLKRFLKRAQNEFKLKKNGVVERKNRTLIDMARTMLGEFKTPERFWSEAMNTACHAINRVYLHRLLKKTSYELLTGNKPNVSYFRVFGSKCYILVKKGRNSKFAPKAVEGFLLGYDSNTKAYRVFNKSSGLVEVSSDVVFDETNGSPREQVVDLDDVDEEEVPTATIHTMAIVEVRPQEQKEQDQPSSSTMVHPPTQDDEQEELNNFKRNEVWTMVPRPKQNVVGTKWVFHNKQDEHGVVTRNKARLVAKGYAQVTGLDFEETFAPVAMLESIRMLLAYATHHSFRLFQMDVKSAFLNGPIKEEVYVEQPPGLEDERYPDHVCKLSKALYGLKQAPRAWYECLRDFLIANAFKVGKADPTLFTKTCDGDLFVCQIYVDDIIFGSTNQKSCEEFSRVMTQKFEMSMMGELNYFLRFQVKQLKDATFISQTKYTQDLLKRFGMKDAKPAKTPMGTDGHVDLNKGGKSVDQKAYRSMIGSLLYLCASRPDIMLSVCMCARFQSDPKECHLVAVKRILRYLVATPCFGIWYPKGSTFDLIGYSDSDYAGCK

SEQ ID NO: 283293 - protein, 289 aa, Zea mays
  unsure (1)..(289): unsure at all Xaa locations
  Clone ID: MRT4577_21460C.1.pep
MACPAVTATTARIGARRGPCLWRSERRASFLVRSTCLLPDRPVRDTRARAASELQQAPRPASATVPAHKVTVHDRQRGVIHEFIVPEDQYILHTAEAQDIRLPFACRHGXASGGSSWILDSGCTNHMTGEKRMFSSYEKNQDPQRAITFGDGNQGLVKGLGCCTSCAVRIKSGQIRQPEALGISAELKDKGYALLCVGFPSGDVEVETQDEDEVYWLQSGQIRQPEALGISAELKDKGYALLCVGFPSGDVEVETQDEDEVYWLQFGRYFARGPVERDDYALELAMGDE

SEQ ID NO: 283294 - protein, 89 aa, Zea mays
  Clone ID: MRT4577_21461C.1.pep
SSIIRSRGEYHMCNTYFFSRLEAIATKKDKITDVLKLRRWWKGVDIFRTAYILMPVHAETHWSLIIICMPTKEDHIGPIILQLDSLKFH

SEQ ID NO: 283295 - protein, 60 aa, Zea mays
  Clone ID: MRT4577_21462C.1.pep
WHCLVWYQGLSATFSGLLIVNTTVCWKLIVSYSWHMFCGLDNLLDEDLCVSALYRCLMSF

SEQ ID NO: 283296 - protein, 81 aa, Zea mays
  Clone ID: MRT4577_21463C.1.pep
YAYSFVLLEYGSSFSSRAGSLTNRAGSLTNRARMLAQLVKKFKRADPIRAELTTNRASQRATSISSSPRWYPTGASTRGCT

SEQ ID NO: 283297 - protein, 67 aa, Zea mays
  Clone ID: MRT4577_21464C.1.pep
GLVTNKRPKLLSNTNFRFSYCCKSENSEICQSIFGLSFLPVEYSFGAISLNKNCSSIISLRVWYSVH

SEQ ID NO: 283298 - protein, 62 aa, Zea mays
  Clone ID: MRT4577_21465C.1.pep
MSNQGGKANPLKAPNADNNEYDETDLAYLQTKNDQDKALNDLKANAQKVAIGCSGLKKSGKK

SEQ ID NO: 283299 - protein, 86 aa, Zea mays
  unsure (1)..(86): unsure at all Xaa locations
  Clone ID: MRT4577_21466C.1.pep
SQTPKPNPSARWGEAAEGGAARGXXPLLTGPHSHTNQPTCSACRVSCCGRALRQLLXGDIRVHYCACGGAGEPXXGAXIFGGRDKF

SEQ ID NO: 283300 - protein, 82 aa, Zea mays
  Clone ID: MRT4577_21467C.1.pep
CCGPGSRQTQRSMVVLVVVAARPEHSCRSGHGLHSRISRRRGRRFPWRRCGPWRTAGPRSETAEGIPTIWVQGAAPLSHSAG

SEQ ID NO: 283301 - protein, 1362 aa, Zea mays
  unsure (1)..(1362): unsure at all Xaa locations
  Clone ID: MRT4577_21468C.1.pep
MTDATTPAPAVIVAPYATINVKNHIPVTLELAKPNFNQWEPFFTSLCGKFALLSHIDGLQEARPTDPSWGIADACVRSWLLGSAGPDVIGLAAAPNQTVRELWVAIKRLFEANKAPRAIFLSHEFHSMTQGDSSINDYAQRMKATADALRDVGHTITDAELVLNLLRGLNPRFASTADNIADSHPLPDFATTREKLVLKELCLANEGTVAAQTALHASCGTNCRTTPPPTVAAPLPVDRAVTAVAPAAAATQPWRPPAPTPAWRSPGILDPFTQAQAHTALAPVQSPDNPAPPMAAQGGWDQAGLIAALNQMSLQGSSPWVLDTGTTAHMSSSAGILLSHLPPPSFGITVGNGTTIPITCRGTSTLSSPTSTYRLNNVLVAPTLVRNLLSVRQFTRDNSCSIEFDAYGFSVKDKQTGHVTLRCNSGGDLYTYPSTTTPSCSLATTSSLWHHRLGHPGPSSLAKLRSMSVISFNKSSPCLCHACQLGKHVCLPFSHSTSVTHAPLDLLHCDVWTSPVLSNSGFKYYLIILDDYSHYCWSFPLRHKSEVHRHMIEFIAYAQTQFSTTPKSFQADNGTEFVNRSTTSFLASHGITLRLSCPYTSPQNGKAERMLRTTNNTIRTMLLHASMPPPYWAEALTTATYLLNRRPSSSIQNQIPYQILHGILPDYASLRIFGCLCYPNLTATSPHKLAPQSTPCVFLGYPSSHKGYRCLDMSTRRIIISRHVIFDESVFPFSAAPSAASMPSSLDFLMQDLTSSTAPAXPIRRSLPAARMISRXLDPAILQLGPRVHPAGGPQLGAHGPQVGQPAAPPTXVSAPATPTPAAPSLQQHRSPQRWPLWLLHLQRQQQLXTTLPPAAPAARLLSTAANRPVTRSQTGSLRPVQRFGFSASVASPIPANYRSALADLNWRAAMADDANIVTGKWLFKHKLHSDGSLARHKARWVVRGFSQEEGVDYDETFSPVVKPATIRTVLSIAASRDWPIRQLDVKNAFLHGNLEETVYCEQPKGFIDPAAPNSVCLLQKSLYGLKQAPRAWNQRFSSFIRSIGFTTSKTDASLFIYKNGDAMAYLLLYVDDIIITASSSALQHVTSRLSSEFAMTDLGDLHHFLGISTGQQWAVPLPAALSASEGAPVANPSEYRSLAGALQYLTLTRPDLAYAVQQVCLFMHDPREPHRALIKRILRYVKGSLSAGLHLGPGAVDQLTAYSDADWAGCPDTRRSTSGFCVYLGDNLVSWSSKRQTTVSRSSAEAEYRAVAHAVAECCWLRQLLHELHIFIPRATVVYCDNVSVVYMAANPVHHRRTKHIEIDIHFVREKVALGQFRVLHVPSTHQFADIMTKGLPVQLFTEFRNSLCVRDPPAQTAGGY

SEQ ID NO: 283302 - protein, 82 aa, Zea mays
  Clone ID: MRT4577_21469C.1.pep
CARDALLDNMLITFREGAPADIEEFCFIHRHGATAGELQVGGVMELAQQRYAITAVGSVATQNLRELGHITVRFDGEAEAEF

SEQ ID NO: 283303 - protein, 1778 aa, Zea mays
  Clone ID: MRT4577_2146C.1.pep
MDPKGKGMVVNDKEKESLFVNDPKEDKPTDSGSSHKRKDGRKKKTRRIKEIVYYDSDESSSSQKDDDNVYENKKTVNSYFSFDYSHIPQTTNAHLLSIPLASLCRDEYHKVSGLDNAKQIWDTLKISHEGNDVTMLTKMELVEGELGRFAMIRGEEPTQTYNRLKTLVNKIRSYGSTRWTDHDVVRLMLRSFTVLDPHLVNNIRENPRYTKMSPEEILGKFVSGRMMIKEARYIDDALNGPIHEPQIVALKATRSKEALPSKVAQVEAAGLNEEEMALIIKRFKTALKGRKEHPNKNKTKGKRSCFKCGKIGHFITNCPDNDSDQEKKSGKWEKKKNYKKAKGEAHLGKEWDSDCSSFDSDNEGLAATAFNKSSLFPNEHHTCLMAKEKKVCTRNNITYASSSEDESSDDDEIDYSCLFKGLDRTKIDKINELIDALNDKNRLLEKQEDLLYEEHDKFVSAQNSLALEVKRNEMLSCELSTCHETISTLKGVNDDLNAKLEVANKSNSCVEHVMICNRCKDFNVDACSEHLVCISKLNNEVASLNAQLKSSKSEFDKLKFARDAYTIGRHPSIKDGLGFKREVKNLTSHKASISAKEKGKAPMASNAQKNHAFMYHDRKHSRNGYRSYDALDSHAMVVSSSSIMHDRNLAWRNVINHMPRRNVVHVSRKIINEPSTIYHACNASFAIYRKDRKVIARKLGAKCKGDKTCIWVPKDIITNLVGPNKSWVYASGGSSWIIDSGCTNHMTGEKKMFTSYVKNKDSQDSIIFGDGNQGKVKGLGKIAISNEHSISNVFLVESLGYNLLSVSQLCNMGYNCLLTNVDVSVFRRSDGSLAFKGVLDDKLYLVDFAKEEVGLDACLIAKTSMGWLWHRRLAHVGMKNLHKLLKGEHVIGLTNVTFEKDRPCAACQAGKQVGSSHRAKNVMTTSRPLELLHMDLFGPVAYLSIGGSKYGLVIVDDFSRFTWVFFLQDKSETQGTLKRFLRRAQNEFELKVKKIRSDNGSEFKNLQVEEYLEEEGIKHEFSAPYTPQQNGVVERKNRTLIDMARTMLGEFKTPERFWSEVVNTACHTINRVYLHRLLKKTSYELLTGNKPNVSYFRVFGSKCYILVKKGRNSKFAPKAVEGFLLGYDSNTKAYRVFNKSLGLVEVSSDVVFDETNGSPKEQVVDLDDVDEEDVPTAAIRTMAIGDVRPQEQNERDQPSSSTMVHPPTQDDEQVHQEEAYDQGGAQDDHVMEEEAQPAPPTQVRAMIQRDHPVDQILGDISKGVTTRSRLVNFCEHYSFVSSIEPFREELNNFKRNEVWTLVPRPKQNVVGTKWVFRNKQDEHGVGTRNKARLVAKGYAQVAGLDFEETFAPVARLESIRILLAYAAHHSFRLFQMDVKSAFLNGPIKEEVYVEQPPGFEDEQYPDHICKLSKALYGLKQAPRAWYECLRDFLIANTFKVGKADPTLFTKTCDGDLFVCQIYVDDIIFGSTNQKSCEEFSRVMTQKFEMSMMGELSYFLGFQVRQLKDGTFISQTKYTQDLIKRFGMKDAKPAKTPMGTDGHTDLNKGGKSVDQKAYQSMLVSLLYLCASRPDIMLSVCMCARFQSDPRECHLVAVKRILRYLVATPCFGIWYPKGSTFDLIGYSDSNYAGCKVDRKSTSGTCQFLGRSLVSWSSKKQTFVALSTAEAEYVSAGQCCAQLLWMRQTLRDFGYNLSKVPLLCDNESAIRMVDNPVEHSRTKHIDIRHHFLRDHQQKGDIEVFHVSTENQLADIFTKPLDESTFCRLRSELNVLDSRNLD

SEQ ID NO: 283304 - protein, 121 aa, Zea mays
  unsure (1)..(121): unsure at all Xaa locations
  Clone ID: MRT4577_21470C.1.pep
QRPSSQQPAAHPQQREPVNQPAAENAPAXAQQQQLRPXSQPEGESPATLTTQPQEEPFNQHEAPNAGTHGQQQQARPVNQRAGTNPAGAXQQPSXGGGHQETHQEREPKKEGGPRKEAAQK

SEQ ID NO: 283305 - protein, 113 aa, Zea mays
  Clone ID: MRT4577_21471C.1.pep
SITSTSLGRFSHTHQASSPMAYDHYVDYCSDDVRSVAPAGFGRHGGGVQQHVVKEKFEEVDTVLRACSYHHHHHHGHHCGHRFLVRETRVYEDINTCSVEVHDRMESFLARAY

SEQ ID NO: 283306 - protein, 75 aa, Zea mays
  Clone ID: MRT4577_21472C.1.pep
SPVYQFLKPNGNIKNIYTTERNQLSSKKSLETEKILLCKMGPSFYPIKEVACNLFSGKLLFFSQTFIPTLCICLS

SEQ ID NO: 283307 - protein, 215 aa, Zea mays
  Clone ID: MRT4577_21473C.1.pep
MGNTCVGPSAAGRNGFLANVTLWRPRGDDPAPAPALPPPPSPASDKAPDPVTIPESEHSSHHSSRSTDLPPAPASQPQDNPTAKKPAPKVKRVQSAGLLADSVLKRDVNTARLKDIYTIGKKLGQGQFGTTYLCVEKATGREFACKSIAKRKLLTEEDVEDVRREIQIMHHLAGHANVVSIVGAYEDAVAVQLVMELCAGGELFDRIIQRGHYSE

SEQ ID NO: 283308 - protein, 42 aa, Zea mays
  Clone ID: MRT4577_21474C.1.pep
ALSCAILDMCVVSSPLSPQEEVEVPHVRTIYQRSPGSIKTHA

SEQ ID NO: 283309 - protein, 531 aa, Zea mays
  unsure (1)..(531): unsure at all Xaa locations
  Clone ID: MRT4577_21475C.1.pep
MGKAKGKQRQDKFYHLAKEQGYRSRAAFKLLQLDARFRFLPTARSVLDLCAAPGGWVQVAVNHAPVGAFVVGVDLVPIRPIRGAHSLTEDITATKCRAAVRRLMDSNGVSAFDVVLHDGSPNVGGAWAQEATSQSALVIDALRLATMFLAPKGAFITKVFRSQDYNAIMYCLKQLFEKVEATKPTASRSTSAEIYIICLKYKAPAKIQPELLDIKHLFSVVPEQTKSRDVMDGRKKRHRDGYEEGNTTLRKVGLASDFIWSDTQAPLEFLGSYNAISFDNPESLAIKNHELTTDDIKNFCEDLLLLDKHSFKHILKWRIRLRKSLSASSQVTPKVNDAVESTKVMDDDVLLQEMEELTSVIDRKNKKKKKXLSKRRAKDKARKATGMQIDATGDDYGDPDLFSISVIKGGKELEAVESAEVDVQNEIGDSENEDTQAREHSDEEMDSDEEQQRYDAQLEEMLDEAYERFVTRKGGEIKQERKRAKRINPDADAELLEGGEDDGDVEMDQDFDEDQDQEANPLLFALDEAEP

SEQ ID NO: 283310 - protein, 239 aa, Zea mays
  Clone ID: MRT4577_21476C.1.pep
MGKAKGKQRQDKFYHLAKEQGYRSRAAFKLLQLDARFRFLPTARSVLDLCAAPGGWVQVAVNHAPVGAFVVGVDLVPIRPIRGAHSLTEDITATKCRAAVRRLMDSNGVSAFDVVLHDGSPNVGGAWAQEATSQSALVIDALRLATMFLAPKGAFITKVKGSTEEECQCCSRHSALAPVSNSASCLFSLFYVNCERKISLLRIHYKSVLNEWQHDILTFSSLGRCMFICIYMLLISLCT

SEQ ID NO: 283311 - protein, 111 aa, Zea mays
  Clone ID: MRT4577_21477C.1.pep
TSHELIAASFALHILLYLLLTRFCGTNFPSHSAPRPHSRGPTTASNHRWITHLNPSMKPWTPPKGLRGPSWPVLLTQMVSQARLPWRRPPGGALHLPISLWWCKAPRHPGR

SEQ ID NO: 283312 - protein, 144 aa, Zea mays
  unsure (1)..(144): unsure at all Xaa locations
  Clone ID: MRT4577_21478C.1.pep
QVFRSQDYNAIMYCLKQLFEKVEATKPTASRSTSAEIYIICLKYKAPAKIQPELLDIKHLFSVVPEQTKXVEPRVXHLSSFFLSSSASIXILEMFCALQSRDVLDGRKKRHRDGYEERNTTLRKVGLASDFIWSDTQAPLEFLG

SEQ ID NO: 283313 - protein, 56 aa, Zea mays
  Clone ID: MRT4577_21479C.1.pep
NPRKGLFIFQKPRNSFRIWNSNWNSKSGSSTPPFQCGIEFKACLFPIFFKPENPVK

SEQ ID NO: 283314 - protein, 208 aa, Zea mays
  unsure (1)..(208): unsure at all Xaa locations
  Clone ID: MRT4577_2147C.1.pep
LRPKPEFALQVYASGGSSWIIDSGCTNHMAGEKRMFSSYVKNKDPQDSIIFGDGNQGKVKGLGKIAISSKHSISNVFLVESLGYNLLSVSQLYKMGYNCLFTNVDVSVFRRCDGSLAFKGVLDDKLYLVDFAKEEAGLDACLMAKTCMGWLWHRRLAHVGMKNLHKLLKGEHVIGLTNVHFEKEXPCAACQAGKQVGGSHHTKNVMTT

SEQ ID NO: 283315 - protein, 91 aa, Zea mays
  Clone ID: MRT4577_21480C.1.pep
MVREGDADGDGALSEAEFCVLMVRLSPGIMADAEAWLADAIAADEMQLLDDAMPMDVIAADDDGGAGSRGRAAAADAAPYSDTAPARRSSV

SEQ ID NO: 283316 - protein, 62 aa, Zea mays
  Clone ID: MRT4577_21481C.1.pep
LDSTTQHRNAYHPIHQILAMLSNLTPCYLTTISWLLSLFFKARTSALGGVFLSNPILGGPCV

SEQ ID NO: 283317 - protein, 152 aa, Zea mays
  unsure (1)..(152): unsure at all Xaa locations
  Clone ID: MRT4577_21482C.1.pep
MAKDAAVLGTNNGAKVTIFFTQKGDGPTTVTGSVSGLKPGLHGFHVHALXDTTNGCMTTAPHYNPASNEHEAPEDENHHAGDIGNVTTGANGDDNINDTDSHIPLTAANSIIDRDVVAHADPYDLEKVGHKLRKITGNAAALVACAIIELQR

SEQ ID NO: 283318 - protein, 90 aa, Zea mays
  Clone ID: MRT4577_21483C.1.pep
LHSKQGSSDPGLSSSLQRIAPTAHRSWLACWCRQPSPQLPKMAELLPSSRAYSATRAGPPACPRGTVSHAACLGSATTRRRDLGDVSSTP

SEQ ID NO: 283319 - protein, 70 aa, Zea mays
  Clone ID: MRT4577_21484C.1.pep
ATPQQTRCCQFNVKGPPGSILFVLKPQVAGLQSYRQPPRKPVPKTPMLRARQPLFFFPIPSSRGLVRFLS

SEQ ID NO: 283320 - protein, 97 aa, Zea mays
  unsure (1)..(97): unsure at all Xaa locations
  Clone ID: MRT4577_21485C.1.pep
PTRXRQIYFIGTKILNAMKQVSGCDIASPGVPSMASQCIPSTSRSTSPSGAISVDRSMLEAAHEREKELLNEVLELQWRLLCTQDEVQRLKAKAAQI

SEQ ID NO: 283321 - protein, 51 aa, Zea mays
  Clone ID: MRT4577_21486C.1.pep
SKQNYKTHHTLKILYDKILSSCPMQVQSAYLLEPLPPQQNTPKVVARSKSK

SEQ ID NO: 283322 - protein, 187 aa, Zea mays
  Clone ID: MRT4577_21487C.1.pep
EGWGRGFRDGMTPRTAMGGRMRGPTVNARDRGNQKRWNAARCIGEEHRGWRHLGAPSRKIGVGYPQQQADLFFFFFFFFFFFFFFFFFFYGTQQYVLENKNIEEVFACSEFRFFLGDSFPTTHWAPYIPLSGQPTTHALTKPSNPSLAQLPGTLARLRLGGLATFGPILHGSCLRKPVPHVCLEQLC

SEQ ID NO: 283323 - protein, 304 aa, Zea mays
  Clone ID: MRT4577_21488C.1.pep
MASGVLHRSASRCLRPAAAPTPDSGRGHGAVMIGDSGTRGVALRMGGSSRRELLSVTMASRDHTGLTRQLLDFQHDTIDEVGAEHGPFMDLKARFMDFKQRNYVENFSNYQNLAEQQTPKFMVIACADSRVCPTAVLGFQPGEAFTVRNVANLVPPYEHGGTETSAALEFAVNTLQVENVLVIGHSRCGGIQALMSMKDDSTSGSFIKNWVSIGKSARLSTKAAAGNMSFDIQCKHCEKESINSSLLNLLTYPWIEKRVNEGTLNLHGGYYNFVDCTFEKWTLLYREGLEGGSKYAIKNRSTWC

SEQ ID NO: 283324 - protein, 50 aa, Zea mays
  Clone ID: MRT4577_21489C.1.pep
HAVRKKKKKKKKKKKKKKKKKNQKKIKKIKKKKKKKKKKKKKKKKRGGPF

SEQ ID NO: 283325 - protein, 209 aa, Zea mays
  Clone ID: MRT4577_2148C.1.pep
LRPKPKFVLQVYASGGSSWIIDSGCTNHMTGEKKMFTSYVKNKDSQDSIIFGDGNQGKVKGLGKIAISNDHSISNVFLVESLGYNLLSVSQLCNMGYNCLFTNVDVSVFRRSDGSLAFKGVLDDKLYLVDFAKEEAGLDACLMAKTCMGWLWHRRLAHVGMKNLHKLLKGEHVIGLTNVQFEKDRPCAACQAGKQVGGSHHTKNVMTTS

SEQ ID NO: 283326 - protein, 54 aa, Zea mays
  Clone ID: MRT4577_21490C.1.pep
AGGGGGNLMFGCSFVGKPGFSLSAQAWVTTIYGPIKIFLSTYSSPKFGRLESPP

SEQ ID NO: 283327 - protein, 117 aa, Zea mays
  unsure (1)..(117): unsure at all Xaa locations
  Clone ID: MRT4577_21491C.1.pep
RTSLANILHFLPIKPTKGSVVHGPSSSPHFYSSAPYGYRACRWNNYSLKNXCQITHIVHTQLKLVYLTLCPVLASITVAAYMHNVWNIVCTHTMLGCGWIIAWLLLLPVYQERKMYL

SEQ ID NO: 283328 - protein, 99 aa, Zea mays
  Clone ID: MRT4577_21492C.1.pep
VEPAQDEAINKKDADRRISPASTLESSFEALNVKKFDVAFTVDPLYHQTTAQFDEGGAKGLLLYNLGVYGSCRVLFDSFEAPDKCILSDMQTEQAETID

SEQ ID NO: 283329 - protein, 464 aa, Zea mays
  Clone ID: MRT4577_21493C.1.pep
MVSDGARGLLGAYELGRTLGEGNFGKVKQARHRGSGGQFAVKILERARVLSQRADEQICREIATLKLLAHPNVVRLHEVAASKTKIYMVLELVNGGELLDRIQAASEGKLPEQEARRLFQQLVDGVSYCHEKGVCHRDLKLENVLVDRKGNIKISDFGLSALPQHLGNDGLLHTTCGSPNYIAPEVLQNRGYDGSLSDIWSCGVILYVMLVGHLPFDDRNIVVLYQKIFKGDAQIPEWLSPGARNLLRRILEPDPAERIAMAEIKAHPWFQEHYVPVLPPYDDDDDDDDSVKQIGAGSKTTHHINAFQLIGMASSLDLSGFFEEEDVSQRKIRFTSAQPPEDLFAEIERSATDMGFHVHRGHSKLRLTRNCDRSKNQKNPMSSSSSSFLVCTEVFELSPSLYVVELNKSHGDPALYRQLCQRICGDLGVLEMDQIFGTRPPVADDLAGLALALERRSATPLVAL

SEQ ID NO: 283330 - protein, 194 aa, Zea mays
  unsure (1)..(194): unsure at all Xaa locations
  Clone ID: MRT4577_21494C.1.pep
MVSDGARGLLGAYELGRTLGEGTSXKVKQARHRGSGGQFAVKILERARVLSXSARTSICREIATLKLLAHPNVVRLHEVAASKTKIYMVLELVNGGELLDRIVSRPGRSFFLPXSVRLHSLSDAVTTPIQLYYASDPPPVASLLLQRQLTSRXSEGKLPEQEARRLFQQLVDGVSYCHEKGVCHRDLKLGDVLV

SEQ ID NO: 283331 - protein, 62 aa, Zea mays
  unsure (1)..(62): unsure at all Xaa locations
  Clone ID: MRT4577_21495C.1.pep
CAPSCPRCGARCXGASPETNRASRSRSAPSQMSEMIRPARHIRSIAXSTXFGGASPAAGSCE

SEQ ID NO: 283332 - protein, 68 aa, Zea mays
  unsure (1)..(68): unsure at all Xaa locations
  Clone ID: MRT4577_21496C.1.pep
SDTEPKSLADGVQNXVAEFFKEDLGPNPLKDFTNKVXMIFXGDEEDFAPPPDDNLDGDAHADDGAPEN

SEQ ID NO: 283333 - protein, 323 aa, Zea mays
  Clone ID: MRT4577_21497C.1.pep
MAGTVTATATTATTEVGTTVTAATSEMEATATAATSELEATATAAAIGPPSAIPDKYMHKNRLQSFAERTYKKTPIYKVESEGQSHQPKFTCTVEVGDQQFSSTGSFSRKKEAEQDAARVAYEILTTVSESDVKEAFELIDQDAVFCKSILIEFAVKTKTTLPSYSVVCVCLKKPLTLFAAIVVFDGNAYHGESAPNKKDAEQNAARVVIKSILAKHDTCMVRIVRSKKQLITAVRSSGNTPATFTPIQFTRPVSYAAYGRPDDTTPVLPNESSSLAVQRGINVVPAVGTSVNPSSANVSRSKKRKGRVEGAGGNDTWVAKGH

SEQ ID NO: 283334 - protein, 52 aa, Zea mays
  Clone ID: MRT4577_21498C.1.pep
HSHVKPKSGFSFLRGLVTNFCCDFPGRTSRGPKNAVSIPKASTLEVGMMYKI

SEQ ID NO: 283335 - protein, 472 aa, Zea mays
  unsure (1)..(472): unsure at all Xaa locations
  Clone ID: MRT4577_21499C.1.pep
GVVYIAXWSRDTXVVLVRDPREPSASSESLGELLIRKADEGVAVLMLVWDDRTSVGLGPIKRDGLMATHDQDTASFFRDTRVQCVLCPRNPDKDRSYVQDIETATMFTHHQKTVIVDGGGAPAPETPPGLVSFLGGIDLCDGRYDTQDHPLFRTLGTTHSKDFHQPNFPGASISKGGPREPWHDIHCRVEGPAAWDVLENFEQRWKKQGKGDNLLVALNKAWAEREAAPRGDAESWNVQVFRSIDGGAAAGFPEGSANAPREAAALGLVSGKDHVIERSIQDAYIHAIRRARDFIYIENQYFLGSSYAWRQNDGVTVEDINALHLIPKELSLKIVSKIEAGERFVVYVVVPLWPEGVPESGSVQAILDWQRRTMEMMYKDVTLAIRARGLRADPRDYLTFFCLGNREAPSPGEYVPPEHPDPNTDYERAQQARRFMIYVHAKTMIVDDEYIIVGSANINQRSMDGGRRLVDI

SEQ ID NO: 283336 - protein, 548 aa, Zea mays
  Clone ID: MRT4577_2149C.1.pep
MTWLAHRTCPVCTGLSGDFQKGIVINDKEKESFVNEPKDDKPIDSGSGHKRKDGKKKKTKRIKEIVYYDDSDESTSSQKNDNNDYEKKKTVNSNFSFDYSRIPQSTNAHLLSIPLGKPPHFDGEDYGFWSHKMRSHLFSLHPSIWEIVESGMHFDSSDSPMFINEQIHKNAQATTVLLASLCRDEYHKVSGLDNAKQIWDTLKISHEGNDVTMLTKMELVEDELGRFAMIRGEEPTQTYNRLKPLVNKIRSYGSTRWTDHDVVRLMLRSFTVLDPHLVNNIRENPRYTKMTPEEILGKFVSGRMMIKEARYVDDALNGPINEPQPIALKATRSNEMLPSKVAQIEAAGLNDEEMALIIKRFKTALKGRKGQPSKTKTKGKRSCFKCGKLGHFIANCPDNDSDQDQGNKREKKKNYKKAKGEAHLGKEWDSDCSSSDSDIEGLAATAFNKSSLFPNERHTCLMAREKKVSTPNTSTYASSSEDESSDDDEIDYSCLFKGLDRTKVDKINELIDALNDRNILLEKQEDLLYEEHEKFVEAQKSLAKSRPA

SEQ ID NO: 283337 - protein, 113 aa, Zea mays
  unsure (1)..(113): unsure at all Xaa locations
  Clone ID: MRT4577_214C.1.pep
RPGSGRLXSKKKKKKKKKKKKKKKKKKKKKKNNKTPCSNPKLKPPGSPPFPIQFFKKGIPPGGGPGGKNLLNASGFGGGPGPAFFPRGGGKKGGLPHYFLNWENLGKTPGGPN

SEQ ID NO: 283338 - protein, 229 aa, Zea mays
  Clone ID: MRT4577_21500C.1.pep
IGYLEAGREGNPLPFPVAKSNHQRDGGDRDRDRNHGHHRGRDHSDRSHLRDGGHRDRSHLRAGGHRDRSRHRAAFSHPRLLSVSSAPTSSSAAIITYTPDKYMHKNRLQSFAERTYKKTPIYKVESEGQSHQPKFTCTVEVGDQQFSSTGSFSRKKEAEQDAARVAYEILTTVSESDVKEAFELIDQDAVFCKSILIEFAVKTKTTLPSYSVVCVCLKPLTLFAAIGGV

SEQ ID NO: 283339 - protein, 88 aa, Zea mays
  Clone ID: MRT4577_21501C.1.pep
IFLISCSTRHQCCPCSWDICEPIVSKCKSLKKAQGQSLRTRRHPPMGCQGSLTFHPSTSRILWSPFWHSIRLGTSACHVVCPNPCISL

SEQ ID NO: 283340 - protein, 70 aa, Zea mays
  Clone ID: MRT4577_21502C.1.pep
VAIKTLFMDGEQIYYPRQTQKSKGFKDGVHIERGIKNKRALKRCVQKIPCGNYREGQNLSTGTHAEEILP

SEQ ID NO: 283341 - protein, 129 aa, Zea mays
  unsure (1)..(129): unsure at all Xaa locations
  Clone ID: MRT4577_21503C.1.pep
SILSSRSAIXGRLPXFLVGEXXNXWHTHLKKRLEPTTKQLEQEQHGAHAGGGAARKRSRPKRAGARKTTTDAVAPATTAPAFPERSAASSSVTQSTEQEQGNTVTSSPEFPKEESFTLPSEAGEEFQFD

SEQ ID NO: 283342 - protein, 295 aa, Zea mays
  unsure (1)..(295): unsure at all Xaa locations
  Clone ID: MRT4577_21504C.1.pep
KQYRAEPIQATEPRDFPANHPKKHSITRAWSSPPVTSLSHLRLGRAPPRRPRSPWCASRAQPPSRPPPPGRRPLPSCSRRRHPSPSSXAPPPVLTVPDAXLSTPLPPXSAPXRPPPCHRPGHRCLSTSAPCRRPHPTPCPWHVRRCRPPSEPWIRPCPSSCPWPVRPCPRPYAPCXPVVSLCCPVXREPYCPPSGTPVPWPARXAPLPXAPPPRRRRGPRAPCLAPPSPWRTPPPCARCRPSPPWPSAPPARPWRPSRPWPSRLPAACTRPSSFPLPPLPPSPSRPRPWRTPRPS

SEQ ID NO: 283343 - protein, 39 aa, Zea mays
  Clone ID: MRT4577_21505C.1.pep
ELLHTFSSLFYATVVDTVGEYLPWPLVSWPVVSRMLRWG

SEQ ID NO: 283344 - protein, 99 aa, Zea mays
  unsure (1)..(99): unsure at all Xaa locations
  Clone ID: MRT4577_21506C.1.pep
QQRPSXLLQQIPLIHLFANNIYAHQLQQLLHRNLDAYSQQHQPLXPINNLLHLNLTIYYQQQLPYNQLAYSYPHQLHTFNQLSSXRTLLXLQHQHLPPF

SEQ ID NO: 283345 - protein, 53 aa, Zea mays
  Clone ID: MRT4577_21507C.1.pep
VHAIVPCRSEGCSTTAISCYRLVIPHFVLCSTLSGKDGDPGENISARFSVRVG

SEQ ID NO: 283346 - protein, 212 aa, Zea mays
  Clone ID: MRT4577_21508C.1.pep
MARCRHHLLLLSVLLALAAAAPRQAQSHGEASAVFIDASSHRYLRDQQADHQDASMSLNEVSAGVSVLLGFAPSTSLPAISSSKLNKVLLPNPFDRPRAVFLVQIDGFNVPSFVSEGSNIFKTRIEGANIADTGLTDKDDLIVIHSDESLDLSRSDYLDNELSSLANWLEGSYQKSTGKLVIPLENGNSLTLQLDKEADREFMSSLASLLKT

SEQ ID NO: 283347 - protein, 100 aa, Zea mays
  unsure (1)..(100): unsure at all Xaa locations
  Clone ID: MRT4577_21509C.1.pep
MTTLMPRARILRSLGLKTTPXHYSLRAYRTGTMATIXLYRIYAHTFLQNTGAFXTTATDRLYSSNSSDQRTPRELNLHDLIDSKIPDSQNGQNVYTDLAL

SEQ ID NO: 283348 - protein, 1006 aa, Zea mays
  Clone ID: MRT4577_2150C.1.pep
DPTRVGYLRPKPKFALQVYASEGTSWIIDSGCTNHMTGEKKMFSSYVKNKDSQDSIIFGDGNQGKVKGLGKIAISSEHSISNVFLVESLGYNLLSVSQLCNMGYNCLFTNVDVSVFRRCDGSLAFKGVLDGKLYLVDFAKEEAGLDACLIAKTCMGWLWHRCLAHVGMKNLHKLLKGEHVIGLTNVHFEKDRPCAACQTGKQVGGSHHTKNVMTTSRPLEMLHMDLFGPVAYLSVGGSKYGLVIVDDFSRFTWVFFLQDKSETQGTLKRFLRRAQNEFELKVKKIRRDNGSEFKNLQVEEYLEEEGIKHEFSAPYTPQQNGVVERKNRTLIDMARTMLGEFKTPECFWSEAVNMACHAINRVYLHRLLKKTSYELLTGNKPNVSYFRVFGSKCYILVKKGRNSKFAPKAVEGFLLGYDSNTKAYRVFNKSSGLVEVSSDVVFDETNGSPREQVVDLDDVDEENIPTAAMRTMAIGDVRPQEHLEQDQPSSSTMVHPPTQDDEQVPQVEAHDQGGAQDVQVEEEEAPQAPPTQVRATIQRNHPVDQILGDISKGVTTRSRLANFCEHYSFVSSIEPFRVEEALLDPDWVLAMQEELNNFKRNEVWTLVPRPKQNVVGTKWVFCNKQDEHGVVTRNKARLVAKGYAQVAGLDFEETFAPVARLESIGILLAYAAHHSFRLFQMDVKSAFLNGPIKEEVYVEQPPGFEDERYPDHVCKLSKALYGLKQAPRAWYECLRDFLIANAFKVGKADPTLFTKTCDGDLFVCQIYVDDIIFGSTNQKSCEEFRRVMTQKFEMSMMGELSYFLGFQVKQLKDGTFISQTKYTQDLIKRFGMKDAKPAKTPMGTDGHTDLNKGDSDYAGCKVDRKSTSGTCQFLGRSLVSWSSKKQTSVALSTAEAEYVAAGQCCAQLLWMRQTLRDFGYNLSKVPLLCDNESAIRMADNHVEHSRTKHIDIRHHFLRDHQQKGDIEVFHVSSENQLADIFTKPLDEQTFCKLRSELNVLDSRNLD

SEQ ID NO: 283349 - protein, 89 aa, Zea mays
  Clone ID: MRT4577_21510C.1.pep
KKKKKKKKKKKKKKKKKKGQTHKKGKGFKRRKRLHHHGSKVQPSSKLPPRCFSMALLGKPRHCKTQAVYNLSPFAQNAFYPTGRKRYRV

SEQ ID NO: 283350 - protein, 75 aa, Zea mays
  Clone ID: MRT4577_21511C.1.pep
PARPGPVLPGRPTRPVSFAPTRTSSSWPMDWHLPILTSLSPDLTPGASSQRTLTTREWWSHGPYLLATDVLLSRP

SEQ ID NO: 283351 - protein, 95 aa, Zea mays
  Clone ID: MRT4577_21512C.1.pep
PGPSPHNRHVPESAPVPVGLAVFKERQAPGPTTGFGGGPLRRLGTTVPPTKDKAWDPPPLFWVGPLIGPTIPAAGPLGAPRATPGKIGSSPSPAQ

SEQ ID NO: 283352 - protein, 178 aa, Zea mays
  unsure (1)..(178): unsure at all Xaa locations
  Clone ID: MRT4577_21513C.1.pep
QKDFFRLGSPVTKPALKLEQFLALAVVAGDALIHLYNHFISDFETKISLLKFAHFTVVVSHQYLDKNAGINYLEGVISKLRDTRESRVEEPILYVKMQIATFLLEKGNQKDCKNLLEEGKTTLDSMVDVDPSVHGTYYWVCSQYHKARQEYSEFYXSCLLYLAYTTVSLVLQFLIGFV

SEQ ID NO: 283353 - protein, 122 aa, Zea mays
  Clone ID: MRT4577_21514C.1.pep
YPRVPEKKGLKKARWGPRPRWGPRYQQQRQRFKFGFPTRVSPKYSFWMGDFSPLMLMECFPGVMHAFFLLFLPKKKKQFPSGVVFFPFGFLPPPFNFGFCPGLLAFSKKVFVRHPAFLFSPT

SEQ ID NO: 283354 - protein, 92 aa, Zea mays
  Clone ID: MRT4577_21515C.1.pep
FTTTVKRSNPPTKSIPSKCLGVTTTTTSSSSSVLAVTLITLAPLEINLGLDHIPTAPAIAATIRPHSDPAARSPMAKATHSAHGTTTSDPAV

SEQ ID NO: 283355 - protein, 129 aa, Zea mays
  Clone ID: MRT4577_21516C.1.pep
MAAHQQQPQSQSQQQAVGFEDYLPVMAERLGEEGLMEDLAAGFRLLMDPASGLITFDSLRRNAPLLGLGGMSDDDLRGMLAEGDFDGDGALSQMEFCVLMVRLSPDLMDEPRRWLDDAVAQASHFLFTS

SEQ ID NO: 283356 - protein, 115 aa, Zea mays
  unsure (1)..(115): unsure at all Xaa locations
  Clone ID: MRT4577_21517C.1.pep
SARGCCGLAFLDQMDYLITGDRADLHDLFMVTTXHVSRCILIGIANAIDSTDRLLPKLGSLNCKPLDATLRAYCKDQMYDIASHRLQDLEDDVFEPLALVSCAXKAAADFDDMRK

SEQ ID NO: 283357 - protein, 134 aa, Zea mays
  Clone ID: MRT4577_21518C.1.pep
MAAHHQQQQQPQPQQQSQQQAVGFEDYLPVMAERLGEEGLMEELAAGFRLLMDPASGLITFHSLRRNAPLLGLGGMSDDDLRGMLAEGDFDGDGALSQMEFCVLMVRLSPDLMDQPRRWLDDAVAQASHFLFTS

SEQ ID NO: 283358 - protein, 66 aa, Zea mays
  Clone ID: MRT4577_21519C.1.pep
PISDLDTTRARVQHAVWEKARTPYRSMLSGHVLVHIILDRSPRADGCQQRNETLQLYLVECSPPDI

SEQ ID NO: 283359 - protein, 606 aa, Zea mays
  Clone ID: MRT4577_2151C.1.pep
MDPKGKGMVVNDKTKESIVNEPRDDKPSDSGSSHKKRDGNKKRRIKKIVYYDSDESSSSPRDDDDEKKKPVNSNFSFDYSRIPVNSNAHLLSIPLGKPPNFDGEDYSFWSHKMRSHLFSLHPSIWEIVENGMLFDSTDNPVLINEQIHKNAQATTVLLASLCMDEYHKVSGLDNAKQIWDTLKISHEGNDATMITKMELVEGELGRFAMIRGEEPTQTYNRLKTLVNKIRSYGSTRWMDHDVIRLMLRSFSVLDPHLVNSIRENPKYTKMTPEEILGKFVSGRMMIKEARYVDEALNGPMPIYEPQTVALKATSSREALPSKVAQVEAVGLNEDEMTLIIKRFKTTLKGRKEHPNKSKAKGKRSCFKCGKTGHFIANCPDNTNDQEQERNGKREKKKTYKKMKGEAHLGKEWDSDCSSSDSDDEGLAASAFNKSLLFPNERHTCLMAKEKKVNARETPKYSTSSDEDSSDDEVDYTSLFKGLDRAKVEKINELIDALNEKDRLLERQEDILYEEHNKFISVQKSLALEIKRNELLSSKLSICNESISSLKILSDDLNANLEVVNKSSPCVEHVVICNRCKDFNIDACVEHLTEREMCPWAISNIFW

SEQ ID NO: 283360 - protein, 50 aa, Zea mays
  unsure (1)..(50): unsure at all Xaa locations
  Clone ID: MRT4577_21520C.1.pep
GAFLVYQRFCAAEYAXDTSAECAFHCFDGDNSQRAPPPMKKDYKLRNLLC

SEQ ID NO: 283361 - protein, 219 aa, Zea mays
  Clone ID: MRT4577_21521C.1.pep
MQKSGKDHSLLLVLPAGGYRYRFVVDGERRCLPDLPCEIDAMGNAVDCVYVKGSWDNWKSRKAMQKSGKDHSLLLVLPAGVYRYRFVVDGERRCLPDLPCETDAMGNAVNLLDVNDFVPESVESVVEFEPPLSPDSSYSFQAPEDKDFAKEPPALPAQLHLGVLNSQNSEESCARPPHIVLNHLFIEKGWGAHPLVALGLTHRFESKYVTLVLYKPIER

SEQ ID NO: 283362 - protein, 66 aa, Zea mays
  Clone ID: MRT4577_21522C.1.pep
TLSAHDDSDRLLHFFGRQFRLVLAPYEDAQLYINSSPRLSTACISYLENPREMLNEAAKAAEEDLW

SEQ ID NO: 283363 - protein, 189 aa, Zea mays
  Clone ID: MRT4577_21523C.1.pep
MVNLRTQKRLAASVVGCGKRKIWLDPNEVSEIANANSRQTVRKLVQDGLIIRKPVTMHSRARARELNAARRIGRHRGFGKRKGTKDARMPSQIVWMRRLRVLRRLLVKYRAAGKIDKHLYHELYLLSKGNTFKHKRALVEHIHKAKAEKARERVIKEEMDAKRAKTKAARERRQERIQQKRQAQLGDEE

SEQ ID NO: 283364 - protein, 344 aa, Zea mays
  Clone ID: MRT4577_21524C.1.pep
MAPTRHADEGGQLQLIDAASVDEEEECFESIDKLISQGINAGDVRKLQDAGIYTCNGLMMHTKKNLTGIKGLSEAKVDKICEAAEKLLNQGFMTGNDLLLKRKSVVRITTGSQALDELLGGGIETLCITEAFGEFRSGKTQLAHTLCVSTQLPIHMHGGNGKVAYIDTEGTFRPERIVPIAERFGMDANAVLDNIIYARAYTYEHQYNLLLGLAAKMAEEPFKLLIVDSVIALFRVDFSGRGELAERQQKLAQMLSRLTKIAEEFNVAVYITNQVIADPGGGMFITDPKKPAGGHVLAHAATIRLMLRKGKGEQRVCKIFDAPNLPEGEAVFQVTSGGIMDVKD

SEQ ID NO: 283365 - protein, 74 aa, Zea mays
  Clone ID: MRT4577_21525C.1.pep
NIVGNILFYRLNISYLVLQAMTIWVNDKRMEFVRVSVVRSFHVQNIHSGHIIQIDVLFSYLLVCKMQRFFEGIL

SEQ ID NO: 283366 - protein, 121 aa, Zea mays
  unsure (1)..(121): unsure at all Xaa locations
  Clone ID: MRT4577_21526C.1.pep
FAVSLVTPGSPPLVGPGPTPSSXPIVPPSSAAGGGHAAPFGLPGRPLHGRPPGKPSLPGLXEGPPVQGPPPRXAGGVKHVGTPRLPPPGPXLVHPPLFPRRLLPGAWLSPHHPQPRKKKTP

SEQ ID NO: 283367 - protein, 413 aa, Zea mays
  Clone ID: MRT4577_21527C.1.pep
MASGEGWEAAVRAEVGAVAWWDDLDSADLRARFKAFTGQRSDWPQPTVLFWKDLLLRVARRLRVCSAPAHHVTSAWFARPGGLTPLCLPQVLEEMRADGDVLLKSELIDPSSTNLHQLVRRVRLMTISSRKAVWQEDILVFKLLIEERAADIARQLSDSHWTSTCVVTISKFNSFFVDMDDAHIALCFLTQHGKARYLSGRKQDPIEARAVALTASQVPAVSKLDHDTLHLVWTEEKLQEQLDVLDRRWEISRRRALASFKSGDKLAAYRYVRQSKLFSQSRSRCTQLLERIEEVISLIASAESNKKVYEAIQIGILAMKDNTVSIDEVNIHMKEIDELVAAQREVDAALVPLQSLDDEGDIDEEFSKLEAELQDDVPHIHVQEPMAPSNEESPDEVVESLSHNMSRIRLEPI

SEQ ID NO: 283368 - protein, 52 aa, Zea mays
  Clone ID: MRT4577_21528C.1.pep
GKNQMFNVANPAQNRLFQRMAFGNQNFPAGFSPSSWNNNQNKGFYAFGSRPM

SEQ ID NO: 283369 - protein, 90 aa, Zea mays
  Clone ID: MRT4577_21529C.1.pep
PVRNGRVGLRDLPFVRPRARREERHLFSQFRHHPTTLVARLRSIINQLRPTHISYRLLPRTISLRKPAATMSLRGHHAYGHRPHRQWDWT

SEQ ID NO: 283370 - protein, 98 aa, Zea mays
  Clone ID: MRT4577_2152C.1.pep
STLNSGKKSLETEHKALTSEIALLQSRLKTEGSDLCDRVSEMQKLDAQVKELVLKSAVEAERLVAGKLKKDTYIENEKLISGKRQELVTKIDHILDAL

SEQ ID NO: 283371 - protein, 114 aa, Zea mays
  Clone ID: MRT4577_21530C.1.pep
QAPEGMKSLGTSYSMTSLGIGNFLSSALLSAVSHITERPGRTGWILNNLNASRLDKYYAFFAILNCANLIAFFFVCRFYVYNPEVSRVVAPGSSKQKREVAMQPAAVGAVEAPL

SEQ ID NO: 283372 - protein, 73 aa, Zea mays
  Clone ID: MRT4577_21531C.1.pep
GKNVSLTDLLGQVNRVPDRIGYTHSFLVYTCWWSNTGVTGCPSSDTQTEEVTETAHARSLAKHIWWSYIYRSS

SEQ ID NO: 283373 - protein, 407 aa, Zea mays
  unsure (1)..(407): unsure at all Xaa locations
  Clone ID: MRT4577_21532C.1.pep
MASAMELSLLNPAATHXTAAASPACPSXRSVVRFRVSASAAATAPPKSSGPKKRGKTEIQETLLTPRFYTTDFDEMERLFNAEINKQLNQAEFDALLQEFKTDYNQTHFVRNPEFKAAADRMEGPLRQIFVEFLERSCTAEFSGFLLYKELGRRLKKTNPVVAEIFSLMSRDEARHAGFLNKGLSDFNLALDLGFLTKARKYTFFKPKFIFYATYLSEKIGYWRYITIFRHLKANPEYQVYPIFKYFENWCQDENRHGDFFSALLKAQPQFLNDWKAKLWSRFFCLSVYVTMYLNDCQRTAFYEGIGLDTKEFDMHVIIETNRTTARIFPAVLDVENPEFKRKLDRMVEINQKIIAVGESDEIPLVKNLKRIPLVASLVSEIIAAYLMPPIESGSVDFAEFEPRLVY

SEQ ID NO: 283374 - protein, 155 aa, Zea mays
  Clone ID: MRT4577_21533C.1.pep
LFRHRHPQLPRAPVQHQHLFFFRDATPFVGEVVVFPPSAPKFGFGPVFHLSTGVGYSGRAQRCAGPTWFLFLELSPPFGVSSSQRPRREGRSCFGSPPWASPLAVVRLHVAPVACLLCCEVCAGVCVPPPLCSCLLPVSPSPFLLLAPVAPLPFG

SEQ ID NO: 283375 - protein, 438 aa, Zea mays
  Clone ID: MRT4577_21534C.1.pep
MALSVEKTSSGREYKVKDLSQADFGRLEIELAEVEMPGLMACRAEFGPSKPFAGARISGSLHMTIQTAVLIETLTALGAEVRWCSCNIFSTQDHAAAAIARDSAAVFAWKGETLEEYWWCTERCLDWGEAGGPDLIVDDGGDATLLIHEGVKAEEEYEKTGKIPDPESTDNAEFKIVLTIIRDGLKADPKKYRKMKERLVGVSEETTTGVKRLYQMQETGALLFPAINVNDSVTKSKFDNLYGCRHSLPDGLMRATDVMIAGKVAVVCGYGDVGKGCAAALKQAGARVIVTEIDPICALQALMEGLQVLPLEDVVSEADIFVTTTGNKDIIMVDHMRKMKNNAIVCNIGHFDNEIDMLGLETYPGVKRITIKPQTDRWAVVCYEVRYTGLSVIFCMHMHYHIRSRVAGFLLLKNNGVVGWGEAMCVARYSFVLLTLLI

SEQ ID NO: 283376 - protein, 90 aa, Zea mays
  Clone ID: MRT4577_21535C.1.pep
SPGYCRVLNKEQQRKRLVERARGRQWLAESFLFTVEYMNEGHPDKLCDQMLDAVLDACLAHDPDSKVACETCTKTNMGVVFGEIITYASV

SEQ ID NO: 283377 - protein, 45 aa, Zea mays
  Clone ID: MRT4577_21536C.1.pep
LHKQNKTFILHLLIANQIKTAHMLNMPALLMPLLTQPQCAHLLQL

SEQ ID NO: 283378 - protein, 83 aa, Zea mays
  Clone ID: MRT4577_21537C.1.pep
FMSLFSFVRSLIIHPRFFRLCMLCGIVSGIVFDSEFSSGHNYAHLGAELGSDSGAPKCAGHCPLNRPSRRGALSVRANLLHYI

SEQ ID NO: 283379 - protein, 130 aa, Zea mays
  unsure (1)..(130): unsure at all Xaa locations
  Clone ID: MRT4577_21538C.1.pep
GLMRAPDVMIAGKVAVVFGFXGDVGKGCAAAXLKQAGARVIVTEIDPICALQALMKGLQVLPLEDVVSEADIFVTTTGNKDIIMVDHMRKMKNNAIVCNIGHFDNEIDMLGLETYPGVARYSFVLLTLLI

SEQ ID NO: 283380 - protein, 169 aa, Zea mays
  Clone ID: MRT4577_2153C.1.pep
HRPQSPRRVLVHGIGPKNSMYLKKGGSRMHKRPRFSLPDDSDDSLLVDEPDEGPSMPWMRTGRGSMPWLMGGLDMHSPASWGLSVGASGWGHQGDTSTSLMPGVQTAGPSSTGGADIQPLQVDENVSFKDIGGLSEYIDALKEMVFFPLLYPDFFANYHITPRRGGLLC

SEQ ID NO: 283381 - protein, 78 aa, Zea mays
  Clone ID: MRT4577_21540C.1.pep
RSRSLRLVAATVSSTNMNDASQRAYSSSYYSEHEGSCHVSYMQDGNTLLPNHPNSLVHISHLHNPMMPPILLQRCYMR

SEQ ID NO: 283382 - protein, 77 aa, Zea mays
  Clone ID: MRT4577_21541C.1.pep
ALRSSSSLPHTIVKQHTGRGRSYSSSKRAPYELQLPSMTDDGTSSSQPLLPSHTCMHMTVNPSDIKHKNIYIPQTRQ

SEQ ID NO: 283383 - protein, 55 aa, Zea mays
  Clone ID: MRT4577_21543C.1.pep
FQCSYRFLSFRVWVEVLLVVACISIKKKGSWICKSFSYENPISGMFAEHLSYCFG

SEQ ID NO: 283384 - protein, 55 aa, Zea mays
  Clone ID: MRT4577_21547C.1.pep
MDSSDYALMLSSYVTSLIVAGISHNTSGIIFASDRSLEPEATRSPTDQAIFSWGQ

SEQ ID NO: 283385 - protein, 92 aa, Zea mays
  Clone ID: MRT4577_21548C.1.pep
SFVNLGCATGHPSFVMSCSFTNQVIAQLELWKEKSSGKYEKKVYVLPKHLDEKVAALHLGKLGAKLTKLTKSQADYISVPIEGPYKPAHYRY

SEQ ID NO: 283386 - protein, 79 aa, Zea mays
  unsure (1)..(79): unsure at all Xaa locations
  Clone ID: MRT4577_21549C.1.pep
QRRVLFFFFFFFFFFXXCLLTRFPKTLSVIALPGFRASYANACLXKFSWDVGLRGGCLPLVVLGGDGRLSLLLVGFWLS

SEQ ID NO: 283387 - protein, 1351 aa, Zea mays
  unsure (1)..(1351): unsure at all Xaa locations
  Clone ID: MRT4577_2154C.1.pep
MDPKGKGMVVDNNEKESIFNEPKNDKDEYNKVSGLDNAKQIWDTLKISHEGNDITMLTKMELVEGELGRFAMIRGEEPTQTYNRLKTLINKIRSYGSTRWTDHDVVRLLLRSFTILDPHLVNNIRENPRYTKMSPEEVLGKFVSGQMMIKEARYVDDALNGPINEPQPLALKATRSKEALPSKVAQIEAAGLNDEEMALIIKRFKTVLKGHKGQPSKTKTKGKRSCFKCGKIGHFIANCPDNNSDQEQENKREKKKNYKKAKGEAHLGKEWDSDCSSSDSDNEGLAATAFNKSSLFPNERHTCLMAREKKVSTRDSTYASSSNDESSDDDDIDYSCLFKGLDRNKIDKINELIDALNEKDKLLEKQEDLLYEEHDKFVEAQRSHALEVKRNEMLSCELSSCHETISKLRSINDDLNAKLEIASKSTSCVENVMTCTRCKDINLDAYGEHLACISKLNEEVASLNAQLKTSKSDFEKLKFARDAYTVGRHPSIKDGLGFKREVKNLTSHKASISAKEKGKAPMASSVQKNHAFIYHDRRQSRNAYRSYNAYDDFDSHAMFASSSSYMHGRNMSRKNAIHHMPRKNVIHAPRKVVNEPSTIYCALNASFAICRKDKKIVARKLGAKCKGDKTCIWVPKDICTNLVGPNMSWVYASGGSSWIIDSGCTNHMTGEKKMFTSYVKNKDSQDSIIFGDGNQGKDKSETQGTLKRFLRRAQNEFELKVKKIRSDNGSEFKNLQVEEFLEEEGIKHEFSAPYTPQQNGVVERKNMTLIDMARTMLGEFKTPECFWSEAVNTACHAINXDEEDVPTAAIRTMAIGEVRPQEQDERDQPSSSTMVHSPTQDDEXRVEEALLDPDWVLAMQEELNNFKRNEVWTLVPRPKQNVVGTKWVFRNKQDEHGVVTRNKARLVAKGYAQVAGLDFEETFAPVARLESIRILLAYAAHHSFRLYQMDVKSAFLNGPIKEEVYVEQPPGFEDERYPDDVCKLSKALYGLKQAPRAWYECLRDFLIANAFKVGKADPTLFTKTCDGDLFVCQIYVDDIIFGSTNKKSCEEFSWVMTQKFEMSMMGELNYFLGFQVKQLKDGTFISQTKYTQDLLKRFGMKDAKPAKTPMGTDGHTDLNKGGKSVDQKAYRSMIGSLLYLCASRPDIMLSVCMCARFQSDPKECHLVAVKRILRYLVATPCFGLWYPKGSTFDLIGYSDSDYAGCKVDRKSTSGTCQFLGRSLVSWNSKKQTSVALSTAEAEYVAAGQCCAQLLWMRQTLRDFGYNLSKVPLLCDNESAIRMAENPVEHSRTKHIDIRHHFLRDHQQKEDIEVFHVSTENQLADIFTKPLDEKTFCRLRSELNVLDSRNLD

SEQ ID NO: 283388 - protein, 92 aa, Zea mays
  unsure (1)..(92): unsure at all Xaa locations
  Clone ID: MRT4577_21550C.1.pep
RTALQLSWLIYSSKRTTYHCRAVYAECEPLLTFVGHNPAACCSYLHSSVCVLTHEHTVTICNTLLVIRTNLLXTNASMHSTNNSIIWWCHYS

SEQ ID NO: 283389 - protein, 54 aa, Zea mays
  Clone ID: MRT4577_21552C.1.pep
SNMEVKDCHVTDEDMKLMKGKKHKDMGQGLNFVSLCARNHIIDMEQACVSAKMA

SEQ ID NO: 283390 - protein, 65 aa, Zea mays
  Clone ID: MRT4577_21553C.1.pep
KEIWVISVNKLYININKILYMWRTITSPRWYTSYIWWGIISNNSKFRRRTLISMSVKWINIMIKF

SEQ ID NO: 283391 - protein, 78 aa, Zea mays
  Clone ID: MRT4577_21554C.1.pep
QADLEVALPFKSFITKRPYETEPLNTRCLAGVAYPPVPQRKDGGAKGFTRRPPSSIHAAEGPPGGFLLAPWAHIAGGT

SEQ ID NO: 283392 - protein, 170 aa, Zea mays
  Clone ID: MRT4577_21555C.1.pep
MGSRFPSHQLSNGLYVSGRPEQPKEKAPVVCSAAMPYTGGDIKKSGELGKMFDLHAEKSRKSGPLGNQPSRNTSFGGAASNSGPVSSAASRSNYSGSISAAVPGTGGSARAKSNSGPLNKHGEPTKRSSGPQSGGVTPMARQNSGHLPPILPTTGLITSGPISSGQLNFS

SEQ ID NO: 283393 - protein, 135 aa, Zea mays
  Clone ID: MRT4577_21556C.1.pep
LIHVKIFFFFFFFSHKTVANRPRPQVLKTTRPFCSEENLPRSTKSTISKAYLHGWYFLLEQYLELYFKRLHRALLPCLVLLEKGRGEPNHLLLVFQKVSQKQKALVSLFFYHSHTGQGRGRPLPHRCQGGSKILP

SEQ ID NO: 283394 - protein, 83 aa, Zea mays
  Clone ID: MRT4577_21557C.1.pep
GGGILLLPFRSVLRSYPSLACHGCFLWALHAARAACRPQWCGLCYRLVALYRHGVCLGVRRESPHALVTGGPFWAGLHRGVGP

SEQ ID NO: 283395 - protein, 185 aa, Zea mays
  unsure (1)..(185): unsure at all Xaa locations
  Clone ID: MRT4577_21558C.1.pep
MPWSCSSRFDARLLLERLRNKRLIFVGDXLNQNQWESTVCLVSSAIPSRDQKSLAKLVGPNGSLNVFTAAEYNATVEFYWAPFLVSSNSDDPQAHSVVDRVIAWLSIAKHTRHWRAAHFLIFNTYIWWLNNFEMKVLKNXLGRCRTSTXLVDRPVAYKEVLKTWANWVDRGGGDERSHRRRRRRR

SEQ ID NO: 283396 - protein, 211 aa, Zea mays
  Clone ID: MRT4577_21559C.1.pep
MKGKASRFLKQMVSTIVAVVKAKSTAVRVKTSALKTRLLIFGILRNKKLLVTAINHKIHAIMGQQQQEAADNGAGQQQRDSSDEDGGGGGGRNKAIVLYKPPSYSFSAELGAHEAEPPPQEEEEEDSDDYLTHSLFADEDDELVNAPGSVIDVMRDARAREAGDGNAAEFSLEDEIDHVADVFIRRIHRQLKLQKLDSFKRFCEMLERSTA

SEQ ID NO: 283397 - protein, 68 aa, Zea mays
  Clone ID: MRT4577_2155C.1.pep
RRRLKHNGKKAKDGRIYSTITYRLSRKRRQLKMKKYLSNAQCQIIKEHSQRIILRLLKIRILCTMPNI

SEQ ID NO: 283398 - protein, 75 aa, Zea mays
  Clone ID: MRT4577_21560C.1.pep
HRNSLLQIRFNGAADTLELVRLPLSWSVSSSSDCISSRKHVDHQILLFPQFWSNAVSGNTVLAHVWYTMFGLLVH

SEQ ID NO: 283399 - protein, 146 aa, Zea mays
  unsure (1)..(146): unsure at all Xaa locations
  Clone ID: MRT4577_21561C.1.pep
EQPLSVNTVKERLSMEXIENVVQDGEKCWEVDWDDNEMEDDENSLEDYSYDMGNTFXDDKHDGNVAGDDKXKIEXPSHAAIGWVDANHVAEAXELEDKMKELESLCNPIIVKMDQGAREDMSGDGGMDXDAPVGSGGPGPKIXEVD

SEQ ID NO: 283400 - protein, 107 aa, Zea mays
  Clone ID: MRT4577_21562C.1.pep
ILATNNSKGRANKYIFCSFFIKTWFGTKRGHIYWMNLKIFKEKLCMDKETPGLKNKGHTCLAYLACGPIELPITNRLLLLIFATRELNFRHMAHTLKRIPQTLFVHL

SEQ ID NO: 283401 - protein, 86 aa, Zea mays
  Clone ID: MRT4577_21563C.1.pep
GDWVPRGRPPLLPRRHFLIASAINEAQRDLRVAAARALYRRRGPESGMWAGMSLGPPAADLGNPVWSHRPGQDEIARRNRTPAARP

SEQ ID NO: 283402 - protein, 74 aa, Zea mays
  Clone ID: MRT4577_21564C.1.pep
LRPLVLPVSAHRQFVRVLARFVRILSPVMLPPAPCQCCVHRCWAAPACFGVMVGIVPTWWLWYITLRVLQKTHQ

SEQ ID NO: 283403 - protein, 135 aa, Zea mays
  unsure (1)..(135): unsure at all Xaa locations
  Clone ID: MRT4577_21565C.1.pep
XGAVHVRPAGRXTPTRRQYQEAPAAAGRAQPVRHRHRLLLRRQERGHRQQQPVHAGPPLPHQADEDDEEQGAASEFRGFFPCPRSRPPCHPQTENDEWRMGRKKRGESSPEHLMSGEISRAVGGDTQHGELTDDD

SEQ ID NO: 283404 - protein, 216 aa, Zea mays
  Clone ID: MRT4577_21566C.1.pep
MGRRNDDIDWKSVFLSYFSHGASSDPAATRASGVAMAASSDDDERRRGSPGLHQRSEEPRSELERRFGKCCRPGAQVDGGAQAQHCRVTRAAAKAAVGLGPDVSSASNVVYDLSPINDDKEGEHVHDKNYSKLSPKFSEKKNYGQVPLSKQKSQGHGGKRKSIPVAKIYSSQPNSTTHAIDLKEPDHQSSLPSKFSKRRKQQLQKSSSIYSRKVGI

SEQ ID NO: 283405 - protein, 106 aa, Zea mays
  Clone ID: MRT4577_21567C.1.pep
NLNAKTKFTSSEGIVDTGDEPITVDQQPCLQCTKPEPRPCKAKSLAVTNIRVSPSSIKKTKKLNTHCVRQESNVGSSKSSSGIAPYKSSGIIGNHRRCNRRWTTRV

SEQ ID NO: 283406 - protein, 79 aa, Zea mays
  Clone ID: MRT4577_21568C.1.pep
PRVRTRTYWVLLDDWSCREGRNANGCDTRPTFNSAESVNASAEKHGLDTDVQKQYTPVMKPKAYSHNFKCKGPMYAVYA

SEQ ID NO: 283407 - protein, 115 aa, Zea mays
  Clone ID: MRT4577_21569C.1.pep
KQPKTPGGGPIWPQNGGTKSLLVVKKGGPQKLLGRFLKKNKRKNFPHQNLSPPRFEFGPDQKFYPGFSLTVNSLEKNRTPPRGGNPPPGLGDCPPPPDVGGGGVSKHRAPPVGRF

SEQ ID NO: 283408 - protein, 132 aa, Zea mays
  Clone ID: MRT4577_2156C.1.pep
MALEKAKEIIASSPVDLALRKAKETVASHPVVVFSKTYCPFCTRVKQLLAKLGASYKAIELDVESDGAELQSALAEWTGQRTVPNVFVKGERIGGCDATMAMHDGGKLVPLLTEAGAIVTARATATTTTPSL

SEQ ID NO: 283409 - protein, 78 aa, Zea mays
  unsure (1)..(78): unsure at all Xaa locations
  Clone ID: MRT4577_21570C.1.pep
MLSKRPTLVQPSSKLADEKNTLLEQIKNXSFNLKPVLAKRPNVMGGPKTNLQVVAILERAHAIRQAVADDDDDDSWSE

SEQ ID NO: 283410 - protein, 53 aa, Zea mays
  Clone ID: MRT4577_21571C.1.pep
IPDLVAEASYIAFFFGCLPGTEAMRLACIEGLKVISRSGLYMPQLMGQLTNII

SEQ ID NO: 283411 - protein, 104 aa, Zea mays
  unsure (1)..(104): unsure at all Xaa locations
  Clone ID: MRT4577_21572C.1.pep
IASAIHSVISIAPSESLASQXYTLRGSLRYAHTGAATRARSQDVSLLQNKPDQKLKPAAQSCSSPYISDELAKWYGPDRRIYLPDGLLERSHVPEXLTGESLYD

SEQ ID NO: 283412 - protein, 302 aa, Zea mays
  unsure (1)..(302): unsure at all Xaa locations
  Clone ID: MRT4577_21573C.1.pep
MSSEDSLKSLSLDYLNLLINGQAFSDVAFSVEGRLVHAHRCVLAARSLFFRKLFCGLDPSHQPPPPTAGGRAPDLVIPVSSIRYEVLVLVLQFLYSGQASVAAPKSGPLPGCGARGCWHTRCGAAVDLALDTLAAARSFGVEQLALLVQKQLEAMVKEASVDDVMKVLMASRKFEMQELWAACSHLVARSGLSADLLAKHLPIDVVAKIEEIRAAANXVPRRRRRRGRRRAALAVPPHXHHYLPVNGASASEAERDHRVRRMRRALDAADIELVKLMVMGEGLDLDGALAVHYAVAALRPLI

SEQ ID NO: 283413 - protein, 36 aa, Zea mays
  Clone ID: MRT4577_21574C.1.pep
VSRIRSHGRPSRVSGRHSGLRLRRRYGCLGLLDRCR

SEQ ID NO: 283414 - protein, 67 aa, Zea mays
  Clone ID: MRT4577_21575C.1.pep
QMNLWDCLLRCPTSYTPYSTATPCRYSWIFATSKPTPMHWPPSYASSPVLLLQPSPMVTSFLSNVDQ

SEQ ID NO: 283415 - protein, 143 aa, Zea mays
  Clone ID: MRT4577_21576C.1.pep
MALSLSLARPAPLAVSAGAGARKLPAASLAFPAKSFFGAPLAATAASVASPLPRKPATSTTSLEVVAAGKKGYKMKTHKASAKRFRVTGRGKIVRRCAGKQHLLAKKNTKRKKRLSKMVQVNKSDYDNVTGALPYLKVNRKAN

SEQ ID NO: 283416 - protein, 100 aa, Zea mays
  Clone ID: MRT4577_21577C.1.pep
MVLLTSLSGSPLLLMCCVLHGDRFIPDRSAMDMDMAHYLLTAPRKDKENVAGMVASPSKEAYRRLLAVKLFNNRTQILAFRNKLPEPENVSITNVASSNL

SEQ ID NO: 283417 - protein, 196 aa, Zea mays
  Clone ID: MRT4577_21578C.1.pep
DSVSVSYLQLYMEMIQDLLDPVNDNIAIVEDPRTGDVSLPGATVVEVRDQKSFVDLLRVGEAHRVAANTKLTTRPPRRHAFLMVNVRRSVKGRTEMDVSISGENGLSSSLVGSLRPPVVRKSKLVVVDLAGSERIDKSGSEGHTLEEAKSINLSLSALGKCINALAESSPHVPVRDSKLTRLLKDSFGGTARTSLV

SEQ ID NO: 283418 - protein, 259 aa, Zea mays
  Clone ID: MRT4577_21579C.1.pep
ENESSEVHIGRMLQILRETRDDPVLSSYVIDDIWDDMKAMRDWRCMISVLLDENPAIELTDIDGTNLVRMLRASARKAVGERIVPAVDNRKLYYNKGEKEILENNRREITSALLTRYPHLLRKFISDKAKISPIVDMMTLLKLELYSYKRQEKHFMTAIDLIADAFFKHGEKDPLRSCIKAIIFCCTECQADLKDYAENKLKNLEDELVLKVRTAIKEVEAGDDEYSLLVNLKRLYELQLSKPVKNDSLFEDMYRILAH

SEQ ID NO: 283419 - protein, 48 aa, Zea mays
  Clone ID: MRT4577_2157C.1.pep
WLLVSFCTLVKAMPVFWSVGTFHGCPFALYAAYCPPYGLCPLKLCSIF

SEQ ID NO: 283420 - protein, 143 aa, Zea mays
  unsure (1)..(143): unsure at all Xaa locations
  Clone ID: MRT4577_21580C.1.pep
PPAVGNEKSHNNIXVCGHVDSAMATTTGHLIYKLEGIDKRVIYRFKKEAGVMNKRSFKYAXVLDKLKAARERGITIDIALRNADTTRHYWTAIDAPGHGDCIKNMITGTYQADXAGLIIVYTTGGPEAGISKDGQTLEHAVLA

SEQ ID NO: 283421 - protein, 47 aa, Zea mays
  Clone ID: MRT4577_21581C.1.pep
NKWFLHNWKVTSSPFPCGPVVNNIIQISLFKTSDAANLTASMEKINR

SEQ ID NO: 283422 - protein, 55 aa, Zea mays
  Clone ID: MRT4577_21582C.1.pep
SGIIRTWRLHFVLRHAQVSIILLSHGGNRECLLRSWRLLLHDISPHLMIWSCRSL

SEQ ID NO: 283423 - protein, 130 aa, Zea mays
  Clone ID: MRT4577_21583C.1.pep
MEDSLIKYGISSKKKHYIFYGEQPHHNRLWTADRLAKRNLPHPEAFPFCDQEDETIHYLLIGCVFACEVWTIILQLLGVMQLAPQPTAVCFSEWWRNTIATSPKEAHKGLNSLIILLAWELWKPRNVCVF

SEQ ID NO: 283424 - protein, 56 aa, Zea mays
  Clone ID: MRT4577_21584C.1.pep
EYEILKQHSFQDAKKNRKFQNTGLSFAKNTELTNPWSPEWPLKLWEASKNALKQTI

SEQ ID NO: 283425 - protein, 42 aa, Zea mays
  Clone ID: MRT4577_21585C.1.pep
CCSLGVVVGRRLVLGIGWGVWSVRGRCCSELAFFAVGPASVL

SEQ ID NO: 283426 - protein, 94 aa, Zea mays
  Clone ID: MRT4577_21586C.1.pep
GAWVWILDRDWSYMLHRFFSRFGYGVMGGETVSSSLSHKNSLSRLTRSGRMGRHGCERPGRTARYRCNAMENARRREEEEEEEVGRWGGCWGEI

SEQ ID NO: 283427 - protein, 32 aa, Zea mays
  Clone ID: MRT4577_21587C.1.pep
EDSNYLQARETKGPAQEKTGQVIGARHEKRGG

SEQ ID NO: 283428 - protein, 118 aa, Zea mays
  unsure (1)..(118): unsure at all Xaa locations
  Clone ID: MRT4577_21588C.1.pep
MASPAAAAVAAPPFVTVKALDSVEAPAPAYMQLSRSAQLMRAQEDAATCFRRCHYAVGHVIAVLCLLRMRXLAASCTGLHGFLVFNAAGGGTGSGLGSLLLERLSVAYGMESMLGFTV

SEQ ID NO: 283429 - protein, 70 aa, Zea mays
  Clone ID: MRT4577_21589C.1.pep
GRPRGRVLILLVVPKVKPGWRPLLGRCLVVDQIAGFYFFSKCGFGAPPGGVVIKKKVAKGSLVGSAPISG

SEQ ID NO: 283430 - protein, 86 aa, Zea mays
  Clone ID: MRT4577_2158C.1.pep
DSNLGRDNRAASLGDKIFWLLMLLWLDLAMLNTATPHTRSDQKAAHLSSLLTSGRMTPNSHAVWSKPPWNTATGYDSLITSGILPL

SEQ ID NO: 283431 - protein, 53 aa, Zea mays
  Clone ID: MRT4577_21590C.1.pep
FGFKLIVLPDLKKIVLKMFPPRHVRMIMLVPATFLGREQGTLIVYKKMRVSFP

SEQ ID NO: 283432 - protein, 204 aa, Zea mays
  Clone ID: MRT4577_21591C.1.pep
RGVGFLRYFQVKQLPNFLLASPVLSLAVYSIVHYAKLLHRCFQRTSVHKQIITALEKRPVVSYRRSDDATILSEPPAGRTKKAQGSSMATHRKPVATEMASAAFHDATPANQNIEEDQDACSISILLLPFVLHLAFMAFTALFVMHVQVSTRFLSASPPVYWAAAHVLASPSRANRRWGYLICVYFIAYILLGSLLFSNFYPFT

SEQ ID NO: 283433 - protein, 54 aa, Zea mays
  Clone ID: MRT4577_21592C.1.pep
MVKVQTPQESPILLLFSQQAPSVQLFPLHYHTQTGVRRAQHQPKLLIQRTKLKS

SEQ ID NO: 283434 - protein, 79 aa, Zea mays
  Clone ID: MRT4577_21593C.1.pep
VAFSLRWNPLLLSLHIRMSCPAPLPKAFCSICTAPAPKGFCFLSKGRGLGVQRSLYRPCRLGYQSKGSPSRDILSWKAC

SEQ ID NO: 283435 - protein, 80 aa, Zea mays
  Clone ID: MRT4577_21594C.1.pep
SKSLCGREHCWAEYQLNLRSFSCRCPHGSYPLAPRFTGLPRTFWLLRAAPTDDGATWSVVYFIGSILLGSLFFSTFYPFT

SEQ ID NO: 283436 - protein, 117 aa, Zea mays
  Clone ID: MRT4577_21595C.1.pep
RTLENTSWGVCLLRRTVRVTSSLGWYIVGLRPCRLLLLLLPPSTWSISGLGMRRHWGCGVSSCPIAPRPRGACGPGRGPLSQQGFGCGWSSVNVGWLRVHSASSAARYLHFASVSSV

SEQ ID NO: 283437 - protein, 386 aa, Zea mays
  Clone ID: MRT4577_21596C.1.pep
LSSADIWSVGCTVIEMATGKPPWSQQYQEVALLFHVGTTKSHPPIPEHLSPEAKDFLLKCLQKEPELRSTAPDLLKHPFVTGELDDLQPLNHAAHKDCFNEIHAHDMPNGLGLNHSSNWSTMNSNRSSKIKPLWEGSCDDVDMCEFADKDEYAPVGSSYNPMSEPFDNWENKFDTSPEQSSHEPMEFGELAKHVESSITGNDFTFPVGGSCEDDDVLTESKIKAFLEEKALDLKKLQTPLYEEFYNTVHGGSFQGADQTSKGKLPISPKLPPRGKSPPCKTRVGACDTLNDTAPESCSKQFPRSSVVESSRILREIASPQLNEFADKLHLDAQDSPSISFTERQRKWKEELDQELERERVMRLAGCGKTPSPNRGSNVKKECHADH

SEQ ID NO: 283438 - protein, 467 aa, Zea mays
  unsure (1)..(467): unsure at all Xaa locations
  Clone ID: MRT4577_21597C.1.pep
MAPPVAGVVRLAAASRVLVLSLYLLARLLLCPYDTSATLHPPCLSSFSSSPDPNTPVSAAISSLAVWDGVHFARPAECGYEYEQSFAFLPLLPASLVLLARSLFAPLVPILGYRAVLVLSGYVLNNVAFVAAAAYFYRLSVLILKDQKAAYRASVLFCFNPASVFYSSLYSESLYALFSLGGIFYXCFPALLQAYDATVQKKRPLLAIQALVAGALRSIFIFLPFFAFQAYGYLNICVHGSSDELRPWCKAKVPLLYGFIQSHYWGVGFLRYFQVKQLPNFLLASPVLSLAVYSIVHYAKLLHRCFQRTSVHKQIITALEKRPVVSYRRSDDATILSEPPAGLTKKAQGSSKAKQRKPVATEIAPATFHDSTTPANQNIEEDQDACSILLLPFVLHLAFMAFTALFVMHVQVSTRFLSASPAVYWAAAHVLASPSRANRRWGYLICVYFIAYILLGSLLFSNFYPFT

SEQ ID NO: 283439 - protein, 100 aa, Zea mays
  unsure (1)..(100): unsure at all Xaa locations
  Clone ID: MRT4577_21598C.1.pep
HCVVGVVKCVLGGALNYIIPFXSLPVVTHLPRXNLLSTLSLLRXHFIALLLLFFSYIPGSPCSVWRGAVXLTFXVESWPFSCERFCGFYRLLHXFHCVFC

SEQ ID NO: 283440 - protein, 44 aa, Zea mays
  Clone ID: MRT4577_21599C.1.pep
HIHQEQRRPHCCLGSCLHRALCQSAMSVLTPQILKYMMGYVLPQ

SEQ ID NO: 283441 - protein, 416 aa, Zea mays
  unsure (1)..(416): unsure at all Xaa locations
  Clone ID: MRT4577_2159C.1.pep
MALLLTGRVLVVACVLVACSXLLRLPCSGGGGDDDSGRHXTAIYSFGDSITDTGNLVREGATGMLRYIGSRPYGIDLLRGGRTPTGRCSNGYLMIDFLAKYLGLPLLNPYLDKAADFTHGVNFAVAGATALGATALAERGVTMPHTNSSLDVQLQWFRDFMASATTNSSQEVRRKLASSLAMLEIGGNDFNYAFLQLQTRPTGVGYGSGNVTRIVEILEQVGALVPQVVQSITNAAKALLEMGAVRVVVAGNLPIGCSPAYLSGANVTELAAYDADGCLAVLNGFAELYNAALRAAVAGLKRAHPRAVVAYADYFAAYARVLREARARGFDPARTRTACCGAREAAAYGFRLGRFCGAPRTAVCADRARYVSWDGVHPTQHAYEAMAELLYRGGLACPPPINWPGQTMPGANAPLN

SEQ ID NO: 283442 - protein, 99 aa, Zea mays
  unsure (1)..(99): unsure at all Xaa locations
  Clone ID: MRT4577_215C.1.pep
CLEHGIQADGQMPGDKTIGGGDDAFNTFFSETGAGKHVPRAVFVDLEPTVVGEVRTGTYRQLFHPEXLITGKVDAAHNFALCLYSIGPAIVDLCLHRFC

SEQ ID NO: 283443 - protein, 95 aa, Zea mays
  Clone ID: MRT4577_21600C.1.pep
MSSSTPSAATEEAPTVLAPAIEVDTGGAFSSILPPTPEGTEMIFGRQLRSGAEPEAAPVPLPRVLSRAHQALQETEAVILREWEALEAEHQRLGD

SEQ ID NO: 283444 - protein, 95 aa, Zea mays
  unsure (1)..(95): unsure at all Xaa locations
  Clone ID: MRT4577_21601C.1.pep
MALVSASSSSTTAVAALPRNGQQRASSSSSSSSSSSFLXGKTLLRQAEAARPSFAVRSAADSDRPIWFPGSTPPPXFDGSLXXDLGFGPWGXXSD

SEQ ID NO: 283445 - protein, 146 aa, Zea mays
  Clone ID: MRT4577_21602C.1.pep
RGSFYRLFCSNSMSDAVHLFTSNSSVTEKIFNASREAQSKRRSNSFASTVLIPADPLERGEGGRIGPGNGGRTNQSLPWRKMGGEGGTEFGEIDAGGEERSGERMGGGKSGKDQERRGRKTGGGWRVVMRGEEGWMYVCNGTGGRE

SEQ ID NO: 283446 - protein, 38 aa, Zea mays
  Clone ID: MRT4577_21603C.1.pep
LTTTTNILFRDGFCLVYNLSGLTLITGFELCDWYYTIC

SEQ ID NO: 283447 - protein, 167 aa, Zea mays
  unsure (1)..(167): unsure at all Xaa locations
  Clone ID: MRT4577_21604C.1.pep
MVMETSFRARAMHGPAGRKDRVLVRNLMLTLKRELAPVSVGRDATRQQWEVCHPKNPVDEHVLVHXNNCHGLEMARETSPLWHSRAPGCGXPCRMIAPVIDEXLGKDYTRNITCCKENTDDSPNMTTTYMITYIXTRLIIMGGXKKDNVIGASPKFTITTLISKHID

SEQ ID NO: 283448 - protein, 55 aa, Zea mays
  Clone ID: MRT4577_21605C.1.pep
ADGDTNRQALAEGSCAGLFINRITLECSSPGRAAQVGRRIQPEGRDGEAELQSND

SEQ ID NO: 283449 - protein, 135 aa, Zea mays
  Clone ID: MRT4577_21606C.1.pep
KTFYRNSQLVFHQRTHSRETYFQCPTCQKAFLRSSSFMKHQRIHTGEKPCKCDYCGKGFSDFSGLRYHKKIHTGEKPYKCPVCEKSFIQRSNFNRHQRVHTGEKPYKCTRCGKSFSWSSSLDKHQRSHLGKKPRP

SEQ ID NO: 283450 - protein, 71 aa, Zea mays
  Clone ID: MRT4577_21607C.1.pep
AKYPVWHTNMRAAGLGTRLKAGRSSHMFIRQLNNAARVAISLPVKQILSSSSHRDYYSNNAKHLRAMPITQ

SEQ ID NO: 283451 - protein, 234 aa, Zea mays
  unsure (1)..(234): unsure at all Xaa locations
  Clone ID: MRT4577_21608C.1.pep
ILKKHEVNLLIXLRHPNVVQFLGAVTETKPLMLITEFLRRXDDXRALAIAAALNPLTAVNFALDIARGMAYLHNEPNVVIHRDLKPRNILLVNSAANHLKVGDFGLSKIIKAQHANDVYKMTGETGSYRYMAPEVFKHRKYDKKVDIFSFAMILYEMLEGDSPFSNYEPYEAAKYVADGHRPVFRKNHTTELKDLVELCWSGDISLRPSFLEILKRLEKLKEHYSHENHWHLFQ

SEQ ID NO: 283452 - protein, 482 aa, Zea mays
  unsure (1)..(482): unsure at all Xaa locations
  Clone ID: MRT4577_21609C.1.pep
GRVRDFQRDRNKRRRRETLSTQIRSVRFRPRGSGGGRGREGGDERGCGGXAAADGGSGGGSSGAGSSEGGARRRFDDKGLVARTSLILWHTHQNDVGAVRKLLEEDAALVNARDYDSRTPLHVAALHGWHDVAECLVANGADVNAQDRWQNTPLADAEGAKRQPMIELLKEHGGLTYGKTGSHFEPKTIPPPLTNKADWEINPLELDFTKATVIGKGSFGEILKANWRGTPIAVKRILPSLSDDRLVIQDFKHEVNLLIKLRHPNVVQFLGAVTETKPLMLITEFLRGGDLHQYLKDKGALNPLTAVNFALDIARGMAYLHNEPNVVIHRDLKPRNILLVNSAANHLKVGDFGLSKIIKAQHANDVYKMTGETGSYRYMAPEVFKHRKYDKKVDIFSFAMILYEMLEGDSPFSNYEPYEAAKYVADGHRPVFRKNHTTELKDLVELCWSGDISLRPSFLEILKRLEKLKEHYSHENHWHLFQ

SEQ ID NO: 283453 - protein, 54 aa, Zea mays
  Clone ID: MRT4577_2160C.1.pep
TSYINGRVHVLREDSMMNKAIRMDAHDKLDLSPIGKRDPRHYSEVTNTMDKVQI

SEQ ID NO: 283454 - protein, 108 aa, Zea mays
  unsure (1)..(108): unsure at all Xaa locations
  Clone ID: MRT4577_21610C.1.pep
GRSTRPTKRPRTGYELSDMDILFAEGITSSDGVASTDFSFPQLSLGGLGVDDLDAQDTLLRXQLIRIYSRGLHGNCKWVHMFDDVRLVSFCVAASDYDEYSEDANGII

SEQ ID NO: 283455 - protein, 51 aa, Zea mays
  Clone ID: MRT4577_21611C.1.pep
LVIRCDECLHVSIHRVMQFDCITPICIESCVLRVKACVQCYQVRVILKLYS

SEQ ID NO: 283456 - protein, 80 aa, Zea mays
  Clone ID: MRT4577_21612C.1.pep
SGYGSQCSPPSRAWHTAASASAGEVVPSVHAVPRCMEVPFPKLNVQFVGVSVFLWCPSACIFQVDVGVYVSLSWSSWFPC

SEQ ID NO: 283457 - protein, 385 aa, Zea mays
  Clone ID: MRT4577_21613C.1.pep
MAMRGAAQQVARFAMGPHVPHVIAPAERSLHASAGSKKIVGVFYKGGEYADRNPSFVGCAEHALGIRGWLESQGHQYVVTDDKDGPNCELEKHIADAHVLITTPFHPAYVTADRIARAKNLELLLTAGIGSDHVDLAAAAAAGLTVAEVTGSNTVSVAEDQLMRVLVLTRNFLPGHRQAVGVGWDVAAVAHRAYDLEGKTVGTVGAGRIGRLVLQRLKPFNCRLLYHDRLRIDPALEAEIGAQFEADLDAMLPKCDVVVINMPLTEKTRGMFDKERIARMKKGVIIVNNARGAIMDTQAVADACATGHIAGYGGDVWHPQPAPKDHPWRYMPNNAMTPHISGTTIDGQLRYAAGVKDMLERYFKGQDFPVQNYIVKEGKLACQYQ

SEQ ID NO: 283458 - protein, 103 aa, Zea mays
  Clone ID: MRT4577_21614C.1.pep
QDREGDHPLPGAPPKKGSQQGKKENERHQARRSTISLDEKKIAELQYLSLLTTEPRKETPATKMAARDQRAVMVTSCDTTTTDCSARRGCSAITTSSGKSHVG

SEQ ID NO: 283459 - protein, 153 aa, Zea mays
  Clone ID: MRT4577_21615C.1.pep
MPMALSSSLRGLVALIPPALPPARPSGAAAAAPAPRARGRTGRGAGVVALAAALPSDAQWLERLPEKKKPLYTHSLPCIEAWLRSLGFTQSREDPAVWVAEKPLWHARLSLDVTDLHIRYLKSGPGNLDKDMERRFSYALSREDIENAILGGP

SEQ ID NO: 283460 - protein, 108 aa, Zea mays
  unsure (1)..(108): unsure at all Xaa locations
  Clone ID: MRT4577_21616C.1.pep
PSYRSDGIFDXTAPGHAPXTADPRPLPAMGAYHLLKMTPLPDPXPRLTVAELLNHPWIGKHGEAPDKPLDITVIRPMTHFTAMDQLHKGALNGVADKPFQEEMIGPQE

SEQ ID NO: 283461 - protein, 82 aa, Zea mays
  Clone ID: MRT4577_21617C.1.pep
GRTAPEGRRLIESPQELPRERVYKCAAANECSRCSPAGTSAGAVYGSSPCAGRAAGTRQGSTDKSVGASAILVIRMNAYMAQ

SEQ ID NO: 283462 - protein, 58 aa, Zea mays
  Clone ID: MRT4577_21618C.1.pep
FSFYSKGGGLVSFKPFWSFWARKGGVRDFFPSRFGGLVGKKLAYFENPLIKKKKKKKK

SEQ ID NO: 283463 - protein, 294 aa, Zea mays
  Clone ID: MRT4577_21619C.1.pep
DTQGTTRPKEVESLKGSRVKCVACGPWHTAAIVEVISDFKSNSPRSKLFTWGDADRGKLGHADKKMKLIPTCVDSLTDYDFIQVSCGTALTVALSVTGVVFTSGSSMHGQLGNPYADGKTVSAVEGLLKSEFVRHISSGSSHVAVVTTNGKVFTWGKGKEGQLGLGDFLNRSTPTLVDALEGRHVESLSCGYNYTAAVCLHKVISRKDLSVCSGCKMAFGFTRKKHNCYHCGSMFCNSCSSNKVAKAALAPDKSRRYRVCDGCFSQLLKVVDSGKVKSELNTSKGAEIIRSYTP

SEQ ID NO: 283464 - protein, 62 aa, Zea mays
  Clone ID: MRT4577_2161C.1.pep
RQRGPCLTGAQKMGFFFIGDKPPVRNPPIKPQIFLSIPFQVTYPLKHCHLFGQKPWSFNPFF

SEQ ID NO: 283465 - protein, 104 aa, Zea mays
  Clone ID: MRT4577_21620C.1.pep
MRSMPFQLKTGHHHHGAAMEGKPPPPPTTQQPAPTPRVSRLRRLLGRVSSSEKFAADGKDRDKDEKLPPPPPPLPPATDDADAAGSLGLDRMVLSFMEEASAVD

SEQ ID NO: 283466 - protein, 74 aa, Zea mays
  Clone ID: MRT4577_21621C.1.pep
YCASIKNKCETGSLNNYIKLIIGNTDSKKSFLKPCYKSHQFYWICPLKKHIHIFVHTNIAKFLSVKRSLIYTIT

SEQ ID NO: 283467 - protein, 77 aa, Zea mays
  Clone ID: MRT4577_21622C.1.pep
LPITLRSMAKSSSRGIARVNLGVRSWVPIHLRKFLGPQKNNHNCPKIFNKNLIKRVEGVVHPGNPGRVPPGVPPSPK

SEQ ID NO: 283468 - protein, 91 aa, Zea mays
  Clone ID: MRT4577_21623C.1.pep
PKSEQEACPLCSRGFNRGGAPMSPRGEQRINLTLCFPPGLFFCIILPPPPTAFSSDKNRRDFLSPGPALGGIYPPAAPHLGCPPAKFPPPH

SEQ ID NO: 283469 - protein, 109 aa, Zea mays
  Clone ID: MRT4577_21624C.1.pep
AGPGQQARIPFTFHALRLRWCSLTEHQSQRPIVTLQRHTPVEEWCTTNCKDDCWFMISANWNNVTNAMNANSASNSSSGVYQLPRMLPIIPIMHPKGAMPPARWTQTYS

SEQ ID NO: 283470 - protein, 96 aa, Zea mays
  Clone ID: MRT4577_21625C.1.pep
PRKTFVSLRSRPSFFWVKIFCLAKKETVPKVFCLIKEQLAFSHGGAIPGGSKFPQLGGDSLETGEIFMGPQEGFYITVGETRAPGLSTGQGPSDLL

SEQ ID NO: 283471 - protein, 88 aa, Zea mays
  Clone ID: MRT4577_21626C.1.pep
NPRVKGGGAKLFTTGKFLNLLQPKPPRAQKLKGPPQIKTNCPPKNLRAPPPFYSWASLEGPPPRALFWFFRLNLPGGPPPKGVGKEKT

SEQ ID NO: 283472 - protein, 693 aa, Zea mays
  unsure (1)..(693): unsure at all Xaa locations
  Clone ID: MRT4577_21627C.1.pep
MEHVLSSRRFPTDPNEYKLYEEIGDGVSATVYRALCVPLDILVAIRVLDLEKCNNDLDGIRREVQTMSLIDHPNLLRAYCSFTNGHQLWVVMPYMAAGSALHIMKTSFPEGFDEPVIATLLREVLQALVYLHSQGHIHRDVKAGNILIDTNGAVKLGDFGVSACMFDTGNRQRARNTFVGTPCWMAPEVMQQLHGYDYKADIWSFGITALELAHGHAPFSKYPPMKVLLMTLQNAPPGLDYERDKRFSKSFKDLVATCLVKDPRKRPSSEKLLKHSFFKHARSAEYLARSILDGLPPLGERFRELKSKEAELLLNNKLGQESKEQLSQKEYIRGISGWNFNLEDLKNAAALIDSSNGTCYLDVRENRVKDDSQKAYNGPEHIYQERLNHVASRRPEEDEIQEVEALNDAVSSSFSSRSLEALKSCFDVCGVDDPSPTAXFKSATKCRNFTFPAVAKIGALXSGDCNGESLERSVSVPTNLVTSGYHKHSSGSLIPEQVLSPYLSSDLERDGFRQKNLSSRNCSGPLLFRQMKDSRTHQSVAPDESSEGKIIHRRGRFQVTSDSISEKVATSSCNSSRINLPIDAARSSPKLSAILPTLQFLMKQNTMQKEVLSRLISSIEETSDDSEATGSSSYQSSGGPAREKELHLYVLQLQRSVTELAEEVQRLKLQNNKLEHQINILSRKDERSSTQDN

SEQ ID NO: 283473 - protein, 49 aa, Zea mays
  Clone ID: MRT4577_21628C.1.pep
MAPKRGGMAPMPAKKKTDPVTNPLFESRPKQFGIGGALPRKNDLHRFVK

SEQ ID NO: 283474 - protein, 36 aa, Zea mays
  Clone ID: MRT4577_21629C.1.pep
VILFFNVILKECYPKVRGWASFLFFYGSSMFNDTDF

SEQ ID NO: 283475 - protein, 91 aa, Zea mays
  Clone ID: MRT4577_2162C.1.pep
GVGVFFFFFFFFFLVFFFVIFFFSFFFFFITNAQPEEGTHMLIHPFYTEKTGGGGGPLPQLKTNGLWLGCGKALLKSGSHFYPHGHVPKTP

SEQ ID NO: 283476 - protein, 132 aa, Zea mays
  unsure (1)..(132): unsure at all Xaa locations
  Clone ID: MRT4577_21630C.1.pep
ILSGQXTITNTTNXQYSSXLIIIMAIAVKLGIAPFHFXVPEVTQGTPLTSGLLLLTXQKLAPISIIYQISPSLNVSLLLTLSILSIIAGSXWINQTQLRKIXAYXSITHIGXIIXXLPYNXNITIXNLXIIS

SEQ ID NO: 283477 - protein, 86 aa, Zea mays
  Clone ID: MRT4577_21631C.1.pep
LNSPRYYSREDAEDAVKYISGTMLDDRPIRVDLDRGFEEGRQWGRGRSGVQALQTMMSVRCSSKKELMFPVKKCGMRTDIKIGEYI

SEQ ID NO: 283478 - protein, 41 aa, Zea mays
  Clone ID: MRT4577_21632C.1.pep
LMTTQVFFLSFPDVNSQCRLSSTVNRILVAVHLPLFVFSVV

SEQ ID NO: 283479 - protein, 259 aa, Zea mays
  unsure (1)..(259): unsure at all Xaa locations
  Clone ID: MRT4577_21633C.1.pep
PPPPAVSIHLRAAARPSYLTAGAAPSSHLSPRAFPPAPSTSIYCLAALLPDVVPRSWKXGGRGRGRGGGFGYDHPAKHVPHEDFPDIALPEMKCAKASNEEKALIVSTLKLEEFWRSSCYYLEEDAPKKKNEDKEIERFSDRKRKTQSKREGLASYLKLAPSNFPSELVQGSRRGQATNKKLRWDKESDEQAFEAFEKLEQKHKDGSKVEKEGDDEDEQEEEVQEEEENSDDDYNQNIEFDDDDDDWNQEDEAQEDFYD

SEQ ID NO: 283480 - protein, 58 aa, Zea mays
  unsure (1)..(58): unsure at all Xaa locations
  Clone ID: MRT4577_21634C.1.pep
LMLDSRCNSLMDSCVVVSRLGHEVSDSCLGLIHCDVVVCGDRLSERNKXIFVEDLGAC

SEQ ID NO: 283481 - protein, 87 aa, Zea mays
  Clone ID: MRT4577_21635C.1.pep
HHSVLVILIPVEDLVRHCDQLMDDSFCLHEIQLFRCLLAGVSVRVEVDVVIVHVALAAHYIFYTGHVVHDLLIAVCMLCSPFCAYML

SEQ ID NO: 283482 - protein, 588 aa, Zea mays
  unsure (1)..(588): unsure at all Xaa locations
  Clone ID: MRT4577_21636C.1.pep
MASLAISRPPGTSHRAAPFVLGCPPPWPPPPPPAARPRPPPPRPDAAAAARLLEEEAGAGSSRARSPGGPELESMVLDLNAESPTPGSASAASSSSVVVGGGFFRFDLLGGTPDEEGCSPSPPIVTRQLFPLPYPDAAGSTAASTASNGSPPPEVAVAWARRPADLGAPALAQGKVVSAPSSPAVVSPAAGKKSRRGPRSRSSQYRGVTFYRRTGRWESHIWDCGKQVYLGGFDTAHAAARAYDRAAIKFRGLDADINFQLKDYEDDLKQMRNWTKEEFVHILRRQSTGFARGSSKYRGVTLHKCGRWEARMGQLLGKKYIYLGLFDSEIEAARAYGRAAIRFNGPDAVTNFDSVSYDGDVPLPPAIEKDVVDGDILDLNLRISQPNVHDLRSDGTLTGFGLSCNSPEASSSIVSQPMGPQWPVHPHSRSMRPQHPHLYASPCPGFFVNLREAPMQEEENRSEPACPQPFPSWAWQTQGSRAPVLPATTAASSGFSTAAATGVDAAXPAXVPPPSXPPAVLGLPPAPLPPNRLTETDHLLLSWRRRRRLIAGRWLAGCPCNATPVGAGRYSVTVATVGYGFVGLQRMQ

SEQ ID NO: 283483 - protein, 86 aa, Zea mays
  Clone ID: MRT4577_21637C.1.pep
IPTWSKPYRLSNQIAIMDRSHDNDHTNRKHHQAEDREDMVEQQQPKRAPKLKYLDFVQVAAAQAEECLAGLYGLDKDHAGPLLPSD

SEQ ID NO: 283484 - protein, 62 aa, Zea mays
  Clone ID: MRT4577_21638C.1.pep
NPCLVPPAPPGLKWPVTFKGKKTCHKWGPLSFMGGGGKKAPPFFWFFPPEPGRGPPFYVSPR

SEQ ID NO: 283485 - protein, 115 aa, Zea mays
  Clone ID: MRT4577_21639C.1.pep
HFNRSLGREWPSGSLDGVKSYHASLLRHSRSNSQKGQAGISSHRSVPLMNMRPIKQSIARKSCDVASFAQDLRWVAQREALLCSSSSEKRYRQSKKTSTIRSSQTPIPSRLGHAP

SEQ ID NO: 283486 - protein, 120 aa, Zea mays
  unsure (1)..(120): unsure at all Xaa locations
  Clone ID: MRT4577_2163C.1.pep
GGTSCALVIFFKKKKNKTISKLVEIHITHMEERKAFLRALWIRTGWGGGRCSNXFVASTLPTXHRQRCVGCEYTGQASVCVDANRDFGDKGPYHKGLHVLLLGNSCTLFLDPELPAYRWV

SEQ ID NO: 283487 - protein, 55 aa, Zea mays
  unsure (1)..(55): unsure at all Xaa locations
  Clone ID: MRT4577_21640C.1.pep
RKGGAGEAPKLGGLNKKPPLPSREIQTPGGLVLPGELAKHPVFXGPKAVPKFPPP

SEQ ID NO: 283488 - protein, 122 aa, Zea mays
  Clone ID: MRT4577_21641C.1.pep
NRPPFVAPGTKKRPRAPPHFKVLVKGCFLPWPYPPRAEPAPTNGCNTAWDCVFCVCGGGRAVVLPRSPCAAPLAVGSTVGSPVGVFFLFVYQKKKKGIGCGGVSPCARPAPGFLSPLLLYPY

SEQ ID NO: 283489 - protein, 127 aa, Zea mays
  unsure (1)..(127): unsure at all Xaa locations
  Clone ID: MRT4577_21642C.1.pep
DHQIMSFKRLPALNSAYXSQQQQLPLNQLADVYPQQXVPLNPLAXIDQWCLLTXLQLLPYIHVAGGSTADFLTQPQXLPVYHXAAPNAGTILQLQQLVALNQQALTNPTVLYQQPIIGGALFYIAYE

SEQ ID NO: 283490 - protein, 53 aa, Zea mays
  Clone ID: MRT4577_21643C.1.pep
HFPYQLMYSTSQSRHQVSECFECTKCPVLAVIRISRRIHALRLYQSLYPARLR

SEQ ID NO: 283491 - protein, 40 aa, Zea mays
  Clone ID: MRT4577_21644C.1.pep
INFFYFFFFYFFFFFFFFFFFFFFFFFFFFFWSSKGIGTP

SEQ ID NO: 283492 - protein, 76 aa, Zea mays
  unsure (1)..(76): unsure at all Xaa locations
  Clone ID: MRT4577_21645C.1.pep
SWHTPPFNIPTAFYMPTSIHLSTKKQPQPWKYPTQPPEFSPCQEKRSCGVCSVGSPLLGHXVEFLRXHQCNPAATP

SEQ ID NO: 283493 - protein, 92 aa, Zea mays
  Clone ID: MRT4577_21646C.1.pep
EATTIFFCLILVGTNKWHHYLSFYVNRPSLGIQMHRPVVFGLQGIVLSRAVQTGPCPNLVAILFGEKASMHSNDAMKFSSLNKNLDDSSVTI

SEQ ID NO: 283494 - protein, 394 aa, Zea mays
  Clone ID: MRT4577_21647C.1.pep
STAIFSTIKQATALGCFPRLKIIHTSRKFMGQIYIPVMNWFLLVSCLAFVAVFGSINEIGNAYGIAELGVMMMTTVLVTIIMLLIWQVNIVIVLCFLNLFLGLELFFFSSVLGSAADGSWVLLVFAAVLYLVMYIWNYGTKLKYETEVKQKLSMDLLIQLGCNLGTVRAPGIGLLYNELVRGVPAIFGHFLTTLPAMHSMIIFVCIKWVPVPVVPQNERFLFRRVCPKNYHMFRCIARYGYKDVRKENHQAFEQLLIESLEKFIRREAQERSLERSLESDHNDDKDSEEEIASSSSRVIDESGGADNSALGSSMSLEEGSSMDNELSFIHKAKESGVVYLLGHGDIRARKESFFVKKLVINYFYAFLRRNCRRGIATLSIPHTRLMQVGMQYMV

SEQ ID NO: 283495 - protein, 112 aa, Zea mays
  Clone ID: MRT4577_21648C.1.pep
MVKGRTGQRVRLYVRGTILGYKRSKSNQYETASLVQIEGVNTREDVAWYGGKRMAYVYKAKTKSNGTHYRCIWGKVSRPHGNTGVVRAKFTSNLPAEAMGKKVRIFMYPSSI

SEQ ID NO: 283496 - protein, 176 aa, Zea mays
  Clone ID: MRT4577_21649C.1.pep
PPQQKPPMPQQQSMDIVMVPAETTPHADIPVHEGSSGGAASSRWPKAEVHALIQLRSNLDTRYQEVGPKGPLWEEISAGIRRMGYNRNAKRCKEKWENINKYFKKVKESNNSRIVFPGHGPVIDPSARTQALSPGDSHPPPLLHGFFSFSRSHVTFVSTHLSPPCMLVHISSSLHL

SEQ ID NO: 283497 - protein, 59 aa, Zea mays
  Clone ID: MRT4577_2164C.1.pep
SKIHRTVAFNKMHKWLIFSVHVVLVDREQPLWNNRDAGPNSYAEGTQLHRSKIKDRAIF

SEQ ID NO: 283498 - protein, 114 aa, Zea mays
  unsure (1)..(114): unsure at all Xaa locations
  Clone ID: MRT4577_21650C.1.pep
NXAXGAVRGGEARTHDTSRGSGALACACSRLQPLPTSGAPAXYGTSGPVGAMGIYXREGGGGPTGVWGEPFRVDADAGGMRLRLGACPSGTGGTPGPVERGXPEAGEIKLGKRL

SEQ ID NO: 283499 - protein, 128 aa, Zea mays
  unsure (1)..(128): unsure at all Xaa locations
  Clone ID: MRT4577_21651C.1.pep
LAPSAIIRQFLPTVTXMGLVHLHMQANMHHQALAASVLHQPIAQSHHQSLPHLTXIQAITTQQHQQFALALNHLAIVNPERYLQEHLLAFDPLAVANVVAXTQQHLXQQCMPTISLLAMVNHVYYVQQ

SEQ ID NO: 283500 - protein, 95 aa, Zea mays
  Clone ID: MRT4577_21652C.1.pep
ASFPIAVPARMETQPPRRGAGAVKAHPPSGVRGFTRCSLRLHALYCRAAPLSRRSRSRRRRSGSPSHLLALYPGPRQRVGGPPPSSSLVAASAGP

SEQ ID NO: 283501 - protein, 157 aa, Zea mays
  Clone ID: MRT4577_21653C.1.pep
CVLHDRNNLFGLQFHVLDKYYDKKLHDFFSCTLDVRDGPGSEDYCKLWARWEKSVKEIAVSDCSAFWKFIATNWSQNTQKLLSGCAKVPVCTDGKIILTKKEDVFIPDDLLLTDLFSKLTQHSFFIWYPASILPSMSRARLNHIYDTIGVQRISKAA

SEQ ID NO: 283502 - protein, 95 aa, Zea mays
  unsure (1)..(95): unsure at all Xaa locations
  Clone ID: MRT4577_21654C.1.pep
XXLXXKKXXXGGXNKGAPRHPPKGXEXPNTXXPEDRHKTPPETQKAAAQDQAPPRRQTPPXPRASRRTXGGTPATQGPAGXRKHHPRRPRSTAPG

SEQ ID NO: 283503 - protein, 60 aa, Zea mays
  Clone ID: MRT4577_21655C.1.pep
PVVCSQFPNAAGGCGACVVLISKYNPATDEATEFSASSCLTLLRSIDRCSVTTSEGIGTR

SEQ ID NO: 283504 - protein, 103 aa, Zea mays
  unsure (1)..(103): unsure at all Xaa locations
  Clone ID: MRT4577_21656C.1.pep
PXQFLPSNQLXPXNSXXYLHHQQLLPFXXLXFXXPXTFXTQPXXFPFYHHXXPNTXTLLQLQQXLPFNPLPLTNPXFFXQQPIKDXPLFISYLFNNKFFFFPS

SEQ ID NO: 283505 - protein, 109 aa, Zea mays
  unsure (1)..(109): unsure at all Xaa locations
  Clone ID: MRT4577_21657C.1.pep
MINDLAALTEMIETVKQHVNDAKSPELKDTRMLRDVLIEAVHXSGKNHRQNSNAAPCQFKPSTELLNAFCTSGRLILELIYKAHTQCYEDAYLMQAVAEIIRTLHDQDV

SEQ ID NO: 283506 - protein, 125 aa, Zea mays
  unsure (1)..(125): unsure at all Xaa locations
  Clone ID: MRT4577_21658C.1.pep
MSQRDVDYSCGFCGYPLNLSSSNRSTSEVGSSYKKSLKKGLISFISVDLSRFTQVDKVSCFPLTWRSYRPKTKLLCRKCGASIGYGIRWASWLCAVLXPASSSSSSTSQKYLIKIQALQPSDGTQ

SEQ ID NO: 283507 - protein, 173 aa, Zea mays
  unsure (1)..(173): unsure at all Xaa locations
  Clone ID: MRT4577_21659C.1.pep
PRVRLGLFLTWRIKHKNEDAIWLWGMSVVCELWFGFSWLLDQLPKLCPVNRATDLAVLKDKFETPTPSNPTGRSDLPGLDIFVSTADPEKEPPLVTANTILSILAADYPVEKLSCYVSDDGGALLTFEAMAEAASFANMWGSFXCRKHNIEPCNPDRYFNLKKDPSKNKVRRI

SEQ ID NO: 283508 - protein, 61 aa, Zea mays
  unsure (1)..(61): unsure at all Xaa locations
  Clone ID: MRT4577_2165C.1.pep
ATYHLKGLYNDVKISVSSNSASEKPMLXMWHLNSTCPKGTIPIIRKKEDDLLRAXSIKRMP

SEQ ID NO: 283509 - protein, 405 aa, Zea mays
  Clone ID: MRT4577_21660C.1.pep
MGCFSTFCKKRRATRQPSSHHNEDVPGCSNITKYTYKELVRATNNFNPLNKIGEGGFGSVYKGQLRNGTVIAVKVLSSESRQGVREFLNELVAISDISHDNLVKLYGYCAEGDQRILVYNHLENNSLAQTLLGSSHSNIQFDWKTRVNICLGIARGLAYLHHGVSPHIVHRDIKASNILLDRDLTPKISDFGLAKLLPPNATHVSTRVAGTLGYLAPEYAIRGQVTRKSDVYSFGVLLLEIVCGRSNSDTRLAYGDQILLEKFPPTRPRTRGEKTWMHYEQGSLERIIDRSLGGGDLDVAQACRFLKVGLLCTQDVTRHRPDMPRVVAMLTGEWDVEPETVSKPAIISDFMDLKVRSTRKASDNVATPPTSSSTFLSSLMAHSSPLLSNESTQASMAFTGVSDRE

SEQ ID NO: 283510 - protein, 348 aa, Zea mays
  Clone ID: MRT4577_21661C.1.pep
MPPWKPLAGGKLKKPLTDKQRAAAEQRLSHLRAHLILRSLDSPAGGARSLPPPQEAALDALGLLIFFRLDLQSGAPRPDLIAPLVAYYDPVCKRSFVRGVRVGVSRHHIIRALCLPSKPASAAPAPADVDPAAVVAAVMQLLQDYVLLPFQGDDRCILPQQVAAAEQMVREGAAHRVDWGELIWGLVEKEMLELPKREDWVCYYGPHLQRLIYAQKPHLLELVEEGPVQEPSANVDLKRKSMVELEQGDGDREAGNNVKSKSLNDSESGKAGARNDGLDELELADAVTRNKVMGEFGLGDVDARKNSIVKLEVVDEDARCKCLNEIQAVDAINNNIVELDAANERCKV

SEQ ID NO: 283511 - protein, 508 aa, Zea mays
  Clone ID: MRT4577_21662C.1.pep
MDAHTTHIVARKNTSLSFTSNELMDHFPFAWLPMDPFTAMALSGTLSPSFSTTSTNDTMYNLNPALYASLVPPIRKPATPTTVEVGRQCKEEEDASIRLVHLLITCTSAIETGDYSIAQGNLSEARKILGEIPTSTGIGRVGKHFIDALVQRLFPAYPHAAPPSPSPSTSIDLHNNFYDAGPYLKFAYSTANQAILKAIKGYNHVHIIDFSLMQGLQWPALMDVFSAREGGPPKLRITGIGPNPIGGRDELHEVGIRLAKYAHSVGIDFTFQGVCVDQLDRLCDWMLLKPIKGEAVAINSILQLHRLLVDPDANPVVPAPIDILLKLVIKINPMIFTVVEHEADHNRPPLLERFTNALFHYATMFDSLEAMHRCTSGRDITDSLTEVYLRGEIFDIVCGEGSARTERHELFGHWRERLTYAGLTQVWFDPDEVDTLKDQLIHVTSLSGSGFNILVCDGSLALAWHNRPLYVATAWCVTGGNAASSMVGNICKGTNDSRRKENRNGPME

SEQ ID NO: 283512 - protein, 46 aa, Zea mays
  Clone ID: MRT4577_21663C.1.pep
GYEEIAFCIQSGSSARITWSHWNLLLKGTWCKNYDDCQVEWSFLIG

SEQ ID NO: 283513 - protein, 168 aa, Zea mays
  Clone ID: MRT4577_21664C.1.pep
MAALPLATAEACDANAALIMNGDLRSLQPIFQIYGGRQIFAGPVVTLKIFEDNVLLREFLEEKGHGRVLVVDAGGSMRCAVLGGNLAQLMQNNGWAGIVVNGCIRDVDEINGCDVGVRALNSHPMKSNKKGVGEKHVPVTFAGTRICDGEWLYADSDGILISRSELSV

SEQ ID NO: 283514 - protein, 280 aa, Zea mays
  Clone ID: MRT4577_21665C.1.pep
MCLAAACASATLARRLSPSTALPRRFLLGAPTRPSPPPPLLRRCLPFHFYHMAQYWTQPSLDRNKAMVEYLKQYGSVRTDKVKEVMETIDRALFVPEGTPYIDSPMPIGFNATISAPHMHATCLELLKDHLQPGMHALDVGSGSGYLTACFAMMVGPEGRAVGIEHVPEIVASSVENVQRSAAAPLLRDGSLSFHVTDGRLGFPDAAPYDAIHVGAAAPEIPQPLLDQLKPGGRMVIPVGTYSQDLQVVDKNTDGSFSVRSDAAVRYVPLTSRAAQLQGP

SEQ ID NO: 283515 - protein, 53 aa, Zea mays
  Clone ID: MRT4577_21666C.1.pep
TRHDSCTLISSWSWLQAQSDGVHVRPDDNTPLAMLLGAFFLLPTSSYARSIPN

SEQ ID NO: 283516 - protein, 68 aa, Zea mays
  unsure (1)..(68): unsure at all Xaa locations
  Clone ID: MRT4577_21667C.1.pep
PPGWXGSACGRCLRWRWPWRXPPGSGWGSARLALCLPLLPWPPPLVCSFAPRAPCXWPWLQXCRSRGS

SEQ ID NO: 283517 - protein, 174 aa, Zea mays
  Clone ID: MRT4577_21668C.1.pep
MAVAAPGQLNLDEFPSWGSRGVDCFEKLEQIGEGTYGQVYMAKETETNEIVALKKIRMDNEREGFPITAIREIKILKKLHHQNVIQLKEIVTSPGPDRDEQGKPIDGSKYKGSIYMVFEYMDHDLTGLADRPGMRFTVPQIKCYMKQLLTGLHYCHVNQVLHRDIKGSNLLIDN

SEQ ID NO: 283518 - protein, 81 aa, Zea mays
  Clone ID: MRT4577_21669C.1.pep
RLPSLDIFHYCYIVQNCHSLIASHFGLQLSSSIGQENTHTHTLKRSYKFGFVCSSAFGSPHIFAVCSNVMYCHPPYILISC

SEQ ID NO: 283519 - protein, 187 aa, Zea mays
  Clone ID: MRT4577_2166C.1.pep
CLQGSLRTLCPATTPSLHTAQPCEASWSLSATSGKPSTTARDAGSRRVASPTRRASASTRLRSASSESVSSPPTTIRKGRVACRGARRSNPLSMSPPTSPTSSSLVASSTASTGPWKPPTGGPESRVNPFSMSTIPSSSSSAVSSSTAPRSNSDPTPPRAFREIISSSSSSSPEVSSTSCDAGKRWG

SEQ ID NO: 283520 - protein, 47 aa, Zea mays
  Clone ID: MRT4577_21670C.1.pep
FFFFLSHSLIPRLILCRCYFKQRTIKRTSVVHFKLNHSNKKKEGVLN

SEQ ID NO: 283521 - protein, 199 aa, Zea mays
  unsure (1)..(199): unsure at all Xaa locations
  Clone ID: MRT4577_21671C.1.pep
LGPSRPAXEEPKQPTESHLLCSARRLQPMPSLFAAPSPPRPAVTRPRRDAGVGPSGARARLAIPRNRLLDHVDIWRQAARRRGIKQVLLQEMKCDHGTTKVLAVNPKVPTVTTEIGGGYAKGPGKFLVTDGLAIAPFSLINVLNELKAKELSVLDLETTEVTFTQVKALDLLRAALVSRGALTLACLPTKPKRRPNHRY

SEQ ID NO: 283522 - protein, 104 aa, Zea mays
  unsure (1)..(104): unsure at all Xaa locations
  Clone ID: MRT4577_21672C.1.pep
ALAHHAPLPVRATTSXXGGRLXKHAPSSSSGSGRPRLTLIRNAPVFAAPATVXCKRPGGQLRSHTRETERGKGGHPPLVGDKRGGERGQTRGGEEEENDALPLP

SEQ ID NO: 283523 - protein, 107 aa, Zea mays
  unsure (1)..(107): unsure at all Xaa locations
  Clone ID: MRT4577_21673C.1.pep
MMTLGLSLLCADRGPAVEQNCGCXQPNVCCSKYGYCSTTDKYCGNRCQSGPCRSGGGCSNRGRGANVASVATGSFFNGHKNHAWSRCEGNNFYTRSAFLSAVKAYPS

SEQ ID NO: 283524 - protein, 111 aa, Zea mays
  Clone ID: MRT4577_21674C.1.pep
FFFGVFFFFFVGINIIFFFFYYYFLKGKKTFIPRKTKFLRICPPRVPDQKAYPKKNQANCFKTGNYRFNKKIRGGKTILAKQGNQILAHCRVRAPPGPLRGSTEKNPPGFS

SEQ ID NO: 283525 - protein, 587 aa, Zea mays
  unsure (1)..(587): unsure at all Xaa locations
  Clone ID: MRT4577_21675C.1.pep
GTSRPAGTKAENTSQTHTQRRLLETADKSDDQTGSSETHESDSGAKXAATVENSEPLDEDADASFDLFRDPEDLPDEYNYDYDDYVDDRLWGDEDWKEQEHEKEEDYVSIDAHILSTPVIADIDKDGVQEMVIAVSYFFDHEYYRDSDHAKELEGIDMGKYVASSIVVFNLDTRQVKWAADLDLSTDAVNFRAHVFSSPTVVDLDGDGYLDILIGTAYGLFYVIDHRGKVRNKFPLEMAEIHAPVIAADINDDGKIEMVTTDSHGNVAAWTAEGEEIWEVHLKSLIPQRPTVGDVNGDGHTDVVVPTVSGNIYVLSGKDGSKIQPFPYRTHGRIMSPVLLLDMSKHGDNAKGLTLATTSFDGYLYLIEGSSGCADVVDIGETSYTMVLADNVDGGDDLDLIVTTMNGNVFCFSTQSPHHPLKEWRSSNQGRNNAAYQYNREGIYVKHGSRTFRDEEGKNFWIEFEIVDKYRVPYGKQAPYNVTVTLLVPGNYQGDRRIVVSGVYHQPGKQRMMLPTVPVRTTGTVVVEMIDKNGLYFSDEFSLTFHMHYYKLLKWLLLLPMLGMFGVLVILRPQEGAPLPSFSRNID

SEQ ID NO: 283526 - protein, 47 aa, Zea mays
  Clone ID: MRT4577_21676C.1.pep
ALTSFRVSLLIPSVCSHAWIRRTCTRPRLEWPIGAEDVGTYACSVAW

SEQ ID NO: 283527 - protein, 72 aa, Zea mays
  Clone ID: MRT4577_21677C.1.pep
PGVPHRAQGPAIGENGRPRRGPMRGLLPRWNAPQLLPGATRCSAGDRLRNDHRRRAVIRGSSPLVPAITRWT

SEQ ID NO: 283528 - protein, 72 aa, Zea mays
  Clone ID: MRT4577_21678C.1.pep
RQGKEAGQSAIDAVRARVGADCLVVGEEPRPPRVFREAGPGDRDHGGGLGLVYLGNLVKRNLYNLGLIKSCS

SEQ ID NO: 283529 - protein, 133 aa, Zea mays
  Clone ID: MRT4577_21679C.1.pep
GGPKAQQIRPCPDRPFGGGTRGGEINVSGGGGGVPIPFRALAPFVQLNPNAAVFPPPSLGTKVCVEKKPSPGGACKGHGVKKMGLLCSGGGKGGRSPLCAPPTGVFVLLHVLGLSPPIKASLGPGKSTMFRFF

SEQ ID NO: 283530 - protein, 61 aa, Zea mays
  Clone ID: MRT4577_2167C.1.pep
NLIASFRGNIFNNTVLLFIDASTFLRCLIISEESVLCIAFQQNFNSISLYIDSYIFRSAFI

SEQ ID NO: 283531 - protein, 35 aa, Zea mays
  Clone ID: MRT4577_21680C.1.pep
IIKKKKKKKKKKKKKKKKKKKKKKKKKKKKKKKAA

SEQ ID NO: 283532 - protein, 44 aa, Zea mays
  Clone ID: MRT4577_21681C.1.pep
AIILPPFGVFLKVGCKGEIWVCLLVPFLAYFPGVIFPIFGFPQG

SEQ ID NO: 283533 - protein, 523 aa, Zea mays
  unsure (1)..(523): unsure at all Xaa locations
  Clone ID: MRT4577_21682C.1.pep
RFLLGTPGMVALDLDATLKGLFQQVLHCLENIPKPQGESVPDITADLADLRKHWLSILMIVTSSRSSINIKPTDXATVSTGKEGLVSEGNAAYNWSRCVDELESQLSKHGSLKKLYFYHQHLTTVFRNTMFGPEGRPQHCCAWLGAACSFPECASAIIPEEVNKIGRDSISYVESLIESIMGGLEGLINILDSEGGFGSLEMQLSPEQAALRLNNTRAKGVSSLLTPGYESYPDNSSSIKMLEAAMQRLTSLCSVLNDMEPIGVLNHVFVLREYMRDCIIGNFRRRFHSMIRTENCIQRPSIIESLLRRHLGIIHLAEQHISMDLTEGIREVLLAESYTGPFPNLQMFETPVGTQGGGSAVEMICNWYIENVVKDASRIGVAFDAIQNCFRSSQPIGGGCLAESFTDKREMKSLVRLFGGYGIDKMDKMLREHTSALLNCIDSALRSNRDALEGLAGTVNSGDRIERDVNLKQIIDLETLADLCIQAGQAITFRRLLVEAVGAVLEEKVPLIYSLLKGLALQL

SEQ ID NO: 283534 - protein, 159 aa, Zea mays
  Clone ID: MRT4577_21683C.1.pep
APRTRRKNRATKSPSSLFFQSTSMAAREEVGKKELELQIWDTHELYFRGLRLDSDQQQRTNHHTIRSPSENHRTRLGRAGGKVPIGMTPNSGTRPNSSKETARLHLLSTAALRAPPPSPLRPASPAAKIRDRAGPETPPLSPLSNRTEGRRRNESPGRT

SEQ ID NO: 283535 - protein, 83 aa, Zea mays
  Clone ID: MRT4577_21684C.1.pep
GEGSQRGVPTPAAISKPGNSKKCKLLGSPPQIRKFQISVTLQSSLQNPLLIQNSLKYCLMTSGNYNKKILISMCFCSVMSDSL

SEQ ID NO: 283536 - protein, 116 aa, Zea mays
  Clone ID: MRT4577_21685C.1.pep
MAMHRAAALALRRLAAAATVAAPRPVSLLAPFRPVAAAAATNTGFLLLPTTAAATAALFTRRGYAARGGGDRKAVSEEEGDFYDEIEFETMGSDVELVGAFDYGDLDELEDSEDDS

SEQ ID NO: 283537 - protein, 103 aa, Zea mays
  Clone ID: MRT4577_21686C.1.pep
LSTRPNNISMLSIRRSIICAVAGGAGPRCLVLTAAANDYLPLHTAHRHGSTCFERSPCHGAFLPCEYLPMSAGVVIVYWVHGSRTPAATTPRTHRHRLRTHAP

SEQ ID NO: 283538 - protein, 76 aa, Zea mays
  Clone ID: MRT4577_21687C.1.pep
HTQRHASTRSVLNSKIPCHNAMYARERLHRHARTPIPWGLGPGRRRCVRTRLTRWPPPAPQEQHPRVHGRVGGRVG

SEQ ID NO: 283539 - protein, 195 aa, Zea mays
  unsure (1)..(195): unsure at all Xaa locations
  Clone ID: MRT4577_21688C.1.pep
FHPQRMIISRHLPSVSSLPFHPQLHPQQMIISRHLPSVCGGRFHPQRMIISRHLPSVSSLPFHPQLHPQQMIISRHLPSVCGGRFHPQRMIISRHLPSVSSLPFHPQLHPQQMIISRHLPSVCGXPLPPSADDNLKTPSERQLTPLPPSAPPSADDNIKTPAERLRGPLPPSADDNLKTPPLATQEAEAEKPRKP

SEQ ID NO: 283540 - protein, 100 aa, Zea mays
  Clone ID: MRT4577_21689C.1.pep
MHDPSEIHNLLIYIDFARLQHWLVDRKRLPHDCRKRLDDISALIVPAFSPLPLNLHPSLLHLDPEEIVYLESKKIYSILLQSNTDSRNIFDQLTVSPFEC

SEQ ID NO: 283541 - protein, 42 aa, Zea mays
  Clone ID: MRT4577_2168C.1.pep
VIGSLSHVSHGGCCTQLQTSPFCMHATWFSQKKMQPWRHHYL

SEQ ID NO: 283542 - protein, 230 aa, Zea mays
  Clone ID: MRT4577_21690C.1.pep
MNAAAKAGKLARAPADLGKGGVPGDAVPGAPVAAPLAKEIPEVLVDPRSRRQYVRGRFLGKGGFAKCFEISDADTKEVFAGKIVPKSLLLKPHQKEKMSMEISIHRSLAHQHVVGFHDFFEDSDFVFVVLELCRRRSLLELHKRRKALTEPEARYYLRQIVLGCQYLHRNQVIHRDLKLGNLFLNEDLEVKIGDFGLATKVEYEGERKKTLCGTPNYIAPEVLSKKGTSF

SEQ ID NO: 283543 - protein, 160 aa, Zea mays
  Clone ID: MRT4577_21691C.1.pep
MGPPRPLLDAVFLDEAVLLLLSPGEAGTAGVNYGRGANNLPKPRAPVQLLQQQGAAQQKVHDAGPTRAARPCDHRNRCRSGRKPTNSDPSSQSTLTLLDGEGDAPCDERSGHIKTTDFYGYAMKAVVNAVMPAIRTYVDLSPDDVDSVEDIMMLNEGGIQ

SEQ ID NO: 283544 - protein, 108 aa, Zea mays
  unsure (1)..(108): unsure at all Xaa locations
  Clone ID: MRT4577_21692C.1.pep
MGVFNATWGSSMGLTMDTTYAGREYKVKDLYQTDLVLLEIDLAKVQMPGHMXCXATFCPSKPFPVTRIWGSLHMTIQTAFLIKTLTELGAEVHWCSCNMLFTQEHAVG

SEQ ID NO: 283545 - protein, 42 aa, Zea mays
  Clone ID: MRT4577_21693C.1.pep
AIVFYSNSTSLPLATGEPLLPCETPCPTPDGFGLPSCFRANV

SEQ ID NO: 283546 - protein, 97 aa, Zea mays
  unsure (1)..(97): unsure at all Xaa locations
  Clone ID: MRT4577_21694C.1.pep
GPESGKGNPXHGTEPPNRTXPSTPGEGXHEQAGAAGQXXGXPGEQRGXXERGAGGAXAGGAGEPGPAGRAAARGRGSGRGRRRRGPARGDGPRPGPG

SEQ ID NO: 283547 - protein, 621 aa, Zea mays
  Clone ID: MRT4577_21695C.1.pep
MFGRDPWGGPLEISNADSATDDDRSRDLDRAALMRQLDETQQSWLLAGPGDQAGKKKKRYVDLGCLVVDRKVFMWTVGTVLGLGVFIGFVIMIVKLVPHKRPPPPPPDQYTQALHKALMFFNAQRSGPLPKHNGVSWRGNSCMKDGLSDSTVRRSLVGGFYDAGDAIKFNYPMAWSMTMLSWSVIEYRAKYEAIGELDHIRELIKWGTDYILKTFNSSADTIDRIVAQVGVGDTSKGSSQPNDHYCWMRPEDIDYKRPVTECHSCSDLASEMAAALAAASIVFKDSKTYSDKLVKGAKALYKFGRLQRGRYSPNGSDQAIFYNSTSYWDEFVWGGAWMYFATGNNSYLTVATAPGMAKHAGAYWFGSPNYGVFTWDDKLPGAQVLLSRLRLFLSPGYPYEEILRTFHNQTDNVMCSYLPVFNSFNFTKGGLIQLNHGRPQPLQYAVNAAFLASLYSDYLEAADTPGWYCGPNFYTIEVLRKFARSQLDYILGKNPLKMSYVVGFGNKYPKRPHHRGASIPHNGVKYGCKGGYKWRDTKKANPNILVGAMVAGPDRRDGYKDVRTNYNYTEPTLAANAGLVAALISISDIKTGRFGIDKNTIFSAIPPMFPTPPPPPSAWKP

SEQ ID NO: 283548 - protein, 621 aa, Zea mays
  Clone ID: MRT4577_21696C.1.pep
MFGRDPWGGPLEISNADSATDDDRSRDLDRAALMRQLDETQQSWLLAGPGDQAGKKKKRYVDLGCVVVDRKIFMWTVGTILGLGVFIGFIMMIVKLVPHKRPPPPPPDQYTQALHKALMFFNAQRSGPLPKHNGVSWRGNSCMKDGLSDSTVRRSLVGGFYDAGDAIKFNYPMAWSMTMLSWSVIEYRAKYEAIGELDHIKELIKWGTDYILKTFNSSADTIDRIVAQVGVGDTSKGSSQPNDHYCWMRPEDIDYKRPVTECHSCSDLASEMAAALAAASIVFKDSKTYSDKLVKGAKALYKFGRLQRGRYSPNGSDQAIFYNSTSYWDEFVWGGAWMYFATGNNSYLTVATAPGMAKHAGAYWFGSPNYGVFTWDDKLPGAQVLLSRLRLFLSPGYPYEEILRTFHNQTDNVMCSYLPLFNSFNFTKGGLIQLNHGRPQPLQYAVNAAFLASLYSDYLEAADTPGWYCGPNFYTTEVLRKFARSQLDYILGKNPLKMSYVVGFGNKYPKRPHHRGASIPHNGVKYGCKGGYKWRDTKKANPNILVGAMVAGPDRRDGYKDVRTNYNYTEPTLAANAGLVAALISISDIKTGRFGIDKNTIFSAIPPMFPTPPPPPSAWKP

SEQ ID NO: 283549 - protein, 43 aa, Zea mays
  Clone ID: MRT4577_21697C.1.pep
TQLQWGGIKSLQHKLLTTQRQIDKNRLKHNTIGATQGRSEDIR

SEQ ID NO: 283550 - protein, 131 aa, Zea mays
  unsure (1)..(131): unsure at all Xaa locations
  Clone ID: MRT4577_21698C.1.pep
MLPRISTRWTHFVSKMHIFARXLTGKTITXAVDVGDTIDIVNANIXDKEGIPPDXQLLIFAGEQLVDWRSLADYXIHKESTLHFVAAYWVGMQIFVNTLSVKTITLVVVSSDTIANVKDKIHDMEGIRPDQ

SEQ ID NO: 283551 - protein, 230 aa, Zea mays
  unsure (1)..(230): unsure at all Xaa locations
  Clone ID: MRT4577_21699C.1.pep
IHRTAKSEQRQARQIVCLRTLVGMHARAGSAVHPHXLQTSIDSFLSSHVPPTRGVLCEKKPIYPYXRNKQAKVAGNLXLITLVHQTLIIFKTVPTLDALIETIQEQPPPTTARANLAGYLQXNSSFIXSNQLDGTKFVIYKNHHHQPFSQLPATYSNYFLSFNRXGRNDPACLQTEQLLTTIQLAGGSDACFLTDTHTVAVDQPARCNDGWLSLTTESLAVIQLAWSDLA

SEQ ID NO: 283552 - protein, 55 aa, Zea mays
  Clone ID: MRT4577_2169C.1.pep
GLLFNSFSVFWLRSSVIFVLPVQYLVYEQFVHFDIKFIHYGYFYVEGLLRLLSVA

SEQ ID NO: 283553 - protein, 292 aa, Zea mays
  unsure (1)..(292): unsure at all Xaa locations
  Clone ID: MRT4577_216C.1.pep
MVSSALRRCLPXAMPLSVMPXPSPSAAXAAAGVFRRSFQSGDGETMDEFEERLFGGKDTDKGSLYEKLDRAENTGRRYNFGLSKGGFTRLSDSSSSGFPGFPASSDRSSSGWMNGYDSFNDGLNDTIANAARNIQMEEDEDVDGDWEDDFEFRPDVRFRQGSTYSVRDLDLRKPAAAKNPPRRQFETTTAEVLKKADFRNVRFLSNFLTEAGIIIKRSQTRISAKAQRKIAREIKTARAFGLMPFTTMGRRPFFFGRSAEEHYWDDGYFGFVKQKDGEPVENEDAEPNVEAV

SEQ ID NO: 283554 - protein, 63 aa, Zea mays
  Clone ID: MRT4577_21700C.1.pep
VVNVTDIVSEEGQNNIIYGSHELFIIFSYSLLSLNDRAHRTPSYGNERTYSNLCECVDERVVG

SEQ ID NO: 283555 - protein, 123 aa, Zea mays
  Clone ID: MRT4577_21701C.1.pep
MHFFSVVAAAATLIAGSNALFIPRNIHVADFRLYSGEDCFTGNLGVWTVIDDDFKNGECKSLNDEEDGAVPHSLSLTDINKGCTLTAYTDLKCTEGKTVLTPQQCSKNTVGYQAWSMTCDYKE

SEQ ID NO: 283556 - protein, 70 aa, Zea mays
  Clone ID: MRT4577_21702C.1.pep
APRRRRFGNIRFFMSGMRSAEMLLVCLAPNTPLVTLTEPAHARPVPRCPRRRRGPLKLSCSSPSLDAPAY

SEQ ID NO: 283557 - protein, 73 aa, Zea mays
  Clone ID: MRT4577_21703C.1.pep
NPPPFFPPPPQSCSPPGIFYNFLKKKKKKKKKKKKKKKKKKKNKKKKKKKKKKKACTCPGGRSKGRFCRPHTG

SEQ ID NO: 283558 - protein, 37 aa, Zea mays
  Clone ID: MRT4577_21704C.1.pep
TSAKQSSLYSGVCANCCCSTIPYLHRQLISSGQCHPA

SEQ ID NO: 283559 - protein, 76 aa, Zea mays
  unsure (1)..(76): unsure at all Xaa locations
  Clone ID: MRT4577_21706C.1.pep
LLKPNMVTLGADHMEKASTXAIAINTLTVLTRRVPSTDTGIMLLSGXDTXVEETYELYAMNHNLYSRHVTVFYART

SEQ ID NO: 283560 - protein, 851 aa, Zea mays
  unsure (1)..(851): unsure at all Xaa locations
  Clone ID: MRT4577_21707C.1.pep
MASDGGGSSPPPASSPYGRPSSPLAVTNSSPSQPTRRSGGRRRRGSASPYASSPSLGGFETPPHPGRRTPSGAGAGAPRQPRQNSTGRFPPTPSTPMSTDDVPPSSEAGDDETDGGGGVDATPVFVWGTNISVQDVNAAILRFLRHFRDPRDAGRVDPVMDEGKYMRAIHRILELEGGESLDVDAHDVFDHDPDLYSKMVRYPLEVLAIFDIVLMDLVARIEPLFEKHIQTRIYNLKSSICLRNLNPSDIEKMVSIKGMIIRCSSVIPELKEAVFRCLVCGFYSEPVMVDRGRVTEPHICQKEQCKATNSMTLVHNRCRFSDKQIIKLQETPDEIPEGGTPHTVSVLMHDKLVDAGKPGDRVEITGIYRAMSIRIGPTQRTVKSIFKTYIARMRFSEVVEVRDVVEAFRLLEVAMQQSATDHATGTIDMDLIMTGISASERQRRNDLVAATRNLIVEKMQLGGPSMHMIEXAVRAQVAELNGEPSARIPRGAWHYDDRRCASDPWKKGEERLMLTAICRDGCVSSVYXVSFNSQGCEDLIDCRAFAFRVLXVCAXDEFHKMSVNARSMLHEVMEQQTVSIAKAGIIASLNARTSVLACANPTESRYNPRLSVIDNIHLAPTLLSRFDLIYLILDKADEQTDRRLAKHIVSLHFENPNLEELEVLDLQTLVSYISYARKYIQPQLSDEAAEELTRGYVEMRKRGNSPGSRKKVITATARQIESLIRLSEALARMRFSEVVEVRDVVEAFRLLEVAMQQSATDHATGTIDMDLIMTGISASERQRRENLVAATRNLIAEKMQLGGPSMRMIELLEELRKQSSMEIHMHELRGALGTLMTEGAVVIHGDNVRRV

SEQ ID NO: 283561 - protein, 551 aa, Zea mays
  unsure (1)..(551): unsure at all Xaa locations
  Clone ID: MRT4577_21708C.1.pep
SEPVMVDRGRVTEPHICQKEQCKATNSMTLVHNRCRFSDKQIIKLQETPDEIPEGGTPHTVSVLMHDKLVDAGKPGDRVEITGIYRAMSIRIGPTXKKTDKSRLHVEDTMDIDNSNASKSTEEDFLSDKVEKLKELSKLPDIYERLTRSLAPNIWELDDVKRGLLCQLFGGNPLKLPSGASFRGDINILLVGDPGTSKSQLLQYMHKLSPRGIYTSGRGSSAVGLTAYVTKDPETGETVLESGALVLSDKGVCCIDEFDKMSDNARSMLHEVMEQQTVSIAKAGIIASLNARTSVLACANPTESRYNPRLSVIDNIHLAPTLLSRFDLIYLILDKADEQTDRRLAKHIVSLHFENPNLEELEVLDLQTLVSYISYARKYIQPQLSDEAAEELTRGYVEMRKRGNSPGSRKKVITATARQIESLIRLSEALARMRFSEVVEVRDVVEAFRLLEVAMQQSATDHATGTIDMDLIMTGISASERQRRENLVAATRNLIAEKMQLGGPSMRMIELLEELRKQSSMEIHMHELRGALGTLMTEGAVVIHGDNVRRV

SEQ ID NO: 283562 - protein, 86 aa, Zea mays
  Clone ID: MRT4577_21709C.1.pep
GLPVPVPPRRSFCPSSPRRYSTTRSVAYTDSRCPLVALCILILDYYRERPGEAFFLLPRSSRSNFARGPGSPYAPSDTSTRDTKST

SEQ ID NO: 283563 - protein, 158 aa, Zea mays
  Clone ID: MRT4577_2170C.1.pep
MAFPGTPARKIVPGGFTAARTAVASGGALSFDLDGAGDFFWGLWQLIKAKAAEAAAYLAALFAALAEKADEIFPPETRSETLRQWMRVAVTVVIPALVVALVLCCCWRCCCCACRRTRGGRRFMAAPGRGGARMPRGAFENNPRLYFRDLHAGKPLLY

SEQ ID NO: 283564 - protein, 61 aa, Zea mays
  Clone ID: MRT4577_21710C.1.pep
LVRLGRLGRVLTGFETSKVASTSGRDTTANVPSGAASDESSASRSSMSFMSASLGFRGTSK

SEQ ID NO: 283565 - protein, 102 aa, Zea mays
  unsure (1)..(102): unsure at all Xaa locations
  Clone ID: MRT4577_21711C.1.pep
MADSATNDAPLVASNQPTEEEVTVERAAATEEQEEERLRYLEFVQQAAAQALVLAAAAYAYAKQGAGPLRPGXHQFEGTVAPVXIGPVGSGPPRLQSPFRAP

SEQ ID NO: 283566 - protein, 99 aa, Zea mays
  Clone ID: MRT4577_21712C.1.pep
AGSSPATPSGAGQWLILFTRAKSSPATSSGAGHVSALFLGSKLSAVTTSKVDGPSATSMGPEQPKSASRPSRSCSKVDEARDDLNPASGTAAQVISSRV

SEQ ID NO: 283567 - protein, 220 aa, Zea mays
  Clone ID: MRT4577_21713C.1.pep
MATTREVSSSAAAMFHVYQTIPMPTPSTAAAGGGGAMVSVSAPAKPGKKEGGGKDRHSKVNGRGRRVRMPIVCAARVFQLTRELGLKSDGQTIEWLLRQAEPSIVAATGSGTTPAVFVSSSAPSTFSSSSHYHHQQQATVVLGKRPREEGDAAGSVFWAALPAAPRATEAWGFSPLEAQAAAAAAAAAYVPMAQAQAQHHHLNLLAALSGAARRAEEETR

SEQ ID NO: 283568 - protein, 897 aa, Zea mays
  Clone ID: MRT4577_21714C.1.pep
MAPKRKTANSSAAVIPAIDPNSQLPFAGNHMSVISEAELLRLVSIGVLPPRELCSWRICHGTTVPIEDTYESVVYAPFLLRGLGLPISPFFRGLLDFYHINLTHLNPNSILQISIFVHLCEAYLGVLPHFGLWKYLYHCRPGMAGGQHQLVGGASLEMRRGRKTEYLEIPLKDSIKGWRLEWFIVDNYGNSLPSRSGRQPDVRTPSWTEPPTDQEVAEAGVLLTEVGLLKERGLTTEAVVTDFVFKNIQPLKDRAYPAYLYRGLADSTRVTNRRIPSVDLVSRLEMILRGKVSNVGAPVAYSAWNLPSPKAFTLFVSNPPVTDSNLGLKVRPSAEEVCTLVASLGEIPDDERQIYFEVPLNPSDADINDMLDLLAEDSSDAAPDGTLAVVPLPEVDTTLDVPKPVSTRPRRPSRTSHPEPSADEQKKKRRHLRRVSSFDEDASTLAPAAEEMTATGLADIDPNGCALSAADPNEDAVCAVTVEDEEEENETPLTRKNSRQFVASGGSSGVPSPALSALIGLQELSMANFDQTLEDMVPENLLSEPVDVDVTETCAAVPDAGLRSSRASSTLEHDLEGRDADLDCPDPMEVAEGPSTLEVVTAESLDPLNSAGTRPAPEDVAEEGLARVKSVSHCPAPEGVAGDDPAQVGSANFDPAPEGVQARSPSCTSMDVHAGSPPHSGGMTRQIAVLEEKHSQDQAEMARRCADFEERYSQSQTEMSQVSAALDDANALSSSLHAQLDSEKEEKRILAASRDNLDRLYRDSSNSLTILERSHRFTMEELDSQRCKLQESSDEVTRLTQLLSAKDATIKGLRASKKSIAQELEAAQLATRVAEETVVTFKAQRDKALDKAIRAGRILMRRPGVVVPEDIRADVNAAPDSSNRPSSSVVPEKDIGK

SEQ ID NO: 283569 - protein, 964 aa, Zea mays
  Clone ID: MRT4577_21715C.1.pep
MAPKRKTANSFAAVIPAIDLNSQLPFAGNHMSVISEAELLRLVSIGVLPPRELCSWRICHGTTVPTEDTHESVVYAPFLLRGLGLPISPFFRGLLDFYHINLTHLNPNSILQISIFVHLCEAYLGVLPHFGLWKYLYHCRPGMAGGQHQLVGGASLEMRRGRKTEYLEIPLKDSIKGWRLEWFIVDNYGNSLPSRSGRQPDVRTPSWTESPTVREVAEAGVLLTEVGLLKEGGLTAEAVVTDFVFKNIQPLKDRAYPAYLYRGLADSTRVTNRRIPSVDLVSQLEMILRGKVSNVGAPVAYSAWNLPPSKAFTLFVSNPPVTDSNLGLRVRPSAEEISTLVASLGEIPDDERQVYFEVPLNPSDADINDMLDLLAEDSSDAAPDGTLAVVPLPEVNTTLDVPKPVSTRPRRPSRTSQPDPSADEQKKKRRRLRRVSSFDEDASTLAPAAEVVPATGLADTDPNGCAPSAADPNGGAVCIVTVEDEEEENEAPLTRKNSRQFIASGGSSGVPSPALSALIGLQELSLANFDQTLEDMVPEDLLSEPVDVDATEICAAVPDAGLRSSRASSTLERDLEGQDADLDCPGPMEVAEGLSTLEVVTAESLGPKNGVDICSAPEDVAGNDSARAKSVSHCPAPEGVAGDDPAQVGSADCDPAPEGARARSPSCTSMDVHAGSPPHSGCMVVAQTSSQGVALEGSVPADLAFGSAEGTELIPIGPLQATSDGGLAPGFGGWDGQPAEIAGCFHPRGMTRQIAVLEEKHSRDQAEMAQRCADFEEKYSQSQTELNQVSAALDDANALSSSLHARLDSEKEEKRILAASRDNLDRLYRDSSNSLTILERSHRFTMEELDNQRCRLQESVDEVTRLKQLISAKDATIKELRASKKTIAQELEVARLATKVAEETAATLRAQRDKAMDKAIRAGRILMRRPGVVIPEDIQADVNATPDSSNRPSSSVVPEKDIGK

SEQ ID NO: 283570 - protein, 91 aa, Zea mays
  Clone ID: MRT4577_21716C.1.pep
DELGGAFQFPVKNICLAPPVKGGYRWGQEKWASPHTARAYSKTEERGGALASPRRVALPPRWCDPPTAPAVSGLSSLRVDRGWAPSGTLVG

SEQ ID NO: 283571 - protein, 139 aa, Zea mays
  unsure (1)..(139): unsure at all Xaa locations
  Clone ID: MRT4577_21717C.1.pep
EWSYLRGGLTTLDRDYGWINNIHHDIGTHVIHHLFPQIPHYHLIEAXGFPLLLPFSFLFSEFLRLDHKTCFFLDVAXTEAAKPVLGKYYKEPKKSGALPWHLFRVLAQSLKQDHYVSDTGDVVYYQAESKTSTSAQKSD

SEQ ID NO: 283572 - protein, 975 aa, Zea mays
  Clone ID: MRT4577_21718C.1.pep
MAPKRKTANSSAAVIPAIDPNSQLPFAGNHMSVISEAELLRLVSIGVLPPQELCSWRICHGTTVPTEDTHESVVYAPFLLRGLGLPISPFFRGLLDFYHINLTHLNPNSILQISIFVHLCEAYLSVLPHFGLWKYLYHCRPGMAGGQHQLVGGASLEMRRGRKTEYLEIPLKDSIKGWRLEWFIVDNYGNSLPSRSGRQLDVRTPSWTESPTDQEVAEAGVLLAEVGLLKERGLTAEAVVTDFVFKNIQPLKDRAYPAYLYRGLADSTRVTNRRIPSVDLVSRLEMILRGKVSNVGAPVAYSAWNLPPPKAFTLFVSNLPVTDSNLGLRVRPSAEEISTLVASLGEIPDDERQVYFEVPLNPSDADINDMLDLLAEDSSDAAPDGTLAVVPLPEVDTTLDVPKPKKRRRIRRVSSFDEDAGTLAPAAEEVPATGLTDTDPNGCAQTAVEPNGCAPSVADPNGGAACVFIASGGSSGVPSPALSALIGLQELSLANFDQTLEDMVPEDLLSEPVDDDATETCAAVPDAGLRSSRASSTLEHDLEGRDVDLDCSGPMEVAESPSTLEVVTAESLDPKNSADTCLAPEGVAGEDLARGKSISYCPAPEGVAGEDPAQVGSANYDPAPEGARARSPSCTSMDVHAGSPPHSGGMVVAQTLDQGVALEGSVPAGLAFGSVEGTELIPTGLLQAASGGGLASGYQLISPDLGIPSFFSNLQALVDGMASQLRSQGAFIPEVASSLQHWNPVSLHRRVSELEATNAGMTRQIAILEVKHSRDQAEMAQRCADFEEKYSQSQTELNQVSAALDDANALSSSLHARLDSEKEEKRILAASRDNLDRLYRDSSNSLTILERSHRFTMEELDNQRCRLQESADEVTRLKQLISAKDATIKGLRASKKSIAQELETAQLAAKVAEETAVTLKAQRDKAMDKAIRVGRILMRRPGVVVPEDIKADVNAAPDSSNRPSSSVVPEKDTGK

SEQ ID NO: 283573 - protein, 55 aa, Zea mays
  Clone ID: MRT4577_21719C.1.pep
KRLSHSPSFRTMLVLRAPYDLMPIFCYPPIDASFNLHLIYINYCIYRSFQTDPKN

SEQ ID NO: 283574 - protein, 544 aa, Zea mays
  Clone ID: MRT4577_2171C.1.pep
MDPKGKGMVINDKEKESLLNEPRDDKPTDSGSSHKKREGKKKRHIKKIIYYDSDASSSSPRDDDDDDSSSKKKTVNQNYSFDYSRIPFNSNAYLLSIPLGKPSHFDGEDYSFWSHKMDEYNKVSGLDNAKQIWDTLKISHEGNDATMITKIELVEGELGRFAMIRGEEPTQSYNRLKTLVNKIRSYGSTRWMDYDVVRLMLRSFTIIDPHLVNLIRENPRYTKMTPEEILGKFVSRRMMVKEARYVDNMLNGPLLVYEPQLVALKATSSREALPSKVAQVEAAGLNEDEMALIIKRFKTALKGRKEYPNKNKARGKRSCFKCGKTGHFIAQCPDNDNDQEQEKYGKKEKKKSYRKAKGEAHHGKEWDSDCSSFDSDDEGLAASAFNKSSLFPNERHTCLMAKEKKDRLLEKQEDILYEEHDKFVSVQKSLALEIKRNESLSSELSTCHETISSLKSLNDELTTKLEGVNKSSSCEEHVVVCDRCKDFDVDACDEHLISITKLNDEVASLNAQLKTCKINFDQLKFAREAYTVGRHPSIKDGLGF

SEQ ID NO: 283575 - protein, 980 aa, Zea mays
  Clone ID: MRT4577_21720C.1.pep
MAPKRKTANSSAAVIPAIDPNSQLPFAGNHMSVISEVELLRLVSIGVLPPRELCSWRSCHGTTVPTEDTHESVVYTPFLLRDLGLPISPFFRGILDFYHINLTHLNPNSILQISIFVHLCEAYLGASLEMRRGRKTEYLEIPLKDSIKGWRLEWFIMDNYGNSLPTRSGRQADVRTSSWTESPTDQEVAEAGVLLTEVGLLKERGLTAEAVVTDFVFKNIQPLKDRAYPAYLYRGLADSTRVTNRRIPSVDLVSRLEMILKGKVSNVGAPVAYSAWNLPSSQAFTLFVSNPPVTDSNLGLRVRPSAEEVRSLVASLGEIPDDERQIYFEVPLNPSDADINDMLDLLAEDSSDTAPDGTLAVVPLPEVDATLDASKPVSTRPRRPSRTSQPEPSADEQKKKRRRLRRVSSFDEDTSTLAPAIEEMSATGLADIDPNGCAPPAADPNEGVVCAVAVEDEEEENETPLTRKNSRQFVASGGSSGVPSPALSALIGLQELSMANFDQALEDMVPENLLLEPADIDATETCAGVPDAGLRSSRASSTLEHDLEGRNDDLDRPDPAEVAEGPSTLEVVTAESLDPLNSADMCPAPEGVAGEDSAQVRSVGHYPAPEGVAGGDPAQVGSANLDPAPEGARAGTPSCTSMDVHVGSPPHSGGMVVAQTPDQGVALEGSIPTGLVLGSADCTELVPAGLLQAASGGGLTPDYQLISPDLGIPSFFSNLQALVNGLASQLKSQGASTPEVASSLERWNPVLLHRRVSELEATNAGMTRQITVLEEKHSQDQAAMTRRCADFEEKYSQSQIELSQVSAALDDANALSSSLHVQLNSEKEEKRILAASRDNLDRLYRDSSSSLTILERSHRFTMEELDNQRRQLQESSDEVARLTQSLSAKDATIKGLRASKKSIAQELETAQRAVKVAEEAAVTFKAQRDKALDKAIRAGRILMRRPGVVVPEDIRADVVAAPDSSNRPSSSVVPERDIGK

SEQ ID NO: 283576 - protein, 1045 aa, Zea mays
  Clone ID: MRT4577_21721C.1.pep
MTGHFLKRYLAREYPIRAALLAAFAFRALVLAFPLPNPLRRSPPSLLAGEIEMAPKRKTASSSAAVIPPIDPNSQLPFAGNHTSIISEAELLHLVSIGVLPPRELCSWRICRGTTVPTEDTHESVVYAPFLLRGLGLPISPFFRGLLDFYHINLTHLNPNSIMQISIFVHLCEAFLGVLPHFGLWKYLYQCRPGMAGGQHQLVGGASLEMRRGRKTEYLEIPLKDSIKGWRLEWFIVDNYGNSLPSRSGRQLDVRTPSWTESPTDQEVAEAGVLLTEVGLLKERGLTAEAMVADFVFKNIQPLKDRAYPAYLYRGLADSTRVTNRRIPSVDLVSRLEMILRGKVSNVGAPVAYSAWNLPPPRAFTLFVSNPPVTDGNLGLRVRPSAEEVSTLVASLGEIPDDERQVYFEVPLNPSDADISDMLDLLAEDSSDAAPVGTLAVVPLPEVDTTLDVPKPVSTRPRRPSRTNQPEPSADEQKKKRRRLRRVSSFDEDAGTSFPATERVPATGLTDADPNGCTQTATDPNGGATCVVTVEDEEEENEAPLTRKNSRQFIASGGSSGVPSPALSSLIGLQELSLANFDQTLEDMVPEDLLSEPVDDDATETCTAVPDAGLRSSRASSTLERDLEGRDADLNCPGPMEVTEGPSTLEVVTAESLDLKNGDDTCPAPEDVAGDDLAQVKSVSHCPAPEGVAGDDPAQVGSVNYDPAPEGAQAGSPSCTSMDVHAGSPPHFGCMVVAQTLDQGGALEGSVPADRAFGSVEGTELIPTGTLQAVSGGGLAPGYQLISPDLGIPSFFSNLQALVDGMVSQLRSQGASVPEVASSLACWNPVSLHRRVSELEATNADQAEMVQRCADFEEKYSQSQTELNQVSAALNDANALSSSLHARLDSEKEEKCILAASRDNLDRLYRDSSNSLTILERSHRFTMEELDNQHCRLQESADEVTRLKQLISAKDATIKELRASKKSVAQELEAARLAAKVAEETAATLKTQRDKAMDKAIRAGRILMRRPGVVVPEDIKADVNAAPDSSSHPTSSVAPEKDIAK

SEQ ID NO: 283577 - protein, 81 aa, Zea mays
  Clone ID: MRT4577_21722C.1.pep
GIGKMASPLLTQKIPKNRFKQFKRPHLPRSKCLKPSWRRPKGIDSRDRRKFKGCTLMPNIGYGCDKEDKELPSQQVHEVCR

SEQ ID NO: 283578 - protein, 173 aa, Zea mays
  Clone ID: MRT4577_21723C.1.pep
ATFNANALSSSLHARLDSEKEEKRILAASRDNLDRLYRDSSNSLTILERSHRFTMEELDNQRCRLQESADEVTRLKQLISAKDATIKGLRASKKSIAQELEVAQLAAKVAEETVVTLKAQRDKAMNKAIRAGRILMRRPGVVVPEDIKADVNAAPDSSNRPSSSVVPEKDIGK

SEQ ID NO: 283579 - protein, 48 aa, Zea mays
  Clone ID: MRT4577_21724C.1.pep
RGFGDTRRYVAFLKTVALGSLATIRVRYSMTRSNARLVDDVFCYQRHF

SEQ ID NO: 283580 - protein, 89 aa, Zea mays
  Clone ID: MRT4577_21725C.1.pep
TNHMHSRHMPNNEEAAGGPAGAILVSGRGQKPSRLQKHVTLETRADHGLASGASGHLEPVPDPDHNGRIREQLEQGPCRGQETGSLRYS

SEQ ID NO: 283581 - protein, 109 aa, Zea mays
  Clone ID: MRT4577_21726C.1.pep
MDSSCRPIRADKAGEGTPLLPPLATNCRLFFRVNGASFSPSSSSTVTAQTASSLGSAAGGAHPLGSMSARPVAVISSAAGAKVLASSSKLDTRRRRLLFFFCSSAKGSG

SEQ ID NO: 283582 - protein, 286 aa, Zea mays
  Clone ID: MRT4577_21727C.1.pep
MDPKGKGLVINDKEKETLYVDEPKGDKPTDLGSSHKKRDGKKERRIKDEYNEVRGLYNAKQIWDTLEISHEGNDATMITKMELVEGKLGRYTKMMLEEILRKFVSGRIMVNEARYVDDAPNGPLLLYEPQPVALKSTSSKDTLPSKAQEKKQKKERKKNYRKAKGKTHIEKEWDSDCSSSDSDDERLAASAFNKSFLFPNECHTCLKAKEKKNLQLLTMYDLLELDKVNFTYVRPLGGILGKLGQTLAKWLGTGVYLFASKFGGQKWGSGSCKSTGFLLSILGIVL

SEQ ID NO: 283583 - protein, 109 aa, Zea mays
  Clone ID: MRT4577_21728C.1.pep
HCCFMILYLIINNIQIVLKSQDIIIIIRYMGRREKKEYLNQKKALNKSEVNKVIRRSKDEGEVNGESNSCWRVMNILCITEKRGGQGGVVENQGYQLHLKVRGEANLPL

SEQ ID NO: 283584 - protein, 85 aa, Zea mays
  Clone ID: MRT4577_21729C.1.pep
SRPRPGTSVNVEADQSAIHRQIMEMYVKSIHQFSESLAKMQLPVALAAGGGVVKKEKPPDAKKVIDRHQGKKDGARVFSGNKAFF

SEQ ID NO: 283585 - protein, 39 aa, Zea mays
  Clone ID: MRT4577_2172C.1.pep
LYTMEMYSMNRLCVVAHMAKHSPTCLQSRASNQGPTIKD

SEQ ID NO: 283586 - protein, 83 aa, Zea mays
  Clone ID: MRT4577_21730C.1.pep
TNRPTHYLTALPGPYLLTVDWLKQKPHGFRHFLCQLSTSTTKIRHKGPTTGQEVLLTISHGTIGAQLGRTPGDILTTQWARGA

SEQ ID NO: 283587 - protein, 76 aa, Zea mays
  Clone ID: MRT4577_21731C.1.pep
GFVCRNEQCIRKKKKKKKKKKKKKKKKKKKKKKKKKKKKKKKKNWAPIVILNFCFKTLLGVRLGVYFFLGVFFLGG

SEQ ID NO: 283588 - protein, 39 aa, Zea mays
  unsure (1)..(39): unsure at all Xaa locations
  Clone ID: MRT4577_21732C.1.pep
VNLLECRHKCCLPAGFXTXSQISLNKSLFYKIFGVPLKS

SEQ ID NO: 283589 - protein, 48 aa, Zea mays
  unsure (1)..(48): unsure at all Xaa locations
  Clone ID: MRT4577_21733C.1.pep
PSKSHSFSSAHXPSADVLPSNRSLPPXSFISSCLSCHLPLILFHFFAS

SEQ ID NO: 283590 - protein, 91 aa, Zea mays
  Clone ID: MRT4577_21734C.1.pep
KAKRSGVIASDHENLFPYTYIKSDRSADLRKLIFVPGGSDDLARGEHGAYAPASNIRRVPRVSARVRSGPSWYKKCCGHSHPGRKGKPRWS

SEQ ID NO: 283591 - protein, 81 aa, Zea mays
  Clone ID: MRT4577_21735C.1.pep
KKKKKKKKKKKKKKKKKKKKKKKKKKKKKKKKKKKNFFLMSITLLRGNFGDVDDIFGLLIIFFKGPISPFLKCFKNKMPGF

SEQ ID NO: 283592 - protein, 72 aa, Zea mays
  Clone ID: MRT4577_21736C.1.pep
WQQLRGQLSCYFPWELPCPTWDCLFTLGLCSAWENVGTAGGDWGLPTGKRVCVIDSAVLLDAGWQNLVHEVW

SEQ ID NO: 283593 - protein, 768 aa, Zea mays
  unsure (1)..(768): unsure at all Xaa locations
  Clone ID: MRT4577_21737C.1.pep
MGASTGRSNVRMECQLIGSCFSATHAEDTNDPLGIRSYSSKDVTDSCSHTEMVQCSSKSFHFKSGRRNIKSSKTPSYVDLTASNRVRGSNRHKNNGKDSSAVWQKVERNDKMVSKAGHPSDTPVHDKGANEVGKKGVQEDPTRIRAKHNPNKKVCKQKPSNGAVELEPAKGEDALNSCHTFSGPFYTKQAPFLRQQRNSFSKQGSQSLKNYCAPRNGIPKVAKDYLQQEELPMLVLVHAKNTSDKSSSYSSSADEVGLTGVSNNYPTEGNESSQPDIEVAASVSCNLVPDLAPQAASDDFHISDPHSLRPENKGASNSRSSNNLCTDPFAAEAKEARCVKLLTENNSQEPCKWYSAAGHLSQKWVPVGKKETCNGICLDVSANGDDSNLPSERTYKLNLSEHAAADNAAETDYSKMKEVISYVYTAQQRVEDIQLCIGRPIADFENFVYSASPVVHCSSCSVGCKSCLQECVKDGLCLHQTPDITLRTVWQWYEEPSCYGLDVKAQDLWRSKALWNSHCQFTTYFVPYLSAVQLFSQPKRTSGGSIDKESIHRDVTCETSPQXTCPQYLQSFFQNNLFQXKPSTLRTEDDQQSADGELVFEFFEYEQPYSRRQLFDKVNELIAXETVKLPNIXTQRIWRPAXDLHPASWYCVAWYPIYRIPDGKFQATFLTYHSLGHWIRRSSSAGGAAVLPVMGLQSYNAKAEWWFEMSKSESEGGQSQASEASEILKERSRTLSEAAAVLSRASVLKNGQMSRNRHPDYEFFLSRS

SEQ ID NO: 283594 - protein, 37 aa, Zea mays
  Clone ID: MRT4577_21738C.1.pep
WHCRNGRAQVHEADPLLGLHVTASHASIHEPTRLLHP

SEQ ID NO: 283595 - protein, 77 aa, Zea mays
  Clone ID: MRT4577_21739C.1.pep
KTPKKKKKLPNQNRVLKTGGAKKKNRKKRAPQQKKKNPSTQNPHKVFLAGPIGKQIYWFGPSPETPCFPSEPSEVFP

SEQ ID NO: 283596 - protein, 358 aa, Zea mays
  Clone ID: MRT4577_2173C.1.pep
MESHDLWAERESRLVGGDEEDGYDHAYGNVKQLKDGTFISQTKYLQDLLKRFGMKDAKPAKTPMGTDGHVDLNKGGKSVDQKAYRSMIGSLLYLCASRPDIMLSVCMCARYQSDPNECHLVAVKRILRYLVSTPCFGIWYPKGSTFDLIGYSDFDYAGCKVDRKSTSGTCQFLGRSLVSWSSKKQTSFALSTAEAEYVAAGQCCAQLLWMRQTLRDFGYNLNKVPLLCDNESAIRMADNPVEHSRTKHIDIRHHFLRDHQQKGDIEVNHISTENQLADIFTKPLDEKTFCRLRKIVRKELEKELAMYNKLQLGLAHRTVRWCIGQCPGEKLQLVEIPRKREEDYKEESRGIEVDHWIT

SEQ ID NO: 283597 - protein, 81 aa, Zea mays
  unsure (1)..(81): unsure at all Xaa locations
  Clone ID: MRT4577_21740C.1.pep
MNGNIGTKDYMNQSLVPPSMPDTAGIDGAWKQNPLCANVPAEKXGNNFMIQLLXSXASADDTNTADAPIEREILLILNHDE

SEQ ID NO: 283598 - protein, 92 aa, Zea mays
  unsure (1)..(92): unsure at all Xaa locations
  Clone ID: MRT4577_21741C.1.pep
NFNNLLVGNKXCSLAENKVVSFKAGKALSYYFGIPFLXTSAKDAPNLEKAFLPLAGGLKNRMASHPAPSGASRPAPVQMRGQPVFQQTNCCS

SEQ ID NO: 283599 - protein, 116 aa, Zea mays
  Clone ID: MRT4577_21742C.1.pep
LPRFRTNDHAGRPQVYYHAGQPAWPVFWPWPMRGSSPGWRPGKKRADNGRRRASACDPCRAGFETNVSRRRTRTTVEVVMTALLWRAMRLSGLVLRRTTAGGASLRETFTTRRRSA

SEQ ID NO: 283600 - protein, 51 aa, Zea mays
  Clone ID: MRT4577_21743C.1.pep
IFPEKPTYNPILTQQNMLSNPSSFCLQPIFYIRHPNTPPELMIYNNNHKYN

SEQ ID NO: 283601 - protein, 114 aa, Zea mays
  Clone ID: MRT4577_21744C.1.pep
ARRPRCRRRRGCLPHVPWRGDRHRASVLLLASFRKGENAKRKSKTKSLLLPKGMIRENGELFMIVRSLLLFFFLFLSQLFIIILLLVYKSISSSTARNRISVLLYFPLVSSGKH

SEQ ID NO: 283602 - protein, 228 aa, Zea mays
  unsure (1)..(228): unsure at all Xaa locations
  Clone ID: MRT4577_21745C.1.pep
MAYITHCIFDMDGLLLDTERVYTEVTQQILDKYADGVKFTWDVKSQLMGRSGNESAAMVVDTYELPMSVKEYLDITAIIQEDLFPHAKLLPGVEKLIRHLHAHDIPIAVATSSTRSKFELKTSLNKEVFELFDVIICGDDAEIKNAKPSPDLFLAAQKHFGNPPAENCLVFEDAVNGVEAGLNAKMNVVWIPDENIKALTGDNDHGATLVINSMADFVPEAFSXSSYK

SEQ ID NO: 283603 - protein, 114 aa, Zea mays
  Clone ID: MRT4577_21746C.1.pep
KGGPQGRVFFKPGLKKGGHAFSLSPGGKAQAQAPPPAIENGPFMYPFVSCPFRVFLFPLDCATKSPPPVFVKKRPPQWGASFPLWALPPGPPLFFECYGNFFFPPPQMGWPPLF

SEQ ID NO: 283604 - protein, 204 aa, Zea mays
  Clone ID: MRT4577_21747C.1.pep
SSAAASLHCSVAASSELHAVHGCRRSCHAPTSLPSSSHCNPICTSRPVLSLPSVVADGGHGNLSSPGIRYPPSQLSDTYPQPPKSMCILLPPTSAWPTLHPAHPPRVPLRIRPAQCLLRHAPGTGHQLHTVAGRTCCVRRRGRAVVWLYLPRRRWRRSRPAPTTRYPSSVSGKWLTARPPTQAHMLWKHKRRFRQCIFLLAQIF

SEQ ID NO: 283605 - protein, 116 aa, Zea mays
  Clone ID: MRT4577_21748C.1.pep
QGIPFEEFSGAGYTDVFMKNGYRQQSWNVPVVHSILMTRRGDGDLAPLRNPHLARSHGRPQGSGTRVHGLYRPPPGSCTLRWRCPEAGGQPSGSRRVRLDSVGPMAAGDGRPGRLR

SEQ ID NO: 283606 - protein, 76 aa, Zea mays
  unsure (1)..(76): unsure at all Xaa locations
  Clone ID: MRT4577_21749C.1.pep
SFASSQDQNGRGERETSRFSPSRRASRPHQILRHDGAPAHTPPLGRRLCLKDPPWRMPPWWCXGIRRASRENTVGE

SEQ ID NO: 283607 - protein, 224 aa, Zea mays
  unsure (1)..(224): unsure at all Xaa locations
  Clone ID: MRT4577_2174C.1.pep
KAYQSMIGSLLYLCASRPDIMLSVCMCARYQFDPKECHLVAVKRTLRYLVATPCFGIWYPKGSTFDLIGYSDSDYVGCKVDRKSTSGTCQFLGRSLVSWSSKKQTFVALSTAEAEYVAVGXCCAQLLWMRQTLWDFGYNLNKVPLLCDNESAIRMADNPVEHNRTKYIDIRHHFLRDHQQKGDIEVYHISTENQLADIFTKPLDEKTFCRLRSELNVLDSRNLD

SEQ ID NO: 283608 - protein, 89 aa, Zea mays
  unsure (1)..(89): unsure at all Xaa locations
  Clone ID: MRT4577_21750C.1.pep
MEHLVNYLQNFVNNNGALGGSEKLHLVAGFLNWFLFXEKKKKKKKKKKKKKKKKKKKKKKKKKKKKKKKGGGLFKGSKLYSPGLQRNIF

SEQ ID NO: 283609 - protein, 57 aa, Zea mays
  unsure (1)..(57): unsure at all Xaa locations
  Clone ID: MRT4577_21751C.1.pep
GAPLRPWSAPYSPMQGEGDDEGAALRTASDLRTVFSWLDGTMHGGRCSMLXLVNDLG

SEQ ID NO: 283610 - protein, 197 aa, Zea mays
  Clone ID: MRT4577_21752C.1.pep
MSKRCRRGSAENKFAMTLRRPWAYTGNCPDNTGAKNLYITSTKAIKGRLNRLPTACVADVAMTTARKAKPDLRKKAMPDGIPPQCKARGRKDGVYMYFKYNAEMMVNPKGDMKGSAITGPIDKECADLWPTIARASNAIDRDLVEMWLNWSMIISIACRMCGKAAIELEGSFYARSLNVEANRNLTTLGASSLLPDS

SEQ ID NO: 283611 - protein, 80 aa, Zea mays
  Clone ID: MRT4577_21753C.1.pep
PSELPTRPNAPVASQPGPKYFIRGTCSRSGALTSRSTSTLACAVTSSSLRSCIAWSSLSPNLIPGKFPNGLPRPMSKCGF

SEQ ID NO: 283612 - protein, 58 aa, Zea mays
  Clone ID: MRT4577_21754C.1.pep
GEVGLIAASGHCYYTLDRYLLIANLYGSGEVIFDKVSMSPYLYILWIGILGCQVVFQQ

SEQ ID NO: 283613 - protein, 139 aa, Zea mays
  unsure (1)..(139): unsure at all Xaa locations
  Clone ID: MRT4577_21755C.1.pep
MADGEDIQPLVCXNGTGMGKAGFAGDDAPRAAFPSIAGRPRHTDVMGGMGQKDANDADXEQNKRGCLTLKNPIYRGIGSNCDRXDKIVHYTHYNELGADPLEHTVLLTDAPLXPRASREMMTQXMFETYRGPDKCNAIE

SEQ ID NO: 283614 - protein, 70 aa, Zea mays
  Clone ID: MRT4577_21756C.1.pep
VDPTPIYSEEDIDITSPWKTNVLPGLNKIFDKDGNNAASARFLKPFNKEHIDKEIEDNKTYLQPNVVEAY

SEQ ID NO: 283615 - protein, 158 aa, Zea mays
  Clone ID: MRT4577_21757C.1.pep
MAGMASRCEGKTTGDKGYCSVIYSPYPQSSPLPPRLTDLFQHFGLDKIRAIMNSSDGKTFEQKIDKLREEMSAFERARDVFYIVEGEDGDEDDEGDEDDDVDVDESDRKLLDDEKKPDITKRPHTPIGDEVECKKPKIAEGSRCQGEEPEAGGIKNSS

SEQ ID NO: 283616 - protein, 51 aa, Zea mays
  Clone ID: MRT4577_21758C.1.pep
WGLRHQLVADQQALQPKKEAKKPATEQKNIKAWNSGTSQENRRSHGKYSYT

SEQ ID NO: 283617 - protein, 50 aa, Zea mays
  Clone ID: MRT4577_21759C.1.pep
RRPPSSSATTPTSTSTAPRASSCSRAPSTSGAPAPAAGRRARPPSTPASR

SEQ ID NO: 283618 - protein, 112 aa, Zea mays
  unsure (1)..(112): unsure at all Xaa locations
  Clone ID: MRT4577_2175C.1.pep
YNHRKIKXGGERFCFWFHXDHHVHPEDIFEADFPAHYGFTWTQISWEGSHFTDKSVRLRSSGRESLTERIPCDSEDEKSAGESRETGSVGSHAHRPILGLQPCGPLTLEDVK

SEQ ID NO: 283619 - protein, 56 aa, Zea mays
  Clone ID: MRT4577_21760C.1.pep
TIQTYLLLHSTSYLLYNITYIAWTYPNLTTSCLQKTSSHTNLNLLSIHFLSLTPII

SEQ ID NO: 283620 - protein, 95 aa, Zea mays
  Clone ID: MRT4577_21761C.1.pep
LEAGRDRGHKLIRPAAAAATHRQSCSINSGELHRRVSSLGDQAGSGRAPVRPPPPPGLLSSIRARHSGLVHLLTSIVHDAYNGMRICTALFVQNK

SEQ ID NO: 283621 - protein, 132 aa, Zea mays
  unsure (1)..(132): unsure at all Xaa locations
  Clone ID: MRT4577_21762C.1.pep
IVLLAPFLSLGILNHRARAVKLTRLHSLRERLGATFFSHLNELIALSFRYVHHGKGMLQRHXLLAEFDALFDCDXKDNNVPFEDIFFAAHYFNSLPXWVLLCYSCHGLGILFITFFIVYFFLFIFFYVSLLF

SEQ ID NO: 283622 - protein, 74 aa, Zea mays
  unsure (1)..(74): unsure at all Xaa locations
  Clone ID: MRT4577_21763C.1.pep
LVLSVINQLALVNLFSYXSXQHFFSFNQLCGVNPAAYLXQQLLPLRQLATVYSNQQQLVGFNQLGLLNRGVYLE

SEQ ID NO: 283623 - protein, 155 aa, Zea mays
  Clone ID: MRT4577_21764C.1.pep
GTSGAGKKRGICSAGGAGFRKPGPFSPSMAGAGPSPKRLGGPSASTRWGSRPPSKRVLPPRPNKPFPGGFFCPFFQATPSPRGGGPRFCFPFGPVFCLLVNSPPPPVLFCLVTKPGLGCVIPRGLGPPLGLPKKKKKKKKKKKKKKKKKKKPPTT

SEQ ID NO: 283624 - protein, 115 aa, Zea mays
  Clone ID: MRT4577_21765C.1.pep
KFSQTFFLSKINHFPSFHIENIVYNLCRPKRFSHMQKIPSQSPNLGFWCKRLGNLCIKGRMVLPSSKFSWVRGSASGRSDSCPSSGARVSGKSPSSTMADGGACFEQACSGQGRD

SEQ ID NO: 283625 - protein, 190 aa, Zea mays
  Clone ID: MRT4577_21766C.1.pep
THASAKIEQLHKIFKLCGSPSEDYWAKAKLPDVTLFKPQRPYRRKIAETFKDFPPSALALLDTLLAIEPSARGTVASALDSEFFRTKPLACDPASLPKYPPCKEYDAKLRGQEVSRQNAAGLGGKGSVSVKPGRDDAKGAAPAQDAIADYQRRHRQARANQKSTSHHYSSQEDSVPGFRIEPPPPGMAVA

SEQ ID NO: 283626 - protein, 47 aa, Zea mays
  Clone ID: MRT4577_21767C.1.pep
FARKTSGAFLTPKKDMDTSVKSDYVIPVVHSGTRVIRVIRSITPLFH

SEQ ID NO: 283627 - protein, 96 aa, Zea mays
  unsure (1)..(96): unsure at all Xaa locations
  Clone ID: MRT4577_21768C.1.pep
GPEALTLCPQFQLRPMAQAKSLQPKTQKARATLSKSAAKTILRAQCIHQMPKASAAHGSTHKNLTSQDDSGASSSKASRSXPPRSPPPSKHKVNAL

SEQ ID NO: 283628 - protein, 55 aa, Zea mays
  Clone ID: MRT4577_21769C.1.pep
RVVAELRWGDIYISMVAIPLVEIDICSQLKLMPITVFFRSPVGSQNRPGFPFMDI

SEQ ID NO: 283629 - protein, 167 aa, Zea mays
  Clone ID: MRT4577_2176C.1.pep
VFEEKVASMDEGSFQHWPEEWFQTYQMNSPIGLGTNNEAGPAEGTGFSRKADKIPKSKKHRPKVVKEKKIAKIQKYTTAKHAKEKETHSTGKRKYVRKKGLNATTNQPPAEDSDMQNRVEKLKARRSLKFNEDDMRKNADLASQAQGTGASFIQRILGHQYMQLKDS

SEQ ID NO: 283630 - protein, 53 aa, Zea mays
  Clone ID: MRT4577_21770C.1.pep
KSGKRVKGVCLGTNQTTLGLVPGGNFKSPHVGKGWTSFTGKKPILFPGTLILS

SEQ ID NO: 283631 - protein, 74 aa, Zea mays
  Clone ID: MRT4577_21771C.1.pep
RRKWDDEVCRQRHEPEFGLLLKFAGLWALKLGLYDSTLVAKKHRYTIASQLALIRSCQSTNKHVIQFFFPCGGY

SEQ ID NO: 283632 - protein, 70 aa, Zea mays
  Clone ID: MRT4577_21772C.1.pep
VCPQVEPLSTLHWWSSTVRIVLLHTVLLASPFSLGGTIGTGYHCIGKNVSPWDTPSSYPEQIFSALLKKD

SEQ ID NO: 283633 - protein, 692 aa, Zea mays
  Clone ID: MRT4577_21773C.1.pep
MEKKTVHVPAEGNGEIENGTSSSQNPETLEHPVLLSASQTVPNNLGIRKNYKRAANRGKKGSQGLTGQAYTLRSSDIDVRVLRSTSGSKTTSTEHVQPPGQPAAKRRKRSRASNKNSTDEFSQIRKRVRYILNRMNYEQSLIEAYASEGWKNQSLDKIRPEKELERAKSEILRCKLRIREVFQNIDSLLSKGKIDESLFDSEGEISCEDIFCATCGSKNATLGNDIILCDGACDRGFHQNCLNPPLRTEDIPMGDEGWLCPACDCKLDCIDLINELQGSDISIEDPWEKVFPEAAAMTNGSKQDEAFDLPSDDSDDNDFDPNMPEEHVASKEEGSSEEEEDDDGGSDSDDSDFLTCSDDLEPLIDKKKVDDLGLPSEDSEDDDYDPAGPDSDKDVEKKSNSDESDFTSDSDDFCKEIKKSGGHDEVSSPPLPDVRVGDMEKNTAQSNTTSSADDPMETEIDQSVVLPVSRRRQAERLDYKRLYDEAYGEASSDSSDEEEWSGKNTPIKSNEEGEVGSPAGKGSRVAHHNELTTQNTKESLHSLHGSVDEKHGDLTSNGSNIKDRKGHFGPVISQKLHEHFKTQPYPSRSLKESLAEELGLTFHQVNRWFENRRHFARLASSRKGISPDKHSPQNTNSPVTPSMQPKEPEGTVMEESNVCINRDATISKKAVSSKVGSRKNLSKSSPKSRVKS

SEQ ID NO: 283634 - protein, 55 aa, Zea mays
  Clone ID: MRT4577_21774C.1.pep
RLRLSLVVSLSHILSHSLFQTPSINSAKQCFARPYARSAEHNLTATSCLVVPMVR

SEQ ID NO: 283635 - protein, 71 aa, Zea mays
  Clone ID: MRT4577_21775C.1.pep
QPPQAASTTSRHERTRSKPREKGRTSKEAAREDARQGAERRHAGAQHPAAAGAGGQEPGKRRNNENRNHQT

SEQ ID NO: 283636 - protein, 181 aa, Zea mays
  Clone ID: MRT4577_21776C.1.pep
GKKVIDRGEFVDEPKPQRSEHCVSLLAELDTFSNQQVQSPSPSNMKELAKRTLKAYLNVRRGVEQLMSKYTVKACGYCSEVHVGPWGHNVKLCGAFKHQWRDGKHGWQDAVVDEVIPPNYVWHVPDPSGSPLRSSLRSFYGKAPAVVELCVQAGAEIPDEYRAMMRTDIVIPDSVEARMAA

SEQ ID NO: 283637 - protein, 99 aa, Zea mays
  unsure (1)..(99): unsure at all Xaa locations
  Clone ID: MRT4577_21777C.1.pep
MTLISRGAGATKTTREYAPIISNXLENMTSYTFMTDLKISIPDQILYLTGKQTHHRTDTNPXLAXPHALLTVSPNIXAKTRRNKKGSTQKVPIVIGSTH

SEQ ID NO: 283638 - protein, 45 aa, Zea mays
  unsure (1)..(45): unsure at all Xaa locations
  Clone ID: MRT4577_21778C.1.pep
XDEWRLXGPACLHHPRDTXREGFXSYGKATKAIETFDPSSLVYSG

SEQ ID NO: 283639 - protein, 59 aa, Zea mays
  Clone ID: MRT4577_21779C.1.pep
VMACVMTRQAHNPNERDVGSSHSKSGRQIVSVTRPVCVCLNRNTSSGPLSCRVLSVFSR

SEQ ID NO: 283640 - protein, 1548 aa, Zea mays
  Clone ID: MRT4577_2177C.1.pep
MDPKGKGIVINDKEKESFVNEPRDDKSNDSGSGHRRKDGKKKKTRHIKEIVYYDSDESTSSQKDDDHNEYERKKPVNSNFSFDYSRIPQSTNAHLLSIPIGKPPHFDGEDYGFWSHKMRSHLFSLHPSIWEIVESGMHFDSTDSPMFINEQIHKNAQATTVLLASLCRDEYHKVSGLDNAKQIWDTLKISHEGNDVTLLTKMELVEGELGRFAMIRGEEPTQTYNRLKTLINKIRSYGSTRWTDHDVVRLMLRSFTVLDPHLVNNIRENPRYTKMSPEEVLGKFVSGRMMIKEARYVDDALNGPINEPQPLALKATRSKEALPSKVAQIEAAGLNDEEMALIIKRFKTVLKGRKGQPSKTKAKGKRSCFKCGKLGHFIANCPDNDSDQDQGNKREKKKNYKKAKGEAHLGKEWDSDYSSSDSDNEGLAATAFNKSSLFPNERHTCLMAREKKVSTHNTSTYASSSEDESSDDDEIDYSCLFKGLDRTKVDKINELIDALNDRNILLEKQEDLLYEEHDKFVEAQKSLALEIKRNEMLSSELSSCHETIAKLKSFNDDLNARLEVASKSNSCVEIVETCNRCKDFDIDACSEHLVSISKLNDELASLNAQLKTSKSNFDKLKFARDAYTIGRHPSIKDGLGFKREAKNLTSHKAPIPAKEKGKAPMASSVQKNHAFMYHDKRQTRNTNRSYNAYDDFDSHDIFASSSFYVHDRNVGRKNTVHNMPRRNVVNVPRRINEPSTIYHALNTSFAICRKDRKIVARKLGAKCKGDKTCIWVPKEICTNLVGPNISWVYASGGSSWIVDSGCTNHMTGEKKMFTSYVKNKDSQDSIIFGDGNQGKDKSETQGTLKRFLRRAQNEFELKVKKIRSDNGSEFKNFQVEEFLEEEGIKHEFSAPYTPQQNGVVERKNRTLIDMARTMLGEFKTPERFWSKAVNTACHAINRVYLHRLLKKTSYELLTSNKPNVSYFRVFGSKCYILVKKGRNSKFAPKAVEGFLLGYDSNTKAYRVFNKSSGLVEVSSDIVFDETNGSPREQVVDCDDPFRVEEALLDPDWVLAMQEELNNFKRNEVWTLVPRPKQNVVGTKWVFRNKQDEHGVVTRNKARLVAKGYAQVAGLDFEETFAPVARLESIRILLAYAAHHSFRLYQMDVKSAFLNGPIKEEVYVEQPPGFEDERYPDHVCKLSKALYGLKQAPRAWYECLRDFLIANAFKVGKADPTLFTKTCDGDLFVCQIYVDDIIFGSTNQKSCEEFSRVMTQKFEMSMMGELNYFLGFQVKQLKDGTFISQTKYTQDLLKRFGMKDAKPAKTPMGTDGNTDLNKGGKSVDQKAYRSMIGSLLYLCASRPDIMLSVCMCARFQSDPKECHLVAVKRILRYLVATPCFGLWYPKGSTFDLVGYSDSDYAGCKVDRKSTSGTCQFLGRSLVSWNSKKQTSVALSTAEAEYVAAGQCCAQLLWMRQTLRDFGYNLSKVPLLCDNESAIRMAENPVEHSRTKHIDIRHHFLRDHQQKGDIEVFHVSTENQLADIFTKPLDEKTFCRLRSELNVLDSRNMD

SEQ ID NO: 283641 - protein, 1057 aa, Zea mays
  Clone ID: MRT4577_21780C.1.pep
MPPRTRKTVRKSTGPIGVPRNQLAPRHGDISSGSNDPIGDLEAQVEQLRSELRHRNEVWVEDDQLAERDLALDWVVNSRSLAWAKEAKARARVEELSTAVDNLQMSSWTRGQDGAGTSRGREATPNPPPVPPALAEAITALVNATTDNTRFLREMAGQQMQQQGGRAYPQGPRETSYLDFSETHPSLFVKAEDPLEADEWIRVIEQKFGLLRCMETQKPLFAAQQLRGLASTWWGNYVAIQPTGHQITRDEFKLAFREHYIPYGVLHMKQEEFMKLRQGGDNATQYLNKFNHLSQYAINQVNTDLKKKNCFMRGLNVRLQRKMATCLDLTYSRAVSTVLAVEAKYAGPGKSKGYGGDRPNQGPEKRQSYSFYSGASHTFISKKFVEQHCIPYNESREGFIIHSPGGQIFTKEVAFHVPITLAERDFPTNMIVLKGQDIDVILGMNWLAQHKVILNTDLRIIWLSYGQEEIDLRSGYHQIRIRPEDIPKTAFTMLYGLFEYLVMSFGLTNAPAHFTYLMNSVYMPELDKFMVVFIDDILMYSKNEEEHARHLRIVLTRLREHQLYAKFSKCAFWLEEIQFLGHVLSAKGIAVDPSKVKDILEWKPPTTVHEVRSFLGLAGSGLDCVLMQEGRVIAYASRQLRRHEEHYPTHDLELAVVVHALKIWCHYLLGNIYHIYTNHKSLKYIFTQSELNMRQRRWLELIKDYELDIHYHPGKANVVADALSHKASCHCLTMKTSDIMLCQEMEKMNLEMIQHGTSNHLKLESVLLQRIIDAQRNNEGMKHIHEKMEMKIEIARYVARCDTCRHVKAIHMKAAGPLQSLPIPTWKWEDISMDFIVGLPRTAKGYDSIWVIVDRLTKIAHFLPVRKWDDCLPLAEFSYNNSYQESIKMAPFEALYGRRCRTPLNWSEPGERSFFRPDMVKETEEKVQRIIHNLTEAQARQKSYADKRRKPLYFLVGDYVYLKVSPMKGISCFGVKGKLAPRYICPFPVLERCGPVAYRLQLPETLSAIHNVFHVSQLKKCLRVPDRTIEVIDVALEPDLTYYEHPIRVLDQKDMIT

SEQ ID NO: 283642 - protein, 63 aa, Zea mays
  Clone ID: MRT4577_21781C.1.pep
TIKVEKRINEIVNRLNKTKVERKPDLKGMSHLFESISVVIFMSATQHSIMNMVKYFSFCFWDS

SEQ ID NO: 283643 - protein, 122 aa, Zea mays
  unsure (1)..(122): unsure at all Xaa locations
  Clone ID: MRT4577_21782C.1.pep
AIPLCLVTKFNLSLELVDRTVRKIKIISPSXFTVDIXRTLXSHECTLTCVRRXVLDCYLRXKDRMDYEYVLNTLFLRYNILHYPIRSYVWHYYNYDIYLVSDYSNNHSSALNAVDTELINVL

SEQ ID NO: 283644 - protein, 197 aa, Zea mays
  Clone ID: MRT4577_21783C.1.pep
MRGLHRCPHQLLLVSPPPRSAPACRQSATASSRGLRSSLAVFSAPGARVAAAAREQKWGHVEGDEDGGEEGLGEALHRTRELVECAMFAAVAGLAYFLSNSLAIENYFSCFFPLPIVISSLRWGLEASRKTVVATVLLLFTLSGPVKASTYLLMHGVVGLIMGTVWRLETNWIVSIILCSIITVNIHASLTYILTAA

SEQ ID NO: 283645 - protein, 117 aa, Zea mays
  unsure (1)..(117): unsure at all Xaa locations
  Clone ID: MRT4577_21784C.1.pep
KGRKVQRVVTEAPVYLTAVLXYMAAKFLKLFFXATKNFKNSGIVPLLLVLAICKNFELGKILSEVFIGHDGVLPSMGPVFLPKKLGKKASNDDSKDILSPKKAAQFPKKAAKSPHKG

SEQ ID NO: 283646 - protein, 278 aa, Zea mays
  Clone ID: MRT4577_21785C.1.pep
MRGLHRCPHQLLLVSPPPRSAPACRQSATASSRGLRSSLAVFSAPGARVAAAAREQKWGHVEGDEDGGEEGLGEALHRTRELVECAMFAAVAGLAYFLSNSLAIENYFSCFFPLPIVISSLRWGLEASRKTVVATVLLLFTLSGPVKASTYLLMHGVVGLIMGTVWRLETNWIVSIILCSIVRALGACGYVLVSSFLIRENILALITVNIHASLTYILTAAGVNTIPSMGTIYLLFGTLLLLNCGFFVFLLHVMYTVFLAKLGIKPSLRSPRWLDRVM

SEQ ID NO: 283647 - protein, 123 aa, Zea mays
  unsure (1)..(123): unsure at all Xaa locations
  Clone ID: MRT4577_21786C.1.pep
QGASSGRHTQRGETRRNHPQQGHEGQRAQERAPXCDRRTRQPRARGRKTQRDTARTETEDGRXTSSRRHEGTTNKRTGAAPXETTQRKTRNQRAAGGERTKTTSEGGGRAAHTTGTRGQTRAA

SEQ ID NO: 283648 - protein, 136 aa, Zea mays
  Clone ID: MRT4577_21787C.1.pep
KKLKNGETVDASAYIDAVVETIETTNIVAQTAEGDPNNCVMLGGHSDSVAEGPGINDDGSGSLTLLEVATQLTHYHVNNCVRFAWWASEEEGLLGSDYYVSVLSPEENLKVRLFIDYDMLACANFAYQVYNATNAL

SEQ ID NO: 283649 - protein, 217 aa, Zea mays
  Clone ID: MRT4577_21788C.1.pep
MMAAARMAFASSCRVHLLLPSSPSTPILARPRVGFRGIAKSISFLAPLSAARSAALFCSCSSPSSDAVVAPAPTKAAVEEKKPAPAVGEEEKGEVPVGELAGLLDIRVGRVVKAWLHPEADTLCVEEVDVGEEQPRTICSGLVKYLPLDQLQDSNVIVLANLKPRNMRGIKSSGMLMCASDASHETVELLTPPEGSVPGERVWFGSEDEKSIQSEPA

SEQ ID NO: 283650 - protein, 53 aa, Zea mays
  Clone ID: MRT4577_21789C.1.pep
CQHPDCSGWLLATTLGILQDHTNLRTQCPFQSVQRARCGTLYRGVKGLPGRYH

SEQ ID NO: 283651 - protein, 401 aa, Zea mays
  Clone ID: MRT4577_2178C.1.pep
MDPKGKGMMVNDKEKESIFNEPRDNKPTDSGSSHKKKDGKKKRRIKKIIYYDSDASSSSPRDDDDDDSSKKKLVSGLDNARQIWDTLKISHEGNGITMITKMELVEGELGRFAMIRGEEPTQTYNGLKTLVNKIRSYGSTRWTDHDVVRLMLRSFTVIDPHLVNLIRENPRYTKMTPEEILRKFVGGRMMVKEARYVDDALNGPLPVYEPQPVALKATSSREALPSKVAKVEAAGLNEDEMALIIKHFKTALKGRKEYPNKNKARGKRSCFKYGLAALALNKFSLFPNERHTCLMAKEKKDRLLEKQEDILYEEHDKFVSVQKSLALEIKRNEMLSSELSVCHESISSLKILNDDLNAKLEEANTTRSCVEHVVICNRCKDFDIDACDDHLASISKLNDEV

SEQ ID NO: 283652 - protein, 82 aa, Zea mays
  Clone ID: MRT4577_21790C.1.pep
GGPFFGGEKMGFVDPFFGGSLGCFGPLARILGRGLFSPARTPFLPGWRDRFRPPHVAKGFVPPALPKMLGFLQPLRVLNSPQ

SEQ ID NO: 283653 - protein, 39 aa, Zea mays
  Clone ID: MRT4577_21791C.1.pep
PFTFATKVCWSTFLLPGELCPSGPVLNCLPPTQFFGCQT

SEQ ID NO: 283654 - protein, 63 aa, Zea mays
  Clone ID: MRT4577_21792C.1.pep
KGFAMISRRPDQGSLTSPPTLYNHNPYKQNVHIQFKGQRKKKNTLNINHCRKTNTNLAQYSTS

SEQ ID NO: 283655 - protein, 54 aa, Zea mays
  unsure (1)..(54): unsure at all Xaa locations
  Clone ID: MRT4577_21793C.1.pep
RFVCSTIKVLRDLSSDRSNPGRFLSTSNSSLXKDKRNKAYFTKXPSPVNDIIST

SEQ ID NO: 283656 - protein, 233 aa, Zea mays
  unsure (1)..(233): unsure at all Xaa locations
  Clone ID: MRT4577_21794C.1.pep
ASRNQSYWWSSHTPAPTNALRQRTRPQVKPGPEPPATNRAHGGRGGDRAPVRGGYRAPVRGGRPHCLEGAREPADAAALRGGEAGARXGKGVPTTNYVVPLDKATGMTRPLVEILRDLNKRVPDKIIDPDTNTVNWYHANRMLSFYAPGWCGEVRDVIYSENGTVTVVYRVILKGTDGEAYRDATGTAQLHEGRREDAVAAAEEAAFCKACARFGFGLYLYHQDDSHYDDHFH

SEQ ID NO: 283657 - protein, 67 aa, Zea mays
  Clone ID: MRT4577_21795C.1.pep
EVRMVSGIMGGTGLHLEREMPAAYLSRRGPSPVAGQTADRASQGCLCPRMFHESLCQNCRRCLRGKQ

SEQ ID NO: 283658 - protein, 106 aa, Zea mays
  Clone ID: MRT4577_21796C.1.pep
KFLPVGMGFVPIFGFLECCPLTQCPFPSFLVVFSRPPRGQCFLILPFPPNGGPGGFFLCVFPSRGVGYIGVLKVFTCGDGVCPPPVSRLFFLDIPPPLFLFSLDAP

SEQ ID NO: 283659 - protein, 118 aa, Zea mays
  Clone ID: MRT4577_21797C.1.pep
VSFPTPPGIPHSYQTRAADSLVRRRLAGMPLPSSCCRRRAGSSWSTIDSAAQYAASLSRSRLHRRRRRLVPSLGHGAPTLSDLAPPLSMTRGIQARHLQDVMVQAGRLQAGGLQELIS

SEQ ID NO: 283660 - protein, 23 aa, Zea mays
  Clone ID: MRT4577_21798C.1.pep
ICPIKSFPYVRCVIPRCTPYNAS

SEQ ID NO: 283661 - protein, 86 aa, Zea mays
  Clone ID: MRT4577_21799C.1.pep
VSSYYLTNADELQIKMAQGAKPGEGGELPGHKVIGDIAVTRHSTAGVGLISPPPHHDIYSIEDLAHCIHDLKNSNPGARISVKLVS

SEQ ID NO: 283662 - protein, 87 aa, Zea mays
  Clone ID: MRT4577_2179C.1.pep
HNCHQPQFVSCSCQLLLLRLSSFSFSNSVAPLPSASVCFLFLSASSASTFFFFFFQFCSTTAISLSLFLVHVSFFCFDFLLFLFPIL

SEQ ID NO: 283663 - protein, 51 aa, Zea mays
  Clone ID: MRT4577_217C.1.pep
KRALVLWYIGKGMKETEFSKARKDLTALKKDYKKVGTKFDEGEDGDKGDEY

SEQ ID NO: 283664 - protein, 89 aa, Zea mays
  Clone ID: MRT4577_21800C.1.pep
VKQLCRHHHPQSPSAYLDICLIIQRFLFSLIMRFFFHLALIVASLRALLGESPADASPAAPRPRVRPNVYTCVRPSVNVRVRRPGQSGS

SEQ ID NO: 283665 - protein, 70 aa, Zea mays
  Clone ID: MRT4577_21801C.1.pep
DRSEHSRVCDLRNPLIRNPDALHGASMNTDVNGATLGPVKLNRVKSIMVSTSRGLGLKYEMFALPSDCTD

SEQ ID NO: 283666 - protein, 509 aa, Zea mays
  Clone ID: MRT4577_21802C.1.pep
MAMENTAPCGDFGKIVADLESENLVANVSAVNQASALIAGGKIPEPQLLCRLIAGLASNLEKPDHDSAIKRCVSFTLKAIRVAVIKNRMNMDSSARGEALHAIWCCFMDQGLRRIQRDSNMVRLWTVQDQLSAVKIICTFFRLSPVNISDTRCVTAFASLMLSPYSTVVCACADALLSLPPVVPGFSFAIARAYCHMLATVSPQSPLEVSSMVAMLGRLKQVSTTMVHHPGFSDLAVDVLAALSNCNLAVRKNLLNLMVRLLTPRNISAVLLLLDNELNRAANIHIEYHKMLEEAIRECHAAFPGCIVEFTLDPKYSVFIDSILYIIDIMNPDQSLRGPLLKGLLRALRHVKSPLVCAAAVWAISMFSGSLEEVSDAIVALSCFFKDLLDRRKIEKLILGGEAENQYKLSTDYYGVTAGDATQGKHQQPWLMEMEELLFVRIGLTRQAGGSYAIPSSSKSSASSSNAYLPEPLGNTDNLIFLVHSGDALLADFVEIMLSNLKKKVKELE

SEQ ID NO: 283667 - protein, 84 aa, Zea mays
  Clone ID: MRT4577_21803C.1.pep
CATFLVYSHIHTQLSVQLYTLQPHGSLKKQLNHACIYMLVSVLIMILCEVKNTEQHKRQCRSEGRFIKQLLLFKHYIRASACGP

SEQ ID NO: 283668 - protein, 80 aa, Zea mays
  Clone ID: MRT4577_21804C.1.pep
CKKNSTQNTSRKQKRKTRGGLISEPPQNNCIALTGRFQKEKPFSPPEKKKLPPPGKRPIKHRAPRSPFFSPTKRETSYGP

SEQ ID NO: 283669 - protein, 52 aa, Zea mays
  Clone ID: MRT4577_21805C.1.pep
PDSIGRKDMKGTLKGRYEGDKATGATSLAARAGDHEITSHGGHRASDFHGLV

SEQ ID NO: 283670 - protein, 42 aa, Zea mays
  Clone ID: MRT4577_21806C.1.pep
AEKMVSLAKTTSSFFRRPKTLLASVRPFYNNILKFFNYKYFF

SEQ ID NO: 283671 - protein, 71 aa, Zea mays
  Clone ID: MRT4577_21807C.1.pep
QNEHTKQVLWQEESIDFGAIFSAHGGAYLQMAIKIATTLDYRKITAVLLRLLWEYPDMTAIQHLWHELRSS

SEQ ID NO: 283672 - protein, 54 aa, Zea mays
  Clone ID: MRT4577_21808C.1.pep
KALPLTDLKHTTLRTNTANFHHTVGQFEHTSIRPKSPYIESYTNSQTINLQRKY

SEQ ID NO: 283673 - protein, 59 aa, Zea mays
  Clone ID: MRT4577_21809C.1.pep
IYLLEGRSFNILKPLLGLQLLDNLHGFNPYHYLRNLKTQPLRNALRAHKKEAQATKKRI

SEQ ID NO: 283674 - protein, 1708 aa, Zea mays
  unsure (1)..(1708): unsure at all Xaa locations
  Clone ID: MRT4577_2180C.1.pep
MDPKGKGIVINDKEKESFVNEPKDDKPTDSGSGHRRKDGKKKKTRRIKEIVYYDDSDESTSSHKDXTTTTTTTNERRXNSNFSFDYSRIPQSANAHLLSIPLGKPPHFDGEDYGFWSHKMRSHLFSLHPSIWEIVESGMHFDSSDSPMFINEQIHKNAQATTVLLASLCRDEYHKMELVEGELGRFAMIRGEEPTQTYNRLKTLINKIRSYGSTRWTDHDVVRLMLRSFTVLDPHLVNNIRENPRYTKMSPEEVLGKFVSGRMMIKEARYVDDALNGPINEPQPLALKATRSKEALPSKVAQIEAAGLNDEEMALIIKRFKTALKGRKGQPSKTKAKGKRSCFKCGKLGHFIANCPDNDSDQDQGNKREKKKNYKKAKGEAHLGKEWDSDCSSSDSDNEGLAATAFNKSSLFPNERHTCLMAREKKVCTRDSTYASSSEDESSDEEIDYSSLFKGLDRNKIDKINELIDALNEKDRLLEKQEDLLYDEHDKFVEAQKSYALEVKRNEMLSYELSTCHETISTLQSVNNDLNAKLEVANKSNSCVEHVMICTRCKNFDIDACNGHLVSISRLNDEVASLNAQLKTSKSDFDKLKFARDAYTIGRHPSIKDGLGFKREAKDLTSHKAPISAKEKGKAPMASSTKKNHAFMYNNRRQSHRSCNALDSHAYDSYAMYASSSSYMHCRDMPRKNIHHVPRKNFAHAPRKVMNGPSTIYHALNASFAICRKDRKIVARKLGAKCKGDKTCIWVPKEIVTNLVGPNKSWVYASGGSSWIIDSGCTNHMTGEKKMFTSYVKNKDSQDSIIFGDGNQGKVKGLGKIAISNEHSISNVFLVESLGYNLLSVSQLCNMGYNCLFTNVDVSVFRRCDGSLAFKGVLDGKLYLVDFAKEEVGLDACLMAKTCMGWLWHRRLAHVGMKNLHKLLKGEHVIGLTNVHFEKDRPCAACQAGKQVRGAHHSKNVMTTSRPLELLHMDLFGPVAYLSIGGSKYGLVIVDDFSRFTWVFFLQDKSETQGTLKRFLRRAQNEFELKVKKIRSDNGSEFKNLQVEEFLEEEGIKHEFSAPYTPQQNGVVERKNRTLIDMARTMLGEFKTPECFWSEAVNTACHTINRVYLHRLLKKTSYELLTVKKGRNSKFAPKAVEGFLLGYDSNTKAYRVFNKSSGLVEVSSDVVFDETNGSPREQVVDLDDVDEEDVPTAAIRTMAIGDVRPQEHLEQDQPSSSTMVHPPTQDDKQVPQVEAHDQGGAQDVQVEEEEAPQAPPTQVRATIQRDHHVDQILGDISKGVTTRSRLVNFCEHYSFVSSIEPFRVEEALLDLDWVLAMQEELNNFKHNEVWTLVPRPKQNVVGTKWVFRNKQDEHGVVTRNKARLVAKGYAQVAEEVYVEQPPGFEDERYPDHVCKLSKALYGLKQAPRAWYECLRDFLIANAFKVGKADPTLFTKTCDGDLFVCQVYVDDIIFGSTNQKSCEEFSRVMTQKFEMSMMGELNYFLGFQVKQLKDDTFISQTKYTQDFLKRFGMKDAKPAKTPMGTDRHTDLNKGVATPCFGIWYPKGSNFDLIGYSDSDYAGCKVDRKSTSGTCQFLGRSLVSWNSKKQTSVALSTAEAEYVAAGQCCAQLLWMRQTLRDFGYNLSKVPLLCDNESAIRIAENPVEHSRTKHIDIRHHFLRDHQQKGDIKVFHVSTENQLADIFTKPLDEKTFCRLRSELNILDSRNLD

SEQ ID NO: 283675 - protein, 115 aa, Zea mays
  unsure (1)..(115): unsure at all Xaa locations
  Clone ID: MRT4577_21810C.1.pep
TNTNWTXKKSDQRPTTGELMAAWSSTSXHRRIMLAGVALLXEIMGGSISAGTFCVPGRDMPHKPLNSCTLDHASRTCXMXPPLRATELXRRCCRALADIPAYXRGAGLRILMDRA

SEQ ID NO: 283676 - protein, 405 aa, Zea mays
  unsure (1)..(405): unsure at all Xaa locations
  Clone ID: MRT4577_21811C.1.pep
MPFLLTPGARAVPSPSTLSRLLLPLHLQITNGRHNHQHGHVPASPLLYPRLRNRRSRFFAASSSSSSPQMAAPADAAGGSSDAFEVIRVHQAKAVRLSPVEEIRTIMDRSVRCVLATHSQDHAGYPSGSMVDFACDQDGYPILAVSSLAVHSKNLSGNPKCSLLVAKDPEDRTDTVITVYGDAVPVSDEEKDSVRSAYLRRHPDAFWVDFGDFSFLHIKPKAVRYVSGVATALLGSGEFNVAEYKEAKVDPISQFSTPITSHMNKDHANDTKLIVQHSTTVKSCQSTGAKVDTSSRARSACNCAILAWXQPATHSKLQTSXNECNCWKTENPNPNWVGDVLIYIKVDFAYMLDVDSLGFNVKAGYDGSVLKLRIPFPRQAQDRKDVKTLIVEMLQAARASSSDPE

SEQ ID NO: 283677 - protein, 399 aa, Zea mays
  Clone ID: MRT4577_21812C.1.pep
MEIISQWLEGNHSHERTPIHTSILSGKNMSKNFYKDIRMIQLPPINTPVVISSNPKFMPYFKDCIGAIDGTHVPITISPSLQDPYRNRKGGLSQNVMVACDFNSKFYLVDAGYANTPNFIAPYHNVRYHLQEQARSNLRPSNAKELFNLRHAQLRNHVERIIGVLKMCFPILKCASYYSIETQRDIVLAGCVLHNFIKINDGCEQWLNEDNMQVNPGDIVDIPEGDENYIEDVMSCNERRRAGNFKRNQIAQAMWTDYLGELYSLRMLTKNHVLPSFQSALISIFPALSSFPVPRMLGATQSDTGDGAGATGRQRLTARETSGSRQQIGGGAGPRTTQAWGRRRCRSWGTWGRRRPGGPGDDAGLGETWRRWLGLEAAVQVRGSLVRRRLGEMEAAAQV

SEQ ID NO: 283678 - protein, 86 aa, Zea mays
  Clone ID: MRT4577_21813C.1.pep
YQRGRGIPRPRGPGRFNPVPLGPLARPDPAKNLSRPLFFAKIFTRGAVLTRAPFFQNYKSFWKTWRFFNPGPTPLRVGGGPRRGFF

SEQ ID NO: 283679 - protein, 38 aa, Zea mays
  Clone ID: MRT4577_21814C.1.pep
LIDTMVIIPWRPCYERVNTNVLARTHTLYFLNTVLSNG

SEQ ID NO: 283680 - protein, 105 aa, Zea mays
  Clone ID: MRT4577_21815C.1.pep
GWAAVAGLGFRGAVLGTIFAAHYFVRRRWLLQFHVVQRPLFYGLKMGLLPSGNRALKLSIHAFLLFHFLVFFLPWQFRKGGSVGSQILTEISILIVTAGVSFCLE

SEQ ID NO: 283681 - protein, 39 aa, Zea mays
  Clone ID: MRT4577_21816C.1.pep
ERSIQPIESVDRWVSLLSLHIRYFCLNFIQMIGLPLGHV

SEQ ID NO: 283682 - protein, 51 aa, Zea mays
  Clone ID: MRT4577_21817C.1.pep
EASSPWNKGSWGDSQLKTPRTPVLSVRRRIAQIFTSMYTGTDWKVHRAISR

SEQ ID NO: 283683 - protein, 71 aa, Zea mays
  Clone ID: MRT4577_21818C.1.pep
PLVRSCFSPLLPLRADSWWRRYGDGQGCVPPTLITRWCLLYPLYTRSLNEPHRPMPIDARKCHTSTRLILF

SEQ ID NO: 283684 - protein, 85 aa, Zea mays
  Clone ID: MRT4577_21819C.1.pep
GHTGLWILREQQRADLGSLALIPGVYYPKHRDPALIVADNLSTGDATTSQSPSVHDTEDFVRGGNHGLGKSSFWRFWTWPWLMST

SEQ ID NO: 283685 - protein, 104 aa, Zea mays
  Clone ID: MRT4577_2181C.1.pep
IRLEGRSRMFLPGNVTDDEEHPSHTNHRRHTDRLHGWPPEPLSVTLDTRKGIHKLKNLRRHTYLHTRALHLMTCTAWTTELKLNANKVASGYKHTMRSKETTHV

SEQ ID NO: 283686 - protein, 68 aa, Zea mays
  Clone ID: MRT4577_21820C.1.pep
EVLGVPYMDIMFRKIIVSYTNFLCMSHKRSFYPVSYYLNDWPELCCVQKSVMYCYKSFDILKLSEMRS

SEQ ID NO: 283687 - protein, 71 aa, Zea mays
  unsure (1)..(71): unsure at all Xaa locations
  Clone ID: MRT4577_21821C.1.pep
NEAPPLDNVWEKKKGFPPRAAPAEKSFFFVGPAGPFPQEFRGVKKESFSPKCIPRGLVSKTGFKQKKXXXQ

SEQ ID NO: 283688 - protein, 289 aa, Zea mays
  unsure (1)..(289): unsure at all Xaa locations
  Clone ID: MRT4577_21822C.1.pep
PTRSSTRPLEIDNVGGWRYMFGFSAPLAAIMAIGMWTLPSSPRWLLLRAVQGKASLEDNKKKAIQALRTLRGRTASEKVLADDVDDTIVSIKAAYAGQEAEGNVWDVFEGASLKAFTIGGGLVLFQQITGQPSVLYYAASILQXVAVFKVDDVGRRPLLIGGVGGIALSLFLLAAYYKILNNFPFVAVGALLLYVGAYQVSFGPISWLMVSEIFPXRTRGRGISLAVLTNFGSNALVTFAFSPLKELLGPANIFFLFGVIAVLSLVFVILVVPETKGLSLEEIESKILK

SEQ ID NO: 283689 - protein, 247 aa, Zea mays
  unsure (1)..(247): unsure at all Xaa locations
  Clone ID: MRT4577_21823C.1.pep
FTRLLLRQXSXKASLEDNKFGTRAIQALRTLRGRTASEKVLADDVEDTIVSIKAAYAGQEAEGNVWEVFEGASLKAFTIGGGLVLFQQITGQPSVLYYAASILQTAGFSAASDAAKVAILIGLFKLLMTGVAVFKVDDVGRRPLLIGGVGGIALSLFLLAAYYKILNDFPFVAVGALLLYVGAYQVSFGPISWLMVSEIFPLRTRGRGISLAVLTXIRSNALVTFAFSPLKEXXRPANIFFLFSVIA

SEQ ID NO: 283690 - protein, 237 aa, Zea mays
  unsure (1)..(237): unsure at all Xaa locations
  Clone ID: MRT4577_21824C.1.pep
FGTRPRSIAEDIRKGHAAAPQLFFYSISDRLFKFPLSDHLCASLFDVLLGGASPKQVLQKRSQSDALKDRSMAPFFVPQILVCIFKYIQSCRDASVRTKILSDLLDLLDSNPVNVESLMEYGWSSWLETSAKLDVLRNYKSNSVAKADGLETNELILVRNMYSLVLSYCIFSVKGGWHQLEDTTNFLLLKIEQGQLPNSSMLRDIFXEDLIGSLLETSSEEXVFNSQPCXDNILDLL

SEQ ID NO: 283691 - protein, 116 aa, Zea mays
  unsure (1)..(116): unsure at all Xaa locations
  Clone ID: MRT4577_21825C.1.pep
TPAQRSRGAAPRQEAASPANKTTREETXHRATTAAQAERHEEQAEATERAAKTADAEEPPDEERNLRPEANKTEKGERRTTRRTXPNTEQKEERRKNEEHGNRTKDKRGKNQAEPS

SEQ ID NO: 283692 - protein, 123 aa, Zea mays
  Clone ID: MRT4577_21826C.1.pep
MASEEEGVVIACHTKADFDAHMAKAKEAGKLVIIDFTASWCGPCRFIAPLFVEHAKKFTQAVFLKVDVDELKEVAAAYDVEAMPTFHFVKNGVTVETVVGARKENLLAQIEKHCAAAVPAASA

SEQ ID NO: 283693 - protein, 120 aa, Zea mays
  Clone ID: MRT4577_21827C.1.pep
MASEEGVVIACHTKADFDAHMAKAKEAGKLVIIDFTASWCGPCRFIAPLFVEHAKKFTQAVFLKVDVDELKEVAAAYDVEAMPTFHFVKNGVTVETVVGARKENLLAQIEKHCAAAVPAA

SEQ ID NO: 283694 - protein, 81 aa, Zea mays
  Clone ID: MRT4577_21828C.1.pep
TPAAGTIKREGDVPRFGGPMFDTTLYLPLERFGPKLTGPLLGCPPPPRSNGGCCTVKAEKMPPMVFVKKSCKLQRHPVLLF

SEQ ID NO: 283695 - protein, 123 aa, Zea mays; identical to SEQ ID NO: 283692
  Clone ID: MRT4577_21829C.1.pep

SEQ ID NO: 283696 - protein, 46 aa, Zea mays
  Clone ID: MRT4577_2182C.1.pep
SAFNALSTCYGVAVTGGSTGSRAKSIPHTWSMAANSCDKPLAARSC

SEQ ID NO: 283697 - protein, 121 aa, Zea mays
  Clone ID: MRT4577_21830C.1.pep
MASEEEGVVIACHTKADFDAHMAKAKEAGKLVIIDFTASWCGPCRFIAPLFVEHAKKFTQAVFLKVDVDELKEVAAAYDVEAMPTFHFVKNGVTVETVVGARKENLLAQIEKHCAAAVSAA

SEQ ID NO: 283698 - protein, 117 aa, Zea mays
  Clone ID: MRT4577_21831C.1.pep
IYYSVKIQELQKQLALDREEAEKIQDDRDNFLNLALQGYQRSIVVGGKYDLQVVFLLVSLWFSLFSRDQVVKAMLKTTKEVQTYKFIPLIYQIDSRLCSSIDAQASFNFQIALTSLF

SEQ ID NO: 283699 - protein, 97 aa, Zea mays
  unsure (1)..(97): unsure at all Xaa locations
  Clone ID: MRT4577_21832C.1.pep
KGCPKRVKNLGGGRRFKPLKNYQXXLXGLPFPLALCIVFNLCFYRSVAINGFPNRKLLPSSLKFLVVSSGSLVSKFFKKKEKFFGLPKRLFWGKNVI

SEQ ID NO: 283700 - protein, 57 aa, Zea mays
  Clone ID: MRT4577_21833C.1.pep
VYRPSLWSRPTPWPGWSSAWSSKQHSWQGCHSFKRSEQHMKAGSTASQCVPRSLMPS

SEQ ID NO: 283701 - protein, 52 aa, Zea mays
  Clone ID: MRT4577_21834C.1.pep
TCCSIFTHIGGRINTKITRLPLDGLVPNHIPRPTLENQPLICHNQKRGGKLP

SEQ ID NO: 283702 - protein, 51 aa, Zea mays
  unsure (1)..(51): unsure at all Xaa locations
  Clone ID: MRT4577_21835C.1.pep
ICCDSWDRWSHGKCVKTTLAELRPXTHPNAQIAEQRGQEPSTKPSCHPGVK

SEQ ID NO: 283703 - protein, 172 aa, Zea mays
  Clone ID: MRT4577_21836C.1.pep
MRMAAASNGAPLVVFDFDKTIVDCDSDNWVVDALGATRRFDELLRHLPWNHAIDAMMGELHSEGKTAEDIRGSLRRAPLSPHVVAAIKTAYALGCELRILSDANAFFVDTILAHHGLADYFSGFEDLARVLLGIVDGEIARAAAEEGAGAGVVVVVPARQEALMPQAVRVPN

SEQ ID NO: 283704 - protein, 331 aa, Zea mays
  Clone ID: MRT4577_21837C.1.pep
GVPSGSAGISLIVEDRPQKSTRQLLELQHYNCAGCHRHLDAGRTLLQELAQTIGWNKPRFCSYTGQLFCASCHTNDTAVLPARVLHHWDFSLYPISQLAKAYLDSIYDQPMLCVSAVNPFLFSKVPALLNIMSVRKKIAAMLPCVQCPFRNSILKGLGVRRYLLDGNDFFALRDLVDLSKGAFAALPVKVLTISNRILEHITEQCLVCYDGGVPCAARQACDDPLSLIFPFQEDEATKCSLCGSIFHKQCFRKISVCPCGKASNGRKIAALEQAVHDGTGMPSTESIQPPPLSSSYGFFSDILSKARPDKLLRPRNSSPVILMGSLPDMSI

SEQ ID NO: 283705 - protein, 58 aa, Zea mays
  Clone ID: MRT4577_21838C.1.pep
GFPSLAPSLYPPNYPPPCCIYMLSIWMACIKIVLSRKKGKKKNMEPPPSFFCRVLVQK

SEQ ID NO: 283706 - protein, 95 aa, Zea mays
  Clone ID: MRT4577_21839C.1.pep
RTANASWNHSPPPNNQAPTLSASGNAGGQDLTDMVMNVFHDPVLVNLEHGVSIEQVASRLNISDALARSTVTHLIDVGNLYPTIDDNHYKSTLNG

SEQ ID NO: 283707 - protein, 115 aa, Zea mays
  Clone ID: MRT4577_2183C.1.pep
LAGNRRINFYVRPQVEEFGSIFHLYVWGTSLSTTVLRSIGSDYGRPGTWCWIQQGSMAKVLHLITFYLPLWGAILYNGFTYYEVNRMLNNATQMAAGISDQSNQSDIRAGRKGTG

SEQ ID NO: 283708 - protein, 210 aa, Zea mays
  Clone ID: MRT4577_21840C.1.pep
MAPLLFRDMKGLSCSSPASTAICPSLERQPMVRPHKAIASASPLSHVPAAPRTHRHDGKKGRQQEEQQQRKAVVVGNAGGLVSPAGSSRYLLSGRFAATEEIQEVESAPAVDVKPKREEAGEAAADAKSAQAQEQAQEQVVVLKVSLHCKACAGKVKKHLSKMEGVTSFNIDFAAKKVTVVGDVTPLGVLSSVSKVKNAQLWAAPPAIAA

SEQ ID NO: 283709 - protein, 67 aa, Zea mays
  Clone ID: MRT4577_21841C.1.pep
SSSPPRRGTSRWGTRWRTTPFLCFNSPTGEPIDGHTEQSADLATPAPWPGGCAETGVAQVLAPGRSP

SEQ ID NO: 283710 - protein, 31 aa, Zea mays
  Clone ID: MRT4577_21842C.1.pep
SYIASFYFLHVHVSHRFENFNQLFMNLKFIL

SEQ ID NO: 283711 - protein, 190 aa, Zea mays
  Clone ID: MRT4577_21843C.1.pep
AEKSWRRDQLRAFLVLAVILLITAATYRANAQPAPPADPTPAADTCADPSVEGACRNVPKALRLKLIAIPTILVSSVIGVCLPLLSRSVPALRPDRNLFVIVKAFASGVILATGYMHVLPDSFSNLTSPCLPRKPFYNRRKGGNTSGRRTSGAVADHESPAHEHHWHSHGHGHGHGHAGGIVVADKPEDD

SEQ ID NO: 283712 - protein, 381 aa, Zea mays
  Clone ID: MRT4577_21844C.1.pep
MSWRRNQLRAFLVLAVILLITAATYRANAQPAPPADPTPAADTCADPSVEGACRNVPKALRLKLIAIPTILVSSVIGVCLPLLSRSVPALRPDRNLFVIVKAFASGVILATGYMHVLPDSFSNLTSPCLPRKPWADFSFTTFVAMLAALFTLMVDSLMLSFYNRRKGGNTSGRRTSGAVADHESPAHEHHWHSHGHGHGHGHAGGIVVADKPEDDEASQVQLRRNRVVVQVLEMGIVVHSVVIGLGMGASQNVCTIRPLVTAMCFHQLFEGMGLGGCILQAEYGAKMKAGLVFFFSTTTPFGIALGLALTKVYRENSPTALIVVGLLNAASAGLLHYMALVELLAADFMGPKLQSSVRLQLLCFLAVLLGAGGMSIMAKWA

SEQ ID NO: 283713 - protein, 141 aa, Zea mays
  unsure (1)..(141): unsure at all Xaa locations
  Clone ID: MRT4577_21845C.1.pep
TPAISNYQAQFIGXQSTGNLLXIWQTWALLKCKFYXWLIIQNCIWIXNRLVQHSWPHXSMWPLGRQTSKXTGHHLETECRYTKRVWXCSLLPSWMAQPNLKPEKWQASDSVLGWWSKITNTVDIREKXIRSLTCLIXIWEI

SEQ ID NO: 283714 - protein, 269 aa, Zea mays
  Clone ID: MRT4577_21846C.1.pep
MGAPYHLQSPRTIITKVMSMKQLPPALPQLPPPPVDQSEVTEQTPVLPRSQPVDPPTITRQPQAPRQPARAPSKVILQPRQRTSPAMWCAAIACFAFSILLIVAGVVTLVVFLAVKPRPPSFDAANAILNSVYVDSPAPYFNNDMTLVANVSNPNREIDLVFRSATVELFFLDRPMAVQALPPFAQRRGQSQLLNMHLLSSRVLLPPQVAVKMVDQVRSNRVAYTIRGAFKFGAKFRFGHYSYWMYTVCQLELTAPPSGVLVARRCTTK

SEQ ID NO: 283715 - protein, 381 aa, Zea mays
  Clone ID: MRT4577_21847C.1.pep
RFYFNFTGFPFPLGPFLNRRTIRTEAVKGSIWLFEQEQALGFSSVSTNIRMTVIKLKSGGLWVHAPIAPTKECIQMLKELDAPVEHIVLPTFAYEHKIFVGPFSRKFPKAQIWVAPRQWSWPINLPLEFFGIFRAKPLKDEDDATPWVAEIEQKVLSSPEVGIGPYVEVAFYHKPSRTLLVTDAVIFVPQQPPECISKESLLASAKNGLAVKLLSKGKEVPDEPVVDNKLNRQKGWERMVLQILFLGPSNLLEPNASFAQMSQKLIVSPIVKTLVFSKVPEKVRDWVDRIAADWRFRRIIPCHFAAPINASRSDFLAAFAFLDEFLPERAAAAPGLSLLLASFMGKAASYFPPDDMKTLSSLDEFLVSVGAVKKTVSGRKR

SEQ ID NO: 283716 - protein, 56 aa, Zea mays
  Clone ID: MRT4577_21848C.1.pep
LMANVDILGGCIGDMAAFNASLIKAIGSGIRGLLLAQTRVTTRYVTGKDNCDTTHK

SEQ ID NO: 283717 - protein, 95 aa, Zea mays
  Clone ID: MRT4577_21849C.1.pep
GVQAQHHPSPLLQPPYYPKERVSCILQGNSSPSTEQSETVRRKRGKAPDEKGCEGRIQGDKGGETGGPCPLDHGGFPVQLRASSYVSCSLCRVQR

SEQ ID NO: 283718 - protein, 296 aa, Zea mays
  Clone ID: MRT4577_2184C.1.pep
MTQKFEMSMMGELSYFLGFQVKQLKDGTFISQTKYTQDLIKRFGMKDAKPAKTPMGTDGHVDLNKGGKSVDQKAYRSMIGSLLYLCASRPDIMLSVCMCARFQSDPRECHLVAVKRILRYLVATPCFGIWYPKGSTFDLIGYSDSDYAGCKVDRKSTSGTCQFLGRSLVSWSSKKQTSVALSTAEAEYVAAGQCCTQLLWMRQTLWDFGYNLSKVPLLCDNESAIRMADNPVEHSRTKHIDIRHHFLRDHQQKGDIEVFYVSTENQLADIFTKPLDESTFCRLRSELNVLDSRNLD

SEQ ID NO: 283719 - protein, 120 aa, Zea mays
  Clone ID: MRT4577_21850C.1.pep
RGPAFGGGDPARGSGPPVPTASLRGLGGWCPRWGRPLSGRGPVPFCRWPFWFFACSLGRAGFAVYVCWLSVSAPGAGHRFSPVVTCVPLCARSGFPPGPPMALAPPGWVPPLDPLAGPAS

SEQ ID NO: 283720 - protein, 109 aa, Zea mays
  unsure (1)..(109): unsure at all Xaa locations
  Clone ID: MRT4577_21851C.1.pep
SHDVTPHLVCSTSVDEALMKEEFDKLSAALVQGAATCSPPLPLTTIVVQDHKGXISNAAPTGWPLIPLLVPKXDSXDGTSEDKTRIPGPISNLKVFISPTGFFQGNTLG

SEQ ID NO: 283721 - protein, 61 aa, Zea mays
  Clone ID: MRT4577_21852C.1.pep
MDFRKSYKKKKKKKKKKKKKKKKKKKKKKKKKKKKKKKKKKKKKKKKKKKKKKKKRGAPQL

SEQ ID NO: 283722 - protein, 53 aa, Zea mays
  Clone ID: MRT4577_21853C.1.pep
IFTIRTRIFLKFNTKQTKFSDLITPPPELIISFIPLLPILPYVILCNQIPNHY

SEQ ID NO: 283723 - protein, 273 aa, Zea mays
  Clone ID: MRT4577_21854C.1.pep
MNPDPMEVQEPPPHRNEKTIFEMCREARNFRTNARRCGTLLQPYEFSCPQTAELGFKNGYIYYSSKAIKFAADIEQGFDSEELQKRAATFWVLNEVPFGQLNPLGLNPSVDVGIVKTYGVAYNTLIGKTIIALARSQQSVLSWIANPNNSIFVRDQLRNSIRSLYVALERLWDKQWTVDNVEDIGTYAINENMIQIMPFRVRGRTLDDEMTPRQGLQLLIQTNILQHWPDDIELAHFRASFSPLYSLEITFAYQSLYLHVTLHCLVHLYLPIY

SEQ ID NO: 283724 - protein, 89 aa, Zea mays
  Clone ID: MRT4577_21855C.1.pep
TIGQNPAWFWNNFGAKTGLGGKQKPFHLKNYATLVLPLSSFGTLQSIGSKLTITFCLCTPGCFPLDGEKLRGEKQIAPPGNFGGEACLP

SEQ ID NO: 283725 - protein, 54 aa, Zea mays
  Clone ID: MRT4577_21856C.1.pep
KLNSKAPRKIDEAARNSVHTGNDVESKQDDMVIKVVCPNVGNKKELHQISHWTI

SEQ ID NO: 283726 - protein, 86 aa, Zea mays
  Clone ID: MRT4577_21857C.1.pep
SISLVASTAGHSTRRCRAVADICKNTQVADLLHRVDLLALPVVHLCRTHLGTIIRTISTMTPRATSTISSPLPTGCIETKARPVSA

SEQ ID NO: 283727 - protein, 96 aa, Zea mays
  Clone ID: MRT4577_21858C.1.pep
PPPPIAGKFGEATPKIDRRFGKELEKEPKFLKNGDAGMGKIIPPHPMVGGTFSGDPPLGRVPAPPIRQTGAVGVPKSVEKKGPPGAKVAKAAPKKK

SEQ ID NO: 283728 - protein, 49 aa, Zea mays
  unsure (1)..(49): unsure at all Xaa locations
  Clone ID: MRT4577_21859C.1.pep
GRRAIKKASGIDQWPSLPFGGWGGLPFPTGRVDVIIFGKGGXGLNRKCF

SEQ ID NO: 283729 - protein, 69 aa, Zea mays
  Clone ID: MRT4577_21860C.1.pep
MYDKLRRSRPLDAVQSGCSALSIVKQGDLMVVANVGDSRSPAKSHQYSVCRARSTTTISRTVASSWRQR

SEQ ID NO: 283730 - protein, 157 aa, Zea mays
  unsure (1)..(157): unsure at all Xaa locations
  Clone ID: MRT4577_21861C.1.pep
KQSYVAACAAMYDKLRRSRRLDAVQSGCSALSIVKQGDLMVVANVGDSRVVLGTAFDDAITXVQLIVHLKPNLPQEXAHLVXCNGQGYYLADEPRVHXVLQPNQESSVLGMSRAFDDYYIEDRGVILTQEVTQRRTDNNDKFVILAIVGVAFVPTCL

SEQ ID NO: 283731 - protein, 260 aa, Zea mays
  Clone ID: MRT4577_21862C.1.pep
VGYSIVDIAPLIAAAVPMKFKKVRTVQQALTSHFWVQDIQRNLSLAEIEQYLQLWEVIESFQLQNSNDQHVWIFSNDGLYTSKSAYKALFIGAESFEPWKRIWKSWAAPKCKTFVWLAINNKCWTADRLKKRGLQHPEFCVLCDQEDETVQHILSNCVFTRQFWHNILTPIGLSSVGPKRRDSVFAEWWRKASTKIPKSKKKGFNSMIILGAWSIWKQRNRCVFEGARPCLNTLEDGFKDEMRLWVSAGAKNLRSLFDPG

SEQ ID NO: 283732 - protein, 83 aa, Zea mays
  unsure (1)..(83): unsure at all Xaa locations
  Clone ID: MRT4577_21863C.1.pep
LRFSPPVPPPPVPPLASSPLPPVSSLAEAARKPRRPPLSSTPSPPPPXAPELPPPPPXMSPPYTPSRVPHPXPAPPSNXPYPP

SEQ ID NO: 283733 - protein, 64 aa, Zea mays
  Clone ID: MRT4577_21864C.1.pep
CIWFSSSRTHDKFNRDFLALNGHHLPWIKSNLTKLRRQGYRPNPKAIWKIWNFRRRHTINFGEK

SEQ ID NO: 283734 - protein, 109 aa, Zea mays
  Clone ID: MRT4577_21865C.1.pep
AFCVLKQTWGPTSLLPKRASSDHADDLQLGASMSGCGGWSMNDHMVLLTCDIYLDQTSFLQADPKNLDELFDATPMGSDRTACNAGVDPMNTGYGDDSAELRNSKHSIR

SEQ ID NO: 283735 - protein, 216 aa, Zea mays
  Clone ID: MRT4577_21866C.1.pep
MLAADVSSVARLLRGEAVKKGGPEIVTMDLLGGCGGGVAAEDEVVDLDVTVPAGWERRLDLLSGKTFLTPRHQSVQGGHQDLNLPPPAAGSASAPNTNNSSAAVCTLDMVRSALERATAGRTAASPATSSTSSASTSSSSSAGKRNRRSPLPATPAMRAAACPSCLTYVLIAEADPRCPRCAARVPPLRGKAAGAATVGSGKKPRIDLNAAADEME

SEQ ID NO: 283736 - protein, 205 aa, Zea mays
  Clone ID: MRT4577_21867C.1.pep
GHDGARHQQHGIGDHTAQHQYKIELGFRKTNHNHQFILFTEHLVIIALGLGFSYPQILEICLLHTSRLANLFIEPTFVEHIEGATRKGSMVVAAPWPRARLACSCGWGRAEGARQGRRRKGWAERGWGRRAGTARFGEVAAWASRDTRDLGERAKEGDGEKEGASVLGAASRKASSRELAPAKGCREPERRWLERSTRRWTSCRI

SEQ ID NO: 283737 - protein, 186 aa, Zea mays
  unsure (1)..(186): unsure at all Xaa locations
  Clone ID: MRT4577_21868C.1.pep
MHIIKHLQRPVADSERDSTFMMIKSDRGQRPLIGDTSHRFEKKXGFYLTGLXILRTRRSLXDKDYRDLASQIFFQRLQDYIISGPVEDMLXDGNSDGTTGRMIFVVTDPLDTEHETIQGHYDVXIDRNVILGNDTXVEGNIEIVLWFPXGPDDWQRSHDPWIYQNETWKSLSLSVRARGSMSPFVL

SEQ ID NO: 283738 - protein, 1576 aa, Zea mays
  unsure (1)..(1576): unsure at all Xaa locations
  Clone ID: MRT4577_2186C.1.pep
MDPKGNGIVINDKEKESFVNEPKDDKPIDSGSGHKRKDGKKKKTRRIKEIIYYDDSDESSSSQKDDYDYEKRKTVNSNFSFDYSRIPQSTNAHLLSIPLGKPPHFDGEDYGFWSHKMRSHLFSLHPSIWEIVESGMKFDSTDSPMFINEQIHKNAQATTVLLASLCRDEYHKVSGLDNAKQIWDTLKISHEGNNITMLTKMELVEGELGRFAMIRGDEPTQTYNRLKTLVNKIRSYGSTRWTDHDIVRLMLRSFTVLDPHLVNNIRENXVHQDVARRNSWEIXSGRMMIKEARYVDDELNGPIQEPQTIALKATRSKEALPSKVAQVEAAGLNDEEMALIIKRFKTTLKGRKGQPSKTKTKGKRSCFKCGKIGHFIANCPDNDSDQEQGNKREKKKAYKKAKGETHLGNEWDSDCSSSDSDNEGLAATAFTKSSLFPNERHTCLMAKDKKVCTRDNTTYASSSEDESSDDDEIDYSCLFKGLDRTKVDKINELIDALNDKNRLLEKQEDLLYEEHDKFVEAQKSLALEIKRNEMLSCELSTCHETISSLKDVNNDLNAKLEVANRSNSCVEHVVICTRCKDFNVDACSEHLVSIAKLNDELASLNAQLKTSKSEFDKLKFARDAYTIGRHPSIKDGLGFKREAKNLTSHKAPISAKEKGKTPMASSAXKNHAFMYHDRRHSRNAYRSYDAFDSHAMFASSSSYMHXVYASGGSSWIIDSGCTNHMTGEKRMFSSYVKNKDPQDSIIFGDGNQGKVKGLDVSVFRRCDGSLAFKGVLDDKLYLVDFAKEEASLDACLIAKTCMGWLWHRRLAHVGMKNLHKLLKGEHIDLVQLVKQDKSETQGTLKRFLRRAQNEFELKVKKIRSDNGSEFKNLQVEEFLEEEGIKHEFSAPYTPQQNGVVERKNRTLIDMARTMLGEFKTPERFWSEAVNTACHAINRLYLHRLLKKTLYELLTGNKPNVSYFRVFGSKCYILVKKGRNSKFAPKAVEGFLLGYDSNTKAYRVFNKSSGLVEVSSDVVFDETNGSPREQVVDLDDVDEEDVPTAAIRTMAIGDVRPQEQTEQDQPSSSTMVHPPTQDDEQPFRVEEALLDLDWVLAMQEELNNFKRNEVWTLVPCPKQNVVGTKWVFRNKQDEHEVVIRNKARLVAKGYAQVTGLDFEETFAPVARLESIRILLAYAAHHSFRLFQMDVKSAFLNGPIKEEVYVEQPPGFEDERYPDHVCKLSKALYGLKQAPRAWYECIRDFLIANAFKVGKADPTLFTKTCDGDLFVCQIYVDDIIFGSTNQKSCEEFSRLNYFLGFQVKQLKDGTFISQTKYTQDLLKRFGMKDTKPAKTPMGTDGHTDLNKGGKSVDQKAYLSMIGSLLYLCASRPDIMLSVCMCARFQSDPRECHLVAVKRILRYLVATPCFGIWYPKGSTFDLIGYSDSDYAGCKVDRKSTSGTCQFLGRSLVSWNSKKQTSVALSTAEAEYVAAGQCCAQLLWMSQTLWDFGYNLSKVPLLCDNESAIRIADNPVEHSRTKHIDIRHHFLRDHQQKGDIEVFYINTENQLADIFTKPLDEKTFCRLRSELNVLDSRNLD

SEQ ID NO: 283739 - protein, 133 aa, Zea mays
  Clone ID: MRT4577_21870C.1.pep
MSTAPLSGFFLTSLSPSQSSLQKLSLRTSSTVACLPPASSSSSSSSSSSSRSVPTLIRNEPVFAAPAPIIAPYWSEEMGTEAYDEAIEALKKLLIEKEELKTVAAAKVEQITAALQTGTSSDKKAFDPVETIK

SEQ ID NO: 283740 - protein, 87 aa, Zea mays
  Clone ID: MRT4577_21871C.1.pep
RKKKKKKKKKKKKKKKKKKKKKKKKKKKKKKKKKKKKKKKIRGGRFIDSRLWSPFSNLLTFFLGGPTSLTGPSFSPLGPGKPLRYPT

SEQ ID NO: 283741 - protein, 42 aa, Zea mays
  Clone ID: MRT4577_21872C.1.pep
EVGPSHSASSPNRPLIPRNSSTRHDTSTIERRDENATTTEST

SEQ ID NO: 283742 - protein, 59 aa, Zea mays
  Clone ID: MRT4577_21873C.1.pep
GGGGPYPGFLDWAVKPSKRGGPFKFSPGFPGDGVRIAPPVLMPGIFLNQTQRFEKKIGI

SEQ ID NO: 283743 - protein, 53 aa, Zea mays
  Clone ID: MRT4577_21874C.1.pep
RNGKLTHHASDISHNIGALFNAAGRVYLPFRKRKFWEVQFDVVYFTIKTVGEY

SEQ ID NO: 283744 - protein, 104 aa, Zea mays
  Clone ID: MRT4577_21875C.1.pep
MAGELRHRRVPSEDGDEGAAASQGPDPAAGNGKAGTASEGAEPRRGKRDALGWLEWGRGWMAVVGEFLFQRIAASHLANPLELPPLDGVSVVVTGATSGIGLEI

SEQ ID NO: 283745 - protein, 65 aa, Zea mays
  Clone ID: MRT4577_21876C.1.pep
STTLPGGACDPRLFCERVKWLPTDLWRIFFYESFAEMMCGVQSGERDKNKSISKNMYMHCICSHP

SEQ ID NO: 283746 - protein, 79 aa, Zea mays
  Clone ID: MRT4577_21877C.1.pep
NMFILYAHSPVVIVISAKAIWRTGGGYKAEDGSKQQHPKYCNVNVEGSNIKALIWMQMEKAPTDHSEYNFDELDAGRVG

SEQ ID NO: 283747 - protein, 121 aa, Zea mays
  Clone ID: MRT4577_21878C.1.pep
MAEANRRTTPRPRAVPPLLAEVEVSNLPGFDVTPTPSPHGQDATTPSPRPPTKPSSRPGVPPLDRVPCRSEVVFPPLDSPFQAPGYRSVQPVSISLPASPIGFGFGVPAIPATDNAAGLAR

SEQ ID NO: 283748 - protein, 122 aa, Zea mays
  Clone ID: MRT4577_21879C.1.pep
MAEANRRTTPRPRAVPPLLAEVEVSNLPGFDVTPTPSPHGQDATTPSPRPPTKPSSRPGVPPLDRVPCRSEVVFPPLDSPFQAPGYRSVQPVSISLPASPIGFGFGVPAIPAPANAADSDDD

SEQ ID NO: 283749 - protein, 175 aa, Zea mays
  Clone ID: MRT4577_2187C.1.pep
MKDAKLAKTPMGTDGHVNLNKGDSDYAGCKIDRKSTLGTCQFLGRSLVSWSSKKQTSVALSTAEAEYVAAGQCCTQLLWMRQTLRDIGYNLSKLPLLCDNESAICMADNPVEHSRTKHIDIRHHFLRDHQQKGDIEVFYISTENQLADIFTKPLDEKTFCRLRSELNVLDSRNLD

SEQ ID NO: 283750 - protein, 75 aa, Zea mays
  Clone ID: MRT4577_21880C.1.pep
RTCKSPPVHPKIPTFPIMSLHANLIEIWNYPLAYVNLLSSTQLKQNPNKNHKNLWRGNQKANPTHLNCITNTPIL

SEQ ID NO: 283751 - protein, 71 aa, Zea mays
  Clone ID: MRT4577_21881C.1.pep
HEFLSLRAAVTSLTPSPNSRLSFLAAPCVSLWRRVPSSAAIHGYAHRVLQIGGVVSPAANAVRLAAGAPLG

SEQ ID NO: 283752 - protein, 67 aa, Zea mays
  unsure (1)..(67): unsure at all Xaa locations
  Clone ID: MRT4577_21882C.1.pep
IILITIFYLKLLFSYNYTKLTTLKHIKKKSYLSLIXKLTNINYFXLNTHFLIKKPFXLSSLIKSSNH

SEQ ID NO: 283753 - protein, 263 aa, Zea mays
  unsure (1)..(263): unsure at all Xaa locations
  Clone ID: MRT4577_21883C.1.pep
MATLAPRPHILLGLTRPQPIALRACAAFSRSRHAPVPPRAAQPRRVFLGLGAAFIDQATRMASGGTSSRSFVAGARPRQGVSPVEQILKNVEWPDEFPFKPEDFSRFDESSDTLFYSVPRFVTHIDDQAIQALTEYYSEVLPPSNTPGVAILDMCSSWVSHYPPGYRQEKIVGMGMNEDELKKNSVLTQYVVQDLNVNPKLPFEDNTFDVITNVVSVDYLTKPIDVFKEMRRILKPSXLAIMXAISIWTSTGDADHAWIXGAY

SEQ ID NO: 283754 - protein, 333 aa, Zea mays
  Clone ID: MRT4577_21884C.1.pep
MALGGLASRYSPTGTAPRPRSSQQEPMATLAPRPHILLGLTRPQPIALRACAAFSRSRHAPVPPRAAQPRRVFLGLGAAFIDQATRMASGGTSSRSFVAGARPRQGVSPVEQILKNVEWPDEFPFKPEDFSRFDESSDTLFYSVPRFVTHIDDQAIQALTEYYSEVLPPSNTPGVAILDMCSSWVSHYPPGYRQEKIVGMGMNEDELKKNSVLTQYVVQDLNVNPKLPFEDNTFDVITNVVSVDYLTKPIDVFKEMRRILKPSGLAIMSFSNRCFWTKAISIWTSTGDADHAWIVGAYFHYVGGFEPPQALDISPNPGRTDPMYVVCSRKKIG

SEQ ID NO: 283755 - protein, 115 aa, Zea mays
  Clone ID: MRT4577_21885C.1.pep
LLFSPRGVFFFFLSMIFFLLFFKKVSLETTCFNRGGRGAPFVDLFLETPRNVWTFFPWGWLPGDRSQLWGHRNMGLGQLLIPLGEFFGLGGGDLQNALRFLLTPFPPLLEKRGGC

SEQ ID NO: 283756 - protein, 258 aa, Zea mays
  unsure (1)..(258): unsure at all Xaa locations
  Clone ID: MRT4577_21886C.1.pep
MSAAARAPPPPRALYAPSRRVPFGAVILSAPRPGARVRAARPREGNVHNHCLLTSSSLNSNSLLCPPCNCAQMALADTRIAYQPEVDKHAGVLAYELVQGNLVQWNSFMDKSIPDPPTAVLLHGILGSRKNWGSFAKRLAQEFPMWQFLLVDLRCHGDSTSIKKSGPHTVASTALDVLKLIMQLRLTPRVXLVGHSFGGKVALSMVEQAAKPLARPVRVWVLDATPGKVRAGGDGEDHPAELIEFLRKMPEQVSSKQE

SEQ ID NO: 283757 - protein, 93 aa, Zea mays
  unsure (1)..(93): unsure at all Xaa locations
  Clone ID: MRT4577_21887C.1.pep
MADDEDIQXLACIQXTAMDTGGCADQYAPRACMPRLVGRTRHTDIMVAMGHTDSYVGDEAPSNRCDSTLKYPIEHSLVSNLHDMDRILHHTCY

SEQ ID NO: 283758 - protein, 29 aa, Zea mays
  Clone ID: MRT4577_21888C.1.pep
FIHRKVHRELLRFSCCGIKIKVAHQWVSI

SEQ ID NO: 283759 - protein, 314 aa, Zea mays
  unsure (1)..(314): unsure at all Xaa locations
  Clone ID: MRT4577_21889C.1.pep
MFCIHLQAYELVQGNLVQWNSFMDKSIPDPPTAVLLHGILGSRKNWGSFAKRLAQEFPMWQFLLVDLRCHGDSTSIKKSGPHTVASTALDVLKLIMQLRLTPRVLVGHSFGGKVALSMVEQAAKPLARPVRVWVLDATPGKVRAGGDGEDHPAELTQFLRRMPEQVSSKQEVVDALVKGQFSMDVARWVATNLRRTSPLGQRPSSSFSWTFDLNGISEMYKSYEDTNLWRIVENVPRGXHINFLKAERSLHRWALEDLQRIYTAEELAADEGGGVEMHVLEDAGHWVHADNPDGLFRILSSTFRIETTIRGMQD

SEQ ID NO: 283760 - protein, 239 aa, Zea mays
  unsure (1)..(239): unsure at all Xaa locations
  Clone ID: MRT4577_2188C.1.pep
MTPEEILGKFVSGRMMIKEARCVDDALNGPIHEPQTVALKATRSKEMLPSKVAQVEAAGLNEEEMALIIKRFKTALRGRKEHPNKTKTKGKRSCFKCGKIGHFIANCPDNDSDQEQGNKRKKKKAYKKAKGEAHLGKEWDSDCSSSDSDNXGLAATAFNKSALFPNEHHTCLMAREKKVSTRDTSTYTSSSDEESSDDEIDYSCLFKGLDRTNIDKINELIDALNGKNRLLEKQXDLLY

SEQ ID NO: 283761 - protein, 153 aa, Zea mays
  Clone ID: MRT4577_21890C.1.pep
VSGTIAGSTYGVAKQASLISVKVFSGDSSTTSIILDGYNWAVNDIVSRNRASKSAINMSLGGPASSTWTTAINAAFNQGVLTIVAAGNGDSLGNPQPVSSTSPANRPNAITVAALDINWRTASFTNYGAGADVFAPGVNVLSSWIGTNTATHT

SEQ ID NO: 283762 - protein, 71 aa, Zea mays
  unsure (1)..(71): unsure at all Xaa locations
  Clone ID: MRT4577_21891C.1.pep
HKAAEGSAXEADALRHRPDSGHDTSPDTYRSLSNRXTIPNHALRSAIQEHPRQNELQEPFSQWQEDFGVVN

SEQ ID NO: 283763 - protein, 48 aa, Zea mays
  Clone ID: MRT4577_21892C.1.pep
DSICISGTISSNQTLSGVAKIQLMCHQQRPLICVCVVMEQFLIGPVYS

SEQ ID NO: 283764 - protein, 76 aa, Zea mays
  Clone ID: MRT4577_21893C.1.pep
SWKRSETFYSPAVSMFVVVPSPVLATFPEKTYYCSWDSTLRPRHNRSVGPSKIRLLWYTGVRMWGRACDNVSITMG

SEQ ID NO: 283765 - protein, 58 aa, Zea mays
  unsure (1)..(58): unsure at all Xaa locations
  Clone ID: MRT4577_21894C.1.pep
GRFXYIRGGDYDSRQRIYKAVGKSGRGIRNEXXLKNRHGWLMGTXNKXNSRAGGGGGG

SEQ ID NO: 283766 - protein, 483 aa, Zea mays
  Clone ID: MRT4577_21895C.1.pep
MEALLKWAAELGVSDSPSPPSSSPSGNISSPSCLGGSLVVADFPDAGGRGLAAARDLRRGELVLRLPRAALLTSDRVTADDPRIAACVSAHKPRLSSVQILIVCLLAEVGKGSNSVWYPYLCQLPSYYTILATFNDFEVEALQVDDAIWVAQKAKSAIKSDWEDATPLMKELEFKPKLLMFKSWLWAFATVSSRTLHIAWDEAGCLCPVGDLFNYAAPDDDTLLEDEDTAELTNYQQKNGMTNSSERLTDGGYEDCNAYCLYARKNYKKGEQVLLAYGTYTNLELLEHYGFLLGENPNEKTFIELDLDICSVGTWPKDSMYIHPNGHPSFALLCALRLWSTPTNRRKAVSHQVYSGSMLSTENEMGIMKWLINKCEGTLQQLPTTVEFDDSLLVLLRTIQNSSNCRADAKRSGFEQEFAVFLRFHRAEQDCSGNSLLPFRLMRSVERWELAVQWRCNYKKTLKKCISYCEGLVHELPLQLNQQ

SEQ ID NO: 283767 - protein, 216 aa, Zea mays
  unsure (1)..(216): unsure at all Xaa locations
  Clone ID: MRT4577_21896C.1.pep
MEALLKWAAELGVSDSPSPPSSSPSGNISSPSCLGGSLVVADFPDAGGXTPPPSLAVLGLPALASPHLLCFDRRRGLAAARDLRRGELVLRLPRAALFTSDRVTADDPRIAACVSAHKPRLSSVQILIVCLLAEVGKGSNSVWYPYLCQLPSYYTILATFNDFEVEALQVDDAIWVAQKXLKXIKSDWEDATPLMKELXFKPKLLMFKSWLWALAT

SEQ ID NO: 283768 - protein, 446 aa, Zea mays
  Clone ID: MRT4577_21897C.1.pep
MKITVRGSEMVYPAAETPRRRLWNSGPDLVVPRFHTPSVYFFRREDADGNDLAGADGSFFDGARMRRALAEALVPFYPMAGRLARDEDGRVEIDCNAGGVLFQEADAPDATIDYFGDFAPTMELKRLIPTVDFTDDISSFPLLVLQVTHFKCGGVAIGVGMQHHVADGFSGLHFINSWADLCRGVPIAVMPFIDRSLLRARDPPTPAYPHIEYQPAPAMLSEPPQAALTSKPATPPTAVAIFKLSRAELVRLRSQVPAREGAPRFSTYAVLAAHVWRCASLARGLPADQPTKLYCATDGRQRLQPPLPEGYFGNVIFTATPLANAGTVTAGVAEGASVIQAALDRMDDGYCRSALDYLELQPDLSALVRGAHTFRCPNLGLTSWVRLPIHDADFGWGRPVFMGPGGIAYEGLAFVLPSANRDGSLSVAISLQAEHMEKFRKLIYDF

SEQ ID NO: 283769 - protein, 70 aa, Zea mays
  Clone ID: MRT4577_21898C.1.pep
PRERPRVRPVRFSFNKPQKAKRQVKVQHRTGHIIRRPTGATHTMKTQPKALRDHGRLKRRARRILCHEHR

SEQ ID NO: 283770 - protein, 70 aa, Zea mays
  Clone ID: MRT4577_21899C.1.pep
KTRDRGKNDYGRGSEENLCLLSLLRRRNTSHLGTCMKQEIIRQNFGNSQDACLQNKLGRKKQGRPPFYDD

SEQ ID NO: 283771 - protein, 126 aa, Zea mays
  unsure (1)..(126): unsure at all Xaa locations
  Clone ID: MRT4577_2189C.1.pep
CTWLSLHRAVGGRTYCFYWQVHVKVANPHESADRYSDPRRMSPSTQLPEXLCFVTTGGTQEIPAYALDGYYLIAAAALRIIYVTPYIVVVVYQKTYGERPTNACVPPQICKRMAAHCTLQDPPMNA

SEQ ID NO: 283772 - protein, 306 aa, Zea mays
  Clone ID: MRT4577_218C.1.pep
MVSSALRRCLPCHASLCHAFPPHPLLAAAGVFRRSFQSGDGETMDEFEERLFGGKDTDKGSLYEKLDRAENTGRRYNMGSGMGGLTGLSDKSRSGLSKGGFTWLSDSSSSGFPGFPASGDRSNSGWMDGYDSFNDGLNDTIANAARNIQMEEDEDVDGDWEDDFEFRPDVRFRQGSTYSVRDLDLRKPAAAKNPPRRQFETTTAEVLKKADFRNVRFLSNFLTEAGIIIKRSQTRISAKAQRKIAREIKTARAFGLMPFTTMGRRPFIFGRSAEEHYWDDGYFGYVKQKDGEPVENEDAEPNVEAV

SEQ ID NO: 283773 - protein, 100 aa, Zea mays
  unsure (1)..(100): unsure at all Xaa locations
  Clone ID: MRT4577_21900C.1.pep
MIKPLLLLGFSYNFALVRPHVEICCHLYLTPVCRIINVPIAFQLPEFALKATSSVXLVISVPPGFASPDGWSNYKPHVFPGTSLSPLLVFLAPILPSLLS

SEQ ID NO: 283774 - protein, 318 aa, Zea mays
  unsure (1)..(318): unsure at all Xaa locations
  Clone ID: MRT4577_21901C.1.pep
MKQFRHLTKNWRALLLQVTHFKCGGVAIGVGMQHHVADGFSGLHFINCFGTMXCTAERDGYLYSLNASTLSKQWESMGXPFYKSQPAPAMLSSEPPQAALTSKPATPPTAVAIFKLSRAELVRLRSQVPAREGAPRFSTYAVLAAHVWRCASLARGLPADQPTKLYCATDGRQRLQPPLPEGYFGNVIFTATPLANAGTVTAGVAEGASVIQAALDRMDDGYCRSALDYLELQPDLSALVRGAHTFRCPNLGLTSWVRLPIHDADFGWGRPVFMGPGGIAYEGLAFVLPSANRDGSLSVAISLQAEHMEKFRKLIYDF

SEQ ID NO: 283775 - protein, 52 aa, Zea mays
  Clone ID: MRT4577_21902C.1.pep
EYQLTSSLFQEFPLCDDVLQLYTGSAKRGVANNTKKRGNRIRKKYLNRIPTF

SEQ ID NO: 283776 - protein, 81 aa, Zea mays
  Clone ID: MRT4577_21903C.1.pep
APGVVPQDVVLVNALANVSVLAHELRRVSMVCGMFISKLLPMTVGARSHLPVQQVERFLDESRHHGMLVVSHPHLGLCRMP

SEQ ID NO: 283777 - protein, 47 aa, Zea mays
  Clone ID: MRT4577_21904C.1.pep
DFKKAFAIWFIFIYYKCIKDLPSNAAKEGSKNLEKFTFGLPQKSNTP

SEQ ID NO: 283778 - protein, 114 aa, Zea mays
  unsure (1)..(114): unsure at all Xaa locations
  Clone ID: MRT4577_21905C.1.pep
MIIRGKNRNEIXEYLFEEVLICANKDYNLRNCPHIDVANLCPLSLIDTSNRHHDGRETFSCYNYYWYRSNAAIXYLPNYLNLSSEXILTATLEKSATANXPPFVSGPSGDCSRG

SEQ ID NO: 283779 - protein, 37 aa, Zea mays
  Clone ID: MRT4577_21906C.1.pep
PLKCSCQASDYTYRWPMRRRSRATRSKDLADFFGRVG

SEQ ID NO: 283780 - protein, 79 aa, Zea mays
  Clone ID: MRT4577_21907C.1.pep
VSEAEMEKQKVARYFPTERGQPMVHGALSLALSSVRSTETHVERVLSLQFRDQSLKRSLVHLHFPTWPELGLPDSPSNL

SEQ ID NO: 283781 - protein, 81 aa, Zea mays
  Clone ID: MRT4577_21908C.1.pep
FVWLEGPGIKLLLPRCWGGRAWISEFGTYQNPPGIGLICLVGQLKKHLFQFHRVLLDKSGNKLLVRPSWGCKACIPGIGNL

SEQ ID NO: 283782 - protein, 63 aa, Zea mays
  Clone ID: MRT4577_21909C.1.pep
PEAFPGLKGKGPKNGPPPLFFMLGFFVQALVPGKGPPKNPPGPLGGPVNNKAGAFPPNFVPGN

SEQ ID NO: 283783 - protein, 124 aa, Zea mays
  unsure (1)..(124): unsure at all Xaa locations
  Clone ID: MRT4577_2190C.1.pep
GSNNPTGLNSDXDKIPFHPYYTIKDLXLGVFILLLFLITLVLFFPDLXLGDPDNYTPANPLNTPPHIKPEXYFLFAYAILRSIPNKLGGVVALILXILILAFLPSWHTSKTRQLXFRPIXTQIL

SEQ ID NO: 283784 - protein, 136 aa, Zea mays
  unsure (1)..(136): unsure at all Xaa locations
  Clone ID: MRT4577_21910C.1.pep
MNREVAARCSEGNQVWDFVEEVVLQADVPDHFRWKLTHDGCYSSKSAYEAFFVGSTKFGPWKRIWKTWAPSRCKFFLWLVHHNRVWTADRLERRNLPHPVSCPLCDQMSETVHHLLVGCVFARQVXALIFHQLRLL

SEQ ID NO: 283785 - protein, 133 aa, Zea mays
  Clone ID: MRT4577_21911C.1.pep
MAPKTVWGYFFIDYIPEPLQVSDKQRVVELKGEVARLFEDCNCKDVVERMNLVDVVQRLGIDHHFKEQIDTALKNIQGAEFNSSDLHEVSLRFRLLRQNGLWVPVDQFDKLRPQEDGSFTRDISDDPKGLLPL

SEQ ID NO: 283786 - protein, 496 aa, Zea mays
  unsure (1)..(496): unsure at all Xaa locations
  Clone ID: MRT4577_21912C.1.pep
TDVVERMNLVDVVQRLGIDHHFKEQIDTXLKDIQGAEFNSSDLHEVSLRFRLLRQHGLWVPADQFDKFRRQEDGSFSSDIAGDPKGLLGLYNAASLLNHGEEVLEEALLFARRHLESIRRGGGLHDSPYLSEQVGRSLKIPLPRTLKRLEAVSYIPEYSSADDTTYIHPEILELARLDFNLLQHVHQNELRTVTQWWKGLCGVIGPDYGRDRIVECYFWAFSMYYEEEHARARMILARLIMLSSLLDDTFDDRATLEECRELNKAIERWDESDDISLLPECIQKFFLEVMRNFAEFEDELEAHEKYRVAYARKAFQLLSKSYLQEVEWCHQGYTPSFDEHVNLSTASAGIQVLCVGMLVGMGDAATKEVFEWMIGSNNRVVRACAEVTRFMDDMADFKRGKNKTDVATTVECYMKEQNVTGEVAMDKIGSFVDDAWKTLNQAALVGDRALLPVVQRVAGLAMSMMVFFHGKVDRYTDSEHLKETLEDLFVNHVPLY

SEQ ID NO: 283787 - protein, 251 aa, Zea mays
  unsure (1)..(251): unsure at all Xaa locations
  Clone ID: MRT4577_21913C.1.pep
IHGLPYSRRDFCWCKQGTWLWIASSNKKSAKKNLPKGPAVSDKQRVVELKGEVARLFEDCNCKDVVERMNLVDVVQRLGIDHHFKEQIDTALKNIQGAEFNSSDLHEVSLRFRLLRQHGLWVPADQFDKFRRQEDGSFSSDIAEDPKGLLGLYNAASLLIHGEEVLEEALLFARRHLESXRGGGLHDSPYLSEQVGRSLKIPLPRTLKRLEAVSYIPEYSSADDTTYIHPEILELARLDLNLLQXVHQNEL

SEQ ID NO: 283788 - protein, 128 aa, Zea mays
  unsure (1)..(128): unsure at all Xaa locations
  Clone ID: MRT4577_21914C.1.pep
PTPTRTRVVKILYSXICHTRMYFWDAKGHTPVYPQIFGHQAKRIINSVVDGDTDLTYNDHVLPVFTVQCIETIHTASWLYINMCAPLXINTDXRTEMIADSNTQVXINYKPIYHFGNTYTLIEYTDMH

SEQ ID NO: 283789 - protein, 133 aa, Zea mays
  Clone ID: MRT4577_21915C.1.pep
RESGKELTSNALAIIEKASSVLVALHIPGFTHRRLLGNDEEGNMENQPKVKHSGSTFLGELKDDVTAADNRRLLNVDEEENMENEPKVQHSGSTFLGERDDDVPAADSRRLLSIEEDTPQWVNGPERPLLKGN

SEQ ID NO: 283790 - protein, 90 aa, Zea mays
  Clone ID: MRT4577_21916C.1.pep
KKKSFQNWVYFSSVIKKKKNSCSPGYRQVGNTHTHTHHLGREKKVPSRQFLAPKAFENGRGKKNRPLAFFKGKNLAKTFLNLAFICSLLN

SEQ ID NO: 283791 - protein, 126 aa, Zea mays
  unsure (1)..(126): unsure at all Xaa locations
  Clone ID: MRT4577_21917C.1.pep
CAEASVVSGAVEALLDLXRAISVRKLAPRLTEALLTTVRIREAKAAQNTVAPLFMYLLVPHTQSYQGRLLAALALGDLFQNKSLARSTDAVAVCPALVNLFEDXQPTDRRXKVVSXLCPCHNFIYC

SEQ ID NO: 283792 - protein, 58 aa, Zea mays
  Clone ID: MRT4577_21918C.1.pep
QSTYSSYTSGPRSSTYNGTEVEEPDDKDIYVNYYIDHSCFNTRYACLTRTYIQMLAHG

SEQ ID NO: 283793 - protein, 657 aa, Zea mays
  Clone ID: MRT4577_21919C.1.pep
MMNYVIFGVLLLVVGGGLRPSPAAADVFCDNLKQVAATLPQNTSSSPVQFATAIVGQAPDVVYALAFCQGDYSATACRECVAQAFNVTPACNKDGIFSYKACPVLYAGDNFIDPSNATEQADDTPFVRWNINNVTGDADDVRLITGLIRELLVDTVDRAASTAPRRFATGVMDSGRPFPTMYSMAQCTPDLSASDCLACLRRLVGMVNSTMALRMGAQIHVIRCYFRYEAYSLYDSQPMLRVGPPSVPAPAPAPAIGARRKSKLWVIPVVVVPLAVAAAAALCFIFYSPWFRRYRKGETTMAKAGSQELQGELVLDGKNSEFRVFDFEQVLEATNDFSDENKLGEGGFGAVYKGQFADGLEVAVKRLASHSGQGFTEFKNEVQLIAKLQHSNLVRLLGCCSQEEKKILVYEYLPNKSLDSFIFDENKRALLDWSRLLSIIEGIAHGLNYLHKHSRLRVIHRDLKPSNILLDREMNPKISDFGLAKIFSSNNIGGNTTRRVVGTYGYMAPEYASEGIFSVKSDVFSFGVLVLEIITGKRNSGSHQCGDFINLIGYAWQLWDDGRWIDLVDAYLVPMNHSAEMTKCIKIALLCVQENASDRPTMAEVVAMLSLSNDTAMIVAEPKQPAYFNVRVGNEEAYTTTESCSINDVTISVTTPR

SEQ ID NO: 283794 - protein, 84 aa, Zea mays
  Clone ID: MRT4577_2191C.1.pep
HSMTETHRRGILADALDVRNTVITIALILRNPTRDVSNCPVRDTTHACDPATSGHTSTSCDLRGTLRLCPMSSIGPMQGRLGCT

SEQ ID NO: 283795 - protein, 124 aa, Zea mays
  unsure (1)..(124): unsure at all Xaa locations
  Clone ID: MRT4577_21920C.1.pep
RLVSDKEALIRSTNSQLHDAKIMLADKQASVEKLEWEVKMSNKKVEDLQGDVSNMGFEISSLMAFFDKISENLSEXEIDKIEVDKIEQERITYGEALAAARENPDEEHLNIAAEARSRLQVLVL

SEQ ID NO: 283796 - protein, 304 aa, Zea mays
  Clone ID: MRT4577_21921C.1.pep
MHDRSHKPQPPEAGEGAGGGNVDRVLFKNLVEMVPLVESLMDRRVNSAYSRRTSLVYTPAPPKKASELESVKLPQSVSAKKRRDPGDVSKKSTPDSNGDNGLVVPLSLSGAENKPKDDVAGLREQVDYLQKKLLEKEEALRSAESLVTEMNAAYATIDELRRLVSDKEALIRSTNSQLHDAKIMLADKQASVEKLEWEVKMSNKKVEDLQGDVSNMGFEISSLMAFFDKISENLSGDSYDDTVPSSYELEAIQSTSEIDKIEVDKIEQERITYGEALAAARENPDEEHLNIAAEARSRLQVLVL

SEQ ID NO: 283797 - protein, 61 aa, Zea mays
  Clone ID: MRT4577_21922C.1.pep
GGYFLATKHVSYSLNKVAPWPFEKDNPCKGCGACSNAWMHYRHDDTLFDLAARDLELAHAS

SEQ ID NO: 283798 - protein, 362 aa, Zea mays
  Clone ID: MRT4577_21923C.1.pep
MKKMLYLYFRCRPSFSTFWFAAFPLHQLWISFLFPDITDERSKIDDHNSKFDLGVPDDLDVSIELRNWLFALEGTEEVGYLFSPRGGDGISREEKCWHSTFRNLHISGKSSDRLKLGGRRKVSPEKAFPVERFTAGIEGLQAIKPRLRDQCTKKGPSNNHEMGRDFNSSSSVGDHGVDVEATMVIGEDEIEGAKWTMDNVKFSVKEPIEAVATKEELEHLVMLCRSEADAMGRITAGILRLLKLDKSLGQGTIEQLRNLGSGGMDNIFSPRRLSRQNSFGSIGTPRTPTMQAIADVMGSKTTLEATISSLQGEISESKAKCMALISQASSTEDQNRAEDIRQLSEKLESMQSLVTRLRTLII

SEQ ID NO: 283799 - protein, 160 aa, Zea mays
  Clone ID: MRT4577_21924C.1.pep
ALQIEAVATKEELEHLVMLCRSEADAMGRITAGILRLLKLDKSLGQGTIEQLRNLGSGGMDNIFSPRRLSRQNSFGSIGTPRTPTMQAIADVMSSKTTLEATISSLQGEISESKAKCMALISQASSTEDQNRAEDIRQLSEKLESMQSLVTQLKNFDLTI

SEQ ID NO: 283800 - protein, 69 aa, Zea mays
  Clone ID: MRT4577_21925C.1.pep
RMEGAFVQGAHFSPYVGRGLATVRCQHCLQWKLPGSDNGGMDHIASRLGADIGTPKGKPGSFKDLALSQ

SEQ ID NO: 283801 - protein, 65 aa, Zea mays
  Clone ID: MRT4577_21926C.1.pep
ELCTPCAIDSLGKHMFKKRRHTMSIYIWAVCFAKTSAQVLWPSISFFATKATSFTSTRICSLTTL

SEQ ID NO: 283802 - protein, 152 aa, Zea mays
  Clone ID: MRT4577_21927C.1.pep
MMFTEGLDESAISWIKQGMDSPASAPAPAPPRSPLSERPPLGQVAAAPRSPALHARPCGAGAGVGFFSPNGLPQVRVNGTHHSGLLGRHSVLLSVADSDEWEDESVASWGMPEDCYGGGNFSETGDEACSSDSRLMRRAMDRCGGGWDEEVT

SEQ ID NO: 283803 - protein, 46 aa, Zea mays
  unsure (1)..(46): unsure at all Xaa locations
  Clone ID: MRT4577_21928C.1.pep
PPVXMARGFWDXATRRRGSGRESGXGGRXGGNANSLLSRXWVFLAA

SEQ ID NO: 283804 - protein, 79 aa, Zea mays
  unsure (1)..(79): unsure at all Xaa locations
  Clone ID: MRT4577_21929C.1.pep
PDVPRPLTYFYSVCHLNXSMVSLYSTMLLTGWTTSDIQSAKLVNVACPSAXVRIEIHCTTAGLFIWSLDAPVLFSDMEF

SEQ ID NO: 283805 - protein, 47 aa, Zea mays
  Clone ID: MRT4577_2192C.1.pep
NYPLDPSNQRTLAPITSYLTSTIAWVLVSMKTPNAVAAFLLSATLLA

SEQ ID NO: 283806 - protein, 127 aa, Zea mays
  Clone ID: MRT4577_21930C.1.pep
CHTVPPACFLYPVTAYITFYLLHLMSACGSILDFKSWAPSQSNMAQQAMTTPGVRSRTHYVHTEKLVALTESGETHAQHSAGANQLFDKRAEVSMLCICASKSLPCLGLRKKHNHGHICLLLEIAVR

SEQ ID NO: 283807 - protein, 196 aa, Zea mays
  Clone ID: MRT4577_21931C.1.pep
MRALEGQQLLEDDPSVVYLTAYLLTLNAQYDFLARHHRQMIARAEDGEKCNQPCGSKNPLHPTQFNPGELKIPRFLKVTRSLPEEKRRLGNLPEGAIVLEGIPVFPQAMDKQEHSESSQDPPSELFEPLTMKKILAPSLEIKEEAASTPPAPPPSEELQEPVPLEEEFDPVLPSQSPPEEVININSLLTHLGDVSD

SEQ ID NO: 283808 - protein, 121 aa, Zea mays
  unsure (1)..(121): unsure at all Xaa locations
  Clone ID: MRT4577_21932C.1.pep
HYKGRQAAGVERGTLDHDCFAXNARTALHGSIPRGGPWNNGNSYYIMRGTAPAGKVEGSSEAELETDWTRLGFAEVDYSWGPTAHVAPITNLDYIATRILARPWAHKHRARLITQCSTPDR

SEQ ID NO: 283809 - protein, 228 aa, Zea mays
  Clone ID: MRT4577_21933C.1.pep
MKMVFPKLLRACTVRLGIRSQPEYNGCEFVEHATEKCVVTVYIGSSPHHVEWSVTAARHRFKDTYQVVAHKALRALCQIYEEEVDDTPLRFFLPFQRVCPVWMATMRALEEQQLLEDDPKVMYLTAYLLTLDAQGAKKAWELPEGTIVLEGIPVFPQAMNKQEHPESSQNPSPELFEPLTMKKIPTPSREIKEEATSTPLAPPPSEELQEPVQLEEEFDPVLPSQSPP

SEQ ID NO: 283810 - protein, 92 aa, Zea mays
  Clone ID: MRT4577_21934C.1.pep
TIPLYRKEAPPWYYSALRQYILNHCNNRDTSATRIRPTYKSLGPSKYTDLAISYTQNLLNRGAITSSTYGTLLQADCLPLHLDKNPTKTLTR

SEQ ID NO: 283811 - protein, 283 aa, Zea mays
  Clone ID: MRT4577_21935C.1.pep
MAVLGALQRGCGGGSALQRGHACREHEGLGITNFRPDNFFSGKAGARLQSETSPGWVKRELMLMTSSSGDGGGRTGSNSSSSGTGSCSSSEGGGAGRGFIGNDFMTFQGSYTGLSYGGIHMELTVALLCIFCSGNHLTVGEQVCSEVHDCGVVLKQLLPFQCTHPGHPNGTISLKGQKESERGVGHFFFINLTQGPQCLASDDLTGVFESMPSNSDTPFHMVRTGSNVYSHDTLLCAMLDEFTTIILWLAPDSEADYACSQQLGETIFILAQVGLAVDLYLTS

SEQ ID NO: 283812 - protein, 534 aa, Zea mays
  Clone ID: MRT4577_21936C.1.pep
MEVQCQTSFCQNEDGFPKLLRACTVRLGIRSQPEYDGREFVEHGTEKCVMTVYIGSSPRHVEWSVTAAGHRFRDTYQVVARKALRALCQLYEEVANTPLRFFPPFQRDRPVWMARMRALEEQQLLEDDPTVAYLTAYLLTLDAQYDFLAQHHRQMIARAEDAEKLNRKLHVDLTTAQAHATALESHEVIAVEALKQAKDEHVQKLMEAYLVTHNQRRALRIQEPAPSNPVQPRRVEDPQILEGHPVSTRGEKKAWELPEGAIVLEGIPVSPKAMDKQEHPESSQDPLPELFEPLTMKKIPAPSREIKEEAASTPPAPPPSEELQETVPLEEEFNPVLPSQSPPEEVFSKNIDHKLELILTLCFHSHLNPSEEKSVLPKKIPGSLPLKPGISYRGTYPVAQSKGPTVRIKALPLSQTCSSSNSRRRSRNTLVMRYFKEFKSPRFKSSTLILFKWGSVPVKFLSWRKRRRPVASLWRTRSPKLISFWMRSGHPSSVDKAPEEQSRKESMWEFARERFVCWHRCFFNKLAAKQKLEA

SEQ ID NO: 283813 - protein, 124 aa, Zea mays
  Clone ID: MRT4577_21937C.1.pep
MGDVSLNGPVKAEPTAGGIAKGNRVLDTMSAGWTDERHMLYISSMEASFVDQLYNHGNHPHRVTRSRLRWATMSRVLRQAARALQCLMEGNGKLVREDPRFFMKAQRSLIKILLTMRLKLKQNR

SEQ ID NO: 283814 - protein, 46 aa, Zea mays
  unsure (1)..(46): unsure at all Xaa locations
  Clone ID: MRT4577_21938C.1.pep
LDMNPNADAGLYAAHHGEAVAQGHAHDQRAREKEGGRKQVSILXXE

SEQ ID NO: 283815 - protein, 96 aa, Zea mays
  Clone ID: MRT4577_21939C.1.pep
WLISNWGQVFYTPFLRQIWTWLGLVPATRKNFYCYLGAGYSCIVVPGGVREMLHMNNDSEVAFLKSRKGFVKIAIQSGCPLVPVFCFGQSYAYKWW

SEQ ID NO: 283816 - protein, 154 aa, Zea mays
  unsure (1)..(154): unsure at all Xaa locations
  Clone ID: MRT4577_2193C.1.pep
PFHVLLLPMSPRLDLDYIGLXPAAAAAADHDDLKGTELRLDLTGYGSPDRRDVAASATTLDLLPDKGAKCGFSDKAPTPSTGAGSGKGKTVAEEEDDKKVAGTPSPVXKAQEVGRPPMQSYRKNTMTTTQLKGSKEDAEVKQDQWVLYDKVSMD

SEQ ID NO: 283817 - protein, 359 aa, Zea mays
  Clone ID: MRT4577_21940C.1.pep
MEVRCQTSFCQNEDGFLKLLKACTVRLGIRSQPEYDGREFVEHGIEKCVVTVYIGSSPHHVEWSVTAAGHRFKDTCQVIARKALRALCQIYEEEVADTPLRFFPPFQRNRPVWMARMRALEGQLLLEDDPTVAYLTAYLLTLDAQYDFLARHHPQMIARAEDAEKLNRKLHVDLTSAQARVAALESREAIAVEALKQAKDEHVQKAYLVTHNQRRALRIQEPASSNPVQPIRAKDPQILEGHPVSIRGERKAWELPEGSIVLEGIPVFPQATDKQEHPKSSQDPPPELFEPLTMKKIPAPSRKIKEEPASTPPAPPPSEELQEPVPLEEEFNPVLPSQSPPEEVINISSLLTHSGDVSD

SEQ ID NO: 283818 - protein, 195 aa, Zea mays
  Clone ID: MRT4577_21941C.1.pep
MGDVSLNGPVKAEPTAGGIAKGNRVLDTMSAGWTDERHMLYISSMEASFVDQLYNHGNHPHDANGAGFKVLRRGVWEYIEYEKTSAPVRSGAKCCVPANPWIRHFRPRDCGSNAQSDAVEASVGDHESGTQASRKSPSVSHGRERGACKGEPQILHESTEVSDQNFADDEAEAETESMKACKKRRLSRALRSGAE

SEQ ID NO: 283819 - protein, 154 aa, Zea mays
  Clone ID: MRT4577_21942C.1.pep
MEAYLVTHNQRRALRIQEPASSNPLQPMRAEDPQILEGRPVSIRGEMKTWELPEGAIVLEGIPVFPQAMNKQEHPESSQDPRPKLFEPLTMKKIPAPSLEVKEEAASTPPALPPSEELQELVPLEEEFDPVLPSQSPPEEVINISSLLTHPRDV

SEQ ID NO: 283820 - protein, 184 aa, Zea mays
  unsure (1)..(184): unsure at all Xaa locations
  Clone ID: MRT4577_21943C.1.pep
AIHTKLPCTTVAALASQILACLIAKDYLNYWIHTMLNGEWGNQNVHTVHHDFTAPIGITTAYAHXTEVLILGIPSFVTTTIAAXHISHLCLWIIXLRRLQAIXETHRXCDLPFTQTNYIAFYGGARYHDYHHYXGRQSQXSNLHLLLTYCDYSYGTDTRYXFSKTYLSKLTDLRHNDSQKGNCS

SEQ ID NO: 283821 - protein, 81 aa, Zea mays
  unsure (1)..(81): unsure at all Xaa locations
  Clone ID: MRT4577_21944C.1.pep
LSRXRLPWLPFCRGGLXSRSFVFRSGCGRCRXRXFRRWGGRSRGSCAXSRLGPRLGXXXCPARAAGRRXSALLLVXFWGFL

SEQ ID NO: 283822 - protein, 339 aa, Zea mays
  Clone ID: MRT4577_21945C.1.pep
MEVQCQTSFCQNEDGFPKLLRACTVRLGIRSQPEYDGREFIEHGTEKCVVTVYIGSSPHHVEWSVTAAGHRFKDTCQVVARKALRALCQIYEEEVADTTLRFFPPFQRDRPVWMARMRALEGQQLLEDDPTVVYLTAYLLTLDAQYDFLARHHPQARATTLESREVIAVEALKQAKDEHVQKLMEAYLVTHNQRRAVRIQEPAPSNPIQPMRAEDPQILEGHPVSIRGEKKAWELPEGAIVLEGIPVFPQAMDKQEHPESSQDPPPELFEPLTMKKIPAPSREIKEEDASTPPAPPPSEELQEPAPIEEEFDPVLPSQSPPEEVINISSLLTHPGDISD

SEQ ID NO: 283823 - protein, 158 aa, Zea mays
  Clone ID: MRT4577_21946C.1.pep
LPYRALGRGKKKKKKKKKKKKKNKKKKKKKKKKKILKKKKKKKKKMFVLPRGAFGFFLPLSCFWGGGVFWGAPGVFVFLSCPSCQVPGGGGLTGKTPPGLKLFFCFHCRKNWHRGLISPVFNPGPPRKFFVLPLMGFGSRPKPRFLGVGLNPFFRLLK

SEQ ID NO: 283824 - protein, 339 aa, Zea mays
  Clone ID: MRT4577_21947C.1.pep
MEVQCQTSFCQNEDGFPKLLRACTVRLGIRSQPKYYGHEFIEHGTEKCVVTVYIGSSPHHVEWSVTAAGHRFKDTCQVVARKALRALCQIYEEEVADTPLRFFPPFQRDRPVWMARMRALEGKQLLEDDPTVMIARAEDEEKHNRKLHVDLTTAQARVAALESREVIAVEALKQAKDEHVQKLMEAYLVTHNQRRALRIQEPAPSNPVQPRRAEDPQILEGHPVSIRGEKKAWELPEGAIVLEGILVSPKAMDKQEYPESSQDPPLEMFEPLTMKKIPAPSLEVKEEAASTPPAPPPSEELQELVPLEEEFDPILPSQSPPEEVINISSLLTHPGDVSD

SEQ ID NO: 283825 - protein, 114 aa, Zea mays
  Clone ID: MRT4577_21948C.1.pep
YVRLSCDRVSEFPWSCPLRPRDACGVTAWRWVSPSQCSCVVPFTSDYLAHPTVVHSRWYYALVPSRCRPSNDAVDASTLLHYINVFDAVVDVAYVWHCVPRCRQRAGDVLRRPG

SEQ ID NO: 283826 - protein, 205 aa, Zea mays
  unsure (1)..(205): unsure at all Xaa locations
  Clone ID: MRT4577_21949C.1.pep
RGSSGHLRFLSIRGCXHIYCLPSCLGNLRHLQTLDGRGTSIGSFPSAITKLQKLEQLLVSDDDSEKRERHRKFLMLLHLSEGCSAVLLKGIDSVIPDIKDDQIDEMSDGSMRKNNCCTSLLYHTRMRLTRVLLCLALCPFYWRPQALDEGLNRRDVFNIHSAMVRFTFVTVEVPRGIRKLKALHTLGVFDGARSNTVLKELQELT

SEQ ID NO: 283827 - protein, 150 aa, Zea mays
  Clone ID: MRT4577_2194C.1.pep
SAGARPVFVTRAGRGRCRGDPDGSPAARREPEEASGAALLCWGLGGWRESRALAEEAERGTKSWASRGRPVVFSYAAPSLFTPPHTSQLLHSSSSSSSSSTPLSLSLSLSSRREPPQHTVPLSLSLSLSVSPEAATKLLGSALTLRDPAG

SEQ ID NO: 283828 - protein, 123 aa, Zea mays
  Clone ID: MRT4577_21950C.1.pep
MILEVNQIFFRGVNRTSKILAGSIVLEGIPVFPQAMDNQEHPESSQDPPPELFEPLTMKKITAPSLEVKEEVASTPPAPPPSEELQEPVQLEEEFDPVLPSQSPPEEVINISSLLTHPGDVSD

SEQ ID NO: 283829 - protein, 115 aa, Zea mays
  Clone ID: MRT4577_21951C.1.pep
SVAGVPTIVDSIFGGQLSSTVSSTECSHSSVKHDQFLDLSLPVPSRRPPTKSVSSPPVKRTKQSIRDRNKNRRYGKVPARASPSVESNKEQVQSIAERNSQIPGSELEQVVSKRC

SEQ ID NO: 283830 - protein, 110 aa, Zea mays
  Clone ID: MRT4577_21952C.1.pep
LFVFLLEPAKMFVQKFPADSPVMVFMGRAGAHSSRWSPSSLPLKEDFRPRVNPEPILGPNRKLSMGDVVEITPALPSRSLNGVREKIQRMFARGGFGLSAQGGGLRRCCQ

SEQ ID NO: 283831 - protein, 184 aa, Zea mays
  Clone ID: MRT4577_21953C.1.pep
NKTGERLKKIKLLGGKQKGKGPGKFPLVPLVKGGKKKEKTPPPFRKGLPRPKKTKKGAPREGKGVSQTWDRFRARQKKKRPGFCRPEIFYWARGNRPPPQKKPGGVGKKWARERPPLAPQKKFGPPPKVGLPRGLKKGPFWGGRVFIWVKKRGFKGGKPLLKSGFSGGTFFGLSPFKIRFFPPR

SEQ ID NO: 283832 - protein, 55 aa, Zea mays
  Clone ID: MRT4577_21954C.1.pep
KKRSFARVELQNAMGEGLFVPWVKPPRHQSSRESVGVGKSAINVATKKGGSLGIR

SEQ ID NO: 283833 - protein, 61 aa, Zea mays
  Clone ID: MRT4577_21955C.1.pep
DLLYNGGIGTYVKAARDTHLQVGDRANDAVRVNGAELRCKVVGEGGNLGCTQFGRIEFAQR

SEQ ID NO: 283834 - protein, 1079 aa, Zea mays
  Clone ID: MRT4577_21956C.1.pep
AVVTTQSARDDASKLAGQLVAESKAAKRIGFIGLGAMGFGMASHLLKSGFCVVAYDVYKPTMARFADLGGSTKGSPEEIAKDVEILIIMVANESQADSVLFGNAGAVPVLSAGTSVILSSTVSPGFVIHLNRRLEAECRQIKLVDAPVSGGVKRAADGTLHELVKGCDEALHCTGSVLSALSEKLYVIKGGCGAASSVKMVNQLLAGVHIASAAEAMSFAARLNLRTRRVFEIMQHARGYSWMFGNRVPHMLDNDYTPYSAVDIFVKDLGIVSCESSNSRIPVHVSSIAHQLFISGSASGWGRYDDAAVVKVYETLTGVKVEGKAPMLSKEDVLQSLPSEWPEDPIDNLVPIASHSSKKFLVVLDDDPTGTQTVHDIEVLTEWPVEALVEQFLKLPTCFFILTNSRSMTADKAMLLVQTICKNLKAAAEKVPGVSYTIVLRGDSTLRGHFPEEADAAVSVLGEMDAWIICPFFLQGGRYTINDIHYVADSDRLIPAGETEFAKDAVFGYKSSNLRQWVEEKTKGRVLENQVSTISITLLRKQGPTAVCEHLCSLEKGSVCIVNAASDRDMAVFASGMIQAELKGKRFLCRTAASFVSARIGIKPKPPICPNDLGLKRALTGGLIIVGSYVPKTTKQVDELRSQFGQSLRVIEVSVEMVSMKSMEDRDQEIRRIVELGNAYIQSRKDTLILTSRQLITGKTPEESLEINYKVSSALVEIVRRIDSKPHYIIAKGGITSSDIATKALEAKRAKVMGQALAGVPLWQLGPESRFPGVPYIVFPGNVGDNSALAKVVKSWASPSRSSTKEILLNAEKGGYAVGAFNVYNLEGIEAVVAAAEAEKSPAILQIHPSALKQGGVPLVACCIAAAEQSSVPISVHYDHGISKSDLLQALEAGFDSVMVDGSHLTLGDNILYTKSISSLAHAKGLLVEAELGRLSGSEDGMTVEEYEARFTDVAQAEEFIDETSIDALAVCIGNVHGKYPPSGPNLKFDLLKDLRALTLKKGVSLVLHGASGLSHELVKECIDLGVRKFNVNTEVRNSYLASLRKPEKDLIQVMASAKEAMKAVVAEKLRLFGSCGKA

SEQ ID NO: 283835 - protein, 103 aa, Zea mays
  Clone ID: MRT4577_21957C.1.pep
IPFGPPLLLLIKPLLFSFFPSYLFFPFPSALSPTPFPLFPFFFPPFSFFFPQSFNFCPLLSFPFYFFTAPFPPKIFFIFIFSPSGPFSLLNLFLPLFFLFPLF

SEQ ID NO: 283836 - protein, 104 aa, Zea mays
  unsure (1)..(104): unsure at all Xaa locations
  Clone ID: MRT4577_21958C.1.pep
DTSFNSPEGFRMRTTKTEHVSGPSCDQTIXDQQEIRAENREKPSHAAGDSTAIMGCTVNGAEKMAEDDLGDAGGAAGKIGLNVGGTGVQRAITWXRCNDALIHL

SEQ ID NO: 283837 - protein, 62 aa, Zea mays
  unsure (1)..(62): unsure at all Xaa locations
  Clone ID: MRT4577_21959C.1.pep
LPTXVRKKKKREKKKKKKKKKKKKKKKKKKKKKKKKKKKGGSVFGGPGFKGLLVFRCLWVVF

SEQ ID NO: 283838 - protein, 124 aa, Zea mays
  Clone ID: MRT4577_2195C.1.pep
MASLSSAADTAPSFAAPTPTRAVPRRRTFTVHASLRKATGTAAVRMAASALLAGDAMSQEVLLGAGDRVPRPSQPRTVSHCQGSLHANHNSMKQRTGLPRTTVNHYDINTEGCTQRMSHTSIYI

SEQ ID NO: 283839 - protein, 45 aa, Zea mays
  Clone ID: MRT4577_21960C.1.pep
AKVALRGVRAKRVIIKQYVFILPKKFNYFFFFFFFISIFLFFFFF

SEQ ID NO: 283840 - protein, 93 aa, Zea mays
  unsure (1)..(93): unsure at all Xaa locations
  Clone ID: MRT4577_21961C.1.pep
PARXSITARLHIGTNTHSCSILTRSEQVYDPGNTGACCSCSQAQLCQRRRRVCESILLQLAAVLGTAPVVKSAEQVTVRVAPSRGYAMDRTGR

SEQ ID NO: 283841 - protein, 155 aa, Zea mays
  Clone ID: MRT4577_21962C.1.pep
MAANLEDVPSVDLITEVLRRAKCSSKPDKRIILVGPPGSGKGTQSPLIKDEYCLCHLATGDMLRAAVAAKTPLGIKAKEAMNKGELVSDDLVVGIIDEAMKKPSCQKGFILDGFPRTVVQAQKLDDMLAKQGAKVDKVLNFAIDDAILEERITGR

SEQ ID NO: 283842 - protein, 106 aa, Zea mays
  Clone ID: MRT4577_21963C.1.pep
MSSPDIVSILDNSKELDRVRKEQEDILSEINKLHKKLQATPEVVEKPGDNSLARLKFLYTQAKELSESEASISNLLINQIDALLPTGPQGQTRRRIGKGNEQKRKR

SEQ ID NO: 283843 - protein, 130 aa, Zea mays
  Clone ID: MRT4577_21964C.1.pep
AFRAFLLKPSMGPPVPEAKARATRDQLAGSRVKFFNRRIPPSGPGIMFFSGGHSEVEATQNLNALNKGPNRGNVSFSYARALKKTCLKTWGGQPTRVKAAQNPLLLPARANSLAQFGRSTSNGKAARAKE

SEQ ID NO: 283844 - protein, 125 aa, Zea mays
  unsure (1)..(125): unsure at all Xaa locations
  Clone ID: MRT4577_21965C.1.pep
YTKLGRGSVQXTAVPIEXIVLPXMLRLMDFRPILLAVRCRIKDICLRMRARGVGMTTEIYSIRQDACNGLADYYQKXYVHKADKHEMRGIFSRYERTLLFLDYMGCEHKKFGGGCVCARCHNPTV

SEQ ID NO: 283845 - protein, 52 aa, Zea mays
  Clone ID: MRT4577_21966C.1.pep
TLLLKQLARDLCISERRILYRIQYILRRRLRDMRGGELRALSLFNGLRKLFK

SEQ ID NO: 283846 - protein, 108 aa, Zea mays
  unsure (1)..(108): unsure at all Xaa locations
  Clone ID: MRT4577_21967C.1.pep
NLIAMTKMLMNXNDSLNNQVSRLXYXNGYMPQQINNHLGVSXDTISESVVPSGKPHLXQSPLGPCPQRDVNNPAGQLXIDEQPLTEFLSKATGTAVDWVLMVGMGFPP

SEQ ID NO: 283847 - protein, 205 aa, Zea mays
  unsure (1)..(205): unsure at all Xaa locations
  Clone ID: MRT4577_21968C.1.pep
MDQAAAMSPSPRAAAAAAGIHWEAHGRLLTACLVVLNVLLVLLVYAYFWRFFSRSRXAAAAAAAAARXDDSADGASASSEASSPPASPKARDRREVQLAITALPVFVHSSSGXASASAXAAECAICIAEFADGDQGRLLPRCRHRFHARCVDTWFRSHTTCPLCRATVLADAAPAPAETANQNQPPHHLHTDTPNGTDSSTESPV

SEQ ID NO: 283848 - protein, 70 aa, Zea mays
  Clone ID: MRT4577_21969C.1.pep
QETHCTAFISQFAAIYKNTTGVKTVLKHYKFKNDVFSSDNSGLVWTQSAGKFTLKLTEGTRALFFWDGND

SEQ ID NO: 283849 - protein, 107 aa, Zea mays
  unsure (1)..(107): unsure at all Xaa locations
  Clone ID: MRT4577_2196C.1.pep
THAGRGKLSAEATRETGGGRTRPPXXPDGPXRTNPNKKRXDXEXXTXXKXAKKERGGGRXXXADQXXXAPTXDXXXXDNXXDTQXXGQNSNGTPPQNXTXXXDTGST

SEQ ID NO: 283850 - protein, 77 aa, Zea mays
  Clone ID: MRT4577_21970C.1.pep
WLLLCLVTQFCSEKKKKKKKKKKKKKKKKKTQKNPQKKKKNPPKRQKNAHKKKHKNKNKTQQKKSPPNPPSTQHTIP

SEQ ID NO: 283851 - protein, 515 aa, Zea mays
  Clone ID: MRT4577_21971C.1.pep
QKMLFFDRHKVGELTGLLTSDLGSLKSVVSDNISRDRGLRALSEIIGTLCILFTLSTELAPVLGLLMVSVSVLVAIFKRSTVPTFKSYGIVQARISDCASETFSAIRTVRSFGGEKRQISLFDNLAHAYQNNGTKLGVLKSANESLTRVVVYVSLMALYILGGRKVNAGKLSVGTMVSFIGYTFTLTFAVQGAVNTLGDLRGTLASVERINSILSAKDIDDSLAYGLAKELDGKEFDDSNGVYENGSVNKHFMSELKSSSSCSNLAWSGDIRLKEVHFSYPLRSNVEILNGLDLTIECGKVTALVGPSGAGKSTVVQLLARYYEPTQGSITVAGEDIRVFDKREWSRVVSLVNQDPVLFSVSVGENIAYGLPDDVVSKDEIIKAAKAANAHEFIISLPQGYDTLVGERGSLLSGGQRQRIAIARALLKNAPILILDEATSALDATSERLVQEALNHLMKGRTSLVIAHRLSTVQNAHRIAVCSEGRITELGTHRELVAKGGSYASLVGTQRLAFE

SEQ ID NO: 283852 - protein, 123 aa, Zea mays
  Clone ID: MRT4577_21972C.1.pep
KKISQKPAFFFPGAFQGDFQIPGGAPKIQGAPPLTGSPNWVSGPLVFFSFLEGPLGPGGFNFFPAPNPQIGNFLAPGPPKGEFFLFFFFPKNFSPPKGGPLKLFLFKFSKRAIFIFRGALCFC

SEQ ID NO: 283853 - protein, 148 aa, Zea mays
  Clone ID: MRT4577_21973C.1.pep
NAKQVQANLCTCLINITIDKQVHSCRNHTYKTIADQHLTQCCINTTSSQQLERYDTESANDFVDLNCIDDNKDPIHCQPLASKEIVNLSDTMIQLQSLNGHSSQKTQKMPPCFLHSIVIYHALVQGVESQMSGLVKDLDPHDPPRHDE

SEQ ID NO: 283854 - protein, 66 aa, Zea mays
  Clone ID: MRT4577_21974C.1.pep
SCPFCNPGGSVESPIPMKILIGEAFFRFCRENFSPPVNAPPGPFVLYSEWIYECGGVPPFKGANYG

SEQ ID NO: 283855 - protein, 84 aa, Zea mays
  Clone ID: MRT4577_21975C.1.pep
MALSSRQLAAALVAVLVALAFLTACASAARPAPAASGGGGGEEEEATATTTPAYLRQVYPAVVETVEMLLARLPAGPSPKGPGH

SEQ ID NO: 283856 - protein, 77 aa, Zea mays
  Clone ID: MRT4577_21976C.1.pep
MAPPGSRRWAYVRIMAGTILGGGLGFYVMHRIETSYKVRMEERLRRYEAHTLAKEKEAQQLQDEGRREDQAQVLPDS

SEQ ID NO: 283857 - protein, 224 aa, Zea mays
  unsure (1)..(224): unsure at all Xaa locations
  Clone ID: MRT4577_21977C.1.pep
MNGTGGSHHQQQHRLRQQQQQQALLMQQALQQQQQQHQYQSGVLAAAAAAAMTQMEPISNGNLPPGFDPSTCRSVYVGNVNPNVTESLLIEVFQSAGLVERCKLIRKEKSSFGFVDYYDRRSAALAIMTLHGRHIYGQAIKVNWAYASTQREDTSGHFHIFVGDLSSEVNDATLYACFSAYPSCSDARVMWDNKTGRSRGYGFVSFRNXQEAETAITEMTGKWL

SEQ ID NO: 283858 - protein, 153 aa, Zea mays
  Clone ID: MRT4577_21978C.1.pep
MENAPTSHAHGVSLDLRLDPSPLHRSAAVPVPAPPFAADHRPGEAFACNYCHRKFCSSQALGGHQNAHKLERTLAKRSRDILAAPPPSSPPPPAPAVAFHAAAPESNRRSGLVPTAYYGATRLAREEDAMAQQAAPPGFAMGWGADTAALELQ

SEQ ID NO: 283859 - protein, 183 aa, Zea mays
  Clone ID: MRT4577_21979C.1.pep
MNGAGGSHHQQQQRLRQQQQQALLMQQALQQQQQQQQQYQSGVLAAAAAAAMTQMEPVSNGNLPPGFDPSTCRSVYVGNVNPNVTESLLIEVFQSAGLVERCKLIRKEKSSFGFVDYYDRRSAALAIMTLHGRHVYGQAIKVNWAYASTQREDTSGEIFFLKKYILVVSFFSYYNPCLVNRAN

SEQ ID NO: 283860 - protein, 263 aa, Zea mays
  Clone ID: MRT4577_2197C.1.pep
MAPAPEPTAAAAGRKRKKPHGPSKIIAKKSADPKRAYAKKKKEKHKQKEKKSRLKPAEPDQIAATIGDGGAGATVLLSALMQPSRQLEFLLRSFERASKMRLSPLELDSYSEGCMVQLAEGAAQDVESFGDHVKGVFGSSWKEELCEGNHIDGEIAVGSPTLLVISSSALRSLDLLRGLKMFTKECRPVKLFAKHLKVEEQVAMLNARVNIACGTPSRIKKLIDMEALSFSRLKLVVLDMPEGNDNQKVPFTLFTNFNHKVKQ

SEQ ID NO: 283861 - protein, 448 aa, Zea mays
  Clone ID: MRT4577_21980C.1.pep
MNGAGGSHHQQQQRLRQQQQQALLMQQALQQQQQQQQYQSGVLAAAAAAAMTQMEPVSNGNLPPGFDPSTCRSVYVGNVNPNVTESLLIEVFQSAGLVERCKLIRKEKSSFGFVDYYDRRSAALAIMTLHGRHIYGQAIKVNWAYASTQREDTSGHFHIFVGDLSSEVNDATLYACFSAYPSCSDARVMWDNKTGRSRGYGFVSFRNQQEAETAITEMTGKWLGSRQIRCNWATKTNSEEKPETDNHNAVVLTNGSSTNSATDASQDAGSKENPENNPDCTTVYVGNLGHEVNRDELHRHFYNLGVGAIEEIRVQQDKGFGFVRYSTHGEAALAIQMANGLVVRGKSIKCSWGNKPTPPGTTSKPLPPPVASYQPAVAMSGVPQGFTAAELLAYQRQLALSQAAAGQIAGQHGLAGQVSAGLLAAAGSQALYDGYPNQSSAQQLMYYN

SEQ ID NO: 283862 - protein, 99 aa, Zea mays
  Clone ID: MRT4577_21981C.1.pep
MDTSTHRSALCLAFVAASAVQDELDMGTLPYLLLVVLSLVPRAAAYSEYSCNGTTGNFTAHRAFEANLARLVAALPANASSSPSLFASSAARRGSGHGL

SEQ ID NO: 283863 - protein, 529 aa, Zea mays
  Clone ID: MRT4577_21982C.1.pep
MKFEYELAFPSALQLLTCAICLLVQKKHPKNHLLFLRSPARSPTRIRSRTHRSALRSPPIRGSIRARARSAPGSDLVAASPEEMNGAGGSHHHQQQRLRQQQQQALLMQQALLQQQQQQYQSGVLAAAAAAAMTQMEPVSNGNLPPGFDPSTCRSVYVGNVNPNVTESLLIEVFQSAGLVERCKLIRKEKSSFGFVDYYDRRSAALAIMTLHGRHVYGQAIKVNWAYASTQREDTSGHFHIFVGDLSSEVNDATLYACFSAYPSCSDARVMWDNKTGRSRGYGFVSFRNQQEAETAITEMTGKWLGSRQIRCNWATKNNSEEKPETDNHNAVVLTNGSSNNSATDASQDAGSKEPPQNNPDCTTVYVGNLGHEVNRDELHRHFYNLGVGAIEEVRVQQDKGFGFVRYSTHGEAALAIQMSNGSVVRGKPIKCSWGVKPTPPGTGSKPLPPPAATYQPAVAMPGVPQGFTTAELLAYQRQLALSQAAAGQQHAGLAGQVSAAGLLAAAGSQALYDGYPNQSSAQQLMYYN

SEQ ID NO: 283864 - protein, 70 aa, Zea mays
  unsure (1)..(70): unsure at all Xaa locations
  Clone ID: MRT4577_21983C.1.pep
GVYSSDMSDLTAMYVSQAVMDVEXGPDGGVPWWLKKNXEGEXWGVEGSFNMRMGFHMCGVEGCASFPGAA

SEQ ID NO: 283865 - protein, 91 aa, Zea mays
  unsure (1)..(91): unsure at all Xaa locations
  Clone ID: MRT4577_21984C.1.pep
VKDFNRWTFDGVQVNDIWVNDYLFVTDENDATLLPHFGERYSMMRVPMAQCTIVXRLTNSVMMHGRNNGKNVMVDRIMKHTLEIIHLLTDA

SEQ ID NO: 283866 - protein, 90 aa, Zea mays
  Clone ID: MRT4577_21985C.1.pep
EEAASRARPSGPTTARRHPEHRPRPPAQPKHPPRQRQRTGPPGAGHPAPKGGTAAPARSGRPAEDRRSPEAPRQQRWSVLSSPPAPSCRI

SEQ ID NO: 283867 - protein, 113 aa, Zea mays
  Clone ID: MRT4577_21986C.1.pep
LRVLLPEGAVASTYCRRLAGLLTPRGGWPRPVHGCVARDAWYAVLALFSAGGLSVPFGWVVVLVLRPVTVFLHPGFWLPRFVLCPPFFPPGPPLRVVSHTKKGGFFFFLGRPL

SEQ ID NO: 283868 - protein, 60 aa, Zea mays
  Clone ID: MRT4577_21987C.1.pep
KKPYPPLPGPFLRKRVPPRLAQLKFNFSPPLRFIFPNLFWCPPQPFLAKYGPNLKGKIKT

SEQ ID NO: 283869 - protein, 138 aa, Zea mays
  unsure (1)..(138): unsure at all Xaa locations
  Clone ID: MRT4577_21988C.1.pep
XPXKFXWAXPKXKKHALLWXXYSKXNIRXAWXXRXDIRXXKXXWHVXPSCPXXSKXWGXXCPLRXNIPAXXIPGFAEGRXXXHKXGGXSCXXSRXXMQXQYRPSGQVXNPQFPGPPLXXNXXKXDXXQAXXLVGRPWP

SEQ ID NO: 283870 - protein, 114 aa, Zea mays
  unsure (1)..(114): unsure at all Xaa locations
  Clone ID: MRT4577_21989C.1.pep
KKKTKSPWFFVPPSFTNRGSRLPASDKFTICTQKPPNKNRATGGGQPTGEVAGPPPTLRGTCQAPPHGGMVHGVVERLPLGHSRPEVPGLFLRNYPHELASRGLFLRPXRGRGR

SEQ ID NO: 283871 - protein, 144 aa, Zea mays
  unsure (1)..(144): unsure at all Xaa locations
  Clone ID: MRT4577_2198C.1.pep
PPPKNFSPPPPNFFFSPHFFPPSPFFFPPPILLNPPPKXLFPPLFKPPYPPPXFLFPKNPPKNFKKPPXPXLFSPPFFFSSFLKKKFFLFFFFFFFFPPLFFFFFFFFFFFFFFFFFYKQFSKRMHRKFLIFQHHQKSAPKRLN

SEQ ID NO: 283872 - protein, 139 aa, Zea mays
  Clone ID: MRT4577_21990C.1.pep
TWAELLPLSRLLVVPAHLCRFGGPLCAPFACYPGSVGCGALLFPAPGPSMISSFSRPRRPLFPASRCSFFPGPRFHWGFVEYGHRGFWARFGGGAGGVPPPPPCVGPCWAWGGLADGLRVQAVSKNRKKTDLKKKKIRM

SEQ ID NO: 283873 - protein, 319 aa, Zea mays
  unsure (1)..(319): unsure at all Xaa locations
  Clone ID: MRT4577_21991C.1.pep
LCSYCSXPLPSLHYESQKEADIALCSDCFHDARFVPGHSSLDFQRVDGTKDGSDNDGDSWTHEETLLLLEGLEKYNDNWNAIAEHVGTKSKAQCIHHFIRIPVEDGLLESIEVPEASVSSRVQSNGFSYSNSNGGISGSVPQSSQPGQQLPFVNSANPVMSLVAFLASAVGPRIAASCANAALSVLTRDDSRMCSEGNDVMGQAARPNYDASSSVSPENVKYAAMCGLSAAATKCKLFADQEEREIQRLAATIINHQLKRLELKLKQFAEVETLLLKESEQVERARQNXTAQRVRXMSARLLSSGVPPGAAAAPWHQIQ

SEQ ID NO: 283874 - protein, 196 aa, Zea mays
  Clone ID: MRT4577_21992C.1.pep
MAFASSLLPVPPSRVCATPASEVAAFSPAKKSVSLAAARQRRGSRHGVRAEVNESGSVLAVDALSQVKHVLLPVLDRNPYLSEGTRQAAATTASLAKKYGADITVVVIDDKPKESVPEHDTQMSSIRWHLSEGGFSEFRLMERLGEGQKPTVIIGEVADEWDLDLVVLSMEAIHSKHVDGNLLAEFIPCPVLLLPL

SEQ ID NO: 283875 - protein, 64 aa, Zea mays
  Clone ID: MRT4577_21993C.1.pep
VTYRTRLALRARTQFTATCMSPIKAFWSTKFVFLGAHRHHISTFDGGLTPRKALYTTVLVPALT

SEQ ID NO: 283876 - protein, 64 aa, Zea mays
  Clone ID: MRT4577_21994C.1.pep
LGGGLQSSILRPWRLGCPRTLYVYNLPSMMELDQTHYYWTTLRTLLSRLQAPHPSNRHWGVSIL

SEQ ID NO: 283877 - protein, 96 aa, Zea mays
  unsure (1)..(96): unsure at all Xaa locations
  Clone ID: MRT4577_21995C.1.pep
HKHPEQDGEVEPGQPDRTITNAGHPPSNPEPPPDTGNNTLWHAPAWHKAHGAXEXGPTXDAEKRSGDLSLSSLARCVGEEEERRSLPTSCVVYLCV

SEQ ID NO: 283878 - protein, 107 aa, Zea mays
  Clone ID: MRT4577_21996C.1.pep
SSRSCSLLTPTGLPPQHLGYHSRAASTSFILVVFCHDLGQVPQAPAPPASLLRLHGVLPPGAGPHRGLRLAGGVPGDAPLKSFPLPAGVCSCAGPSLWATRLMTSLA

SEQ ID NO: 283879 - protein, 83 aa, Zea mays
  Clone ID: MRT4577_21997C.1.pep
HRLAGDGMLGFRSPGQLHGERTPLIWWRLIKGGLLHSCKADSPQGRSRPKLIRAHCSGCCIALPCDRCKPGSSERHYDFDCQI

SEQ ID NO: 283880 - protein, 76 aa, Zea mays
  unsure (1)..(76): unsure at all Xaa locations
  Clone ID: MRT4577_21998C.1.pep
FKHAGHGFLGFLSRKGFSRHRGKGKXFPXDDPKKPWHFTCFLGYQGWMTYNGREGVKPGSKLHKKETCEGGTILKP

SEQ ID NO: 283881 - protein, 213 aa, Zea mays
  unsure (1)..(213): unsure at all Xaa locations
  Clone ID: MRT4577_21999C.1.pep
RSPHRVGHDQSTVRSVLWVPLRQRQPALRRACRQRRHSSTRAAPAAGAARRXRVVHXYGTPTRAPPRRHAPAGQQSPARAAPEGRAHTTRRAAGARRSTSPPSRRRPAPPGARRRRPYPARKTPRGPAGPRRRSRPSRRSPRPPAPRRRPRRASPPGGYCPLGRPSSRSSRPKRRRTHTHRKIINSQFQEPRTTSREKEKERSFSSVLSEENL

SEQ ID NO: 283882 - protein, 92 aa, Zea mays
  Clone ID: MRT4577_2199C.1.pep
KTIRGYGGSGRKGGNPLIGGTNPEKNGYGTAPRPRPNKLKSSKGAPPQAKSKTHKLVAVAFGAKMGGKKILSLVAGFRFGGRPRKNREILFD

SEQ ID NO: 283883 - protein, 109 aa, Zea mays
  unsure (1)..(109): unsure at all Xaa locations
  Clone ID: MRT4577_219C.1.pep
MRECISIHICQAGIQVGNACWELYXLEHGIHADGQMHGDKTIGGGDDAYNTFFSETGAGKHVPRADYVDLEPTVIDEVRTGTXRQLCHPEQFISGKEDAANNFASGHYT

SEQ ID NO: 283884 - protein, 279 aa, Zea mays
  unsure (1)..(279): unsure at all Xaa locations
  Clone ID: MRT4577_21C.1.pep
MLGFLYSVFDVSGHEGDPAPLLVSTSKFRARIPDFASTDQDFDLVVWDCRHGRVLLGDADLSSRLLVVWDPMTGCTRQLDGPDDIGKIAVLCAVSGCDHRSCHAGPFKLVCVAVDDSVDGEHVARVCVSSPDMGDSDEWKEQCPGLDVAADAFIYDIPAVLLHDALHFILGYYDDNRVGILKYSLASDSLSLIDVPFAARADILMAMKDGSLGIAHVDSRLTLYVWSRQIDSNGVASWTHXRVVDLKNNIPIKNPKRIPSLIGSVEGSDIIFVNTGHCV

SEQ ID NO: 283885 - protein, 182 aa, Zea mays
  Clone ID: MRT4577_22000C.1.pep
MASRSSSAEGAGRTLPVNLKLITVLSIDGGGIRGIIPATILAFLEAKLQELDGPDARIADYFDVVAGTSTGGLLTAMLTAPDTNERPLFAAKDLARFYIQHSPKIFRQKNAMGSKLVGKLRMACGPKYDGKYLHAQLRRLLGNMRLDRTLTNVVIPTFDIAYMQPMIFSSFEVAEDFKCYPW

SEQ ID NO: 283886 - protein, 71 aa, Zea mays
  Clone ID: MRT4577_22001C.1.pep
RGISKQRDVAQPACLKLGVKIYLRYWVRPKGGRICSMSSFHKQACVARVVSQQGEQQEGCSSPIIDIHNMW

SEQ ID NO: 283887 - protein, 79 aa, Zea mays
  Clone ID: MRT4577_22002C.1.pep
EPSSGMYQCTLLFINNRHIQKGSMECKHVITTTKTSKRYLSHVWSADLTTRRLVHLNDTKGKQTYSAPSLSKSHAIGVL

SEQ ID NO: 283888 - protein, 60 aa, Zea mays
  Clone ID: MRT4577_22003C.1.pep
YSLVALEQLSTELNMRNHACHIAHQFLLQDLKLGSSTKGGPGQYIQLHVLGIASVVGGLR

SEQ ID NO: 283889 - protein, 155 aa, Zea mays
  unsure (1)..(155): unsure at all Xaa locations
  Clone ID: MRT4577_22004C.1.pep
HEANVRPRIWEXTLGSVDILVASIGTGGTISGTGRYLKRMNKDIKVIGVEPAETSVISGDSPGYIPSILDVQLIDEVVKVSTAEAVDSARELALKEGLLVGISSGAAAIAAINVGKRPENAGKLIAVIFPSFGERYISTILFRPIYDSVRRMRKR

SEQ ID NO: 283890 - protein, 74 aa, Zea mays
  Clone ID: MRT4577_22006C.1.pep
YSGCLLGRVVLGGGLLSSVFLFLFSVFRFHVDVVCVLIFGKKNKPVCNGRPLVQSMIRKKKSVRPCKKKKKKGP

SEQ ID NO: 283891 - protein, 57 aa, Zea mays
  unsure (1)..(57): unsure at all Xaa locations
  Clone ID: MRT4577_22007C.1.pep
WEVQSREQWRQSSCGRVKASRRXAYIKLGNHKLHSNELNARIILNKNIAFKQLGYFF

SEQ ID NO: 283892 - protein, 512 aa, Zea mays
  Clone ID: MRT4577_22009C.1.pep
MPVATFLLVALLSCGARAIRTHGGYVSAVGDPGMRRDGLRVAWEAWNFCNEVGQEAPGMGSPRGADCFDLLETSSDEEGRPVYSVAHLVSDADNRLGAGDPFPGSPPGAARVTDADLYAPAKELYLGDRCQVADTPAPWQFWMVMLKNGNLDTTAAACPENGRPARPFPQTSRFPCPAGAGCMNQPLLFHNRTALDDAGRRLRGGLFGTYDLDAAAGLGAGDVSFYSVTWEKEVAASGRGGGWAFHHKLRTSTKYPWLMLYLRSDATRGFSGGYHYDTRGMTKTVPESPDFKVRLTLDVKQGGGRNSQFYLMDMGSCWKNDGRACDGDTATDVTRYSEMIINPATPAWCSPSRIDQCPPWHTFRNGSRVHRRDGARFPYGAYHVYCSPGNAARAEQPTTYCDAYSNPQAQEILQLLPHPVWGEFGYPTARGQGWVGDPRAWDLDVGAMSQALYFYQDPGTPPARRRWTSLDVGTEIYVSDRAEEAEWTLSGFDILVPDKCIKSQQRASNSCW

SEQ ID NO: 283893 - protein, 98 aa, Zea mays
  unsure (1)..(98): unsure at all Xaa locations
  Clone ID: MRT4577_2200C.1.pep
ATWRANLKWAPVLALVVVVAAMVGTTSAGNIAVYWGQNGNXGGGGGACNSXLYSYVNIAFLTTFGIGQTPVLNLAGLCDPGSGFCAGLCSDFHTCLSL

SEQ ID NO: 283894 - protein, 54 aa, Zea mays
  Clone ID: MRT4577_22010C.1.pep
TSAPIETGVSGVFSCGSNTAMHLLARSVDQMCVGAHIRICSQLNLSKEWRFLAL

SEQ ID NO: 283895 - protein, 491 aa, Zea mays
  unsure (1)..(491): unsure at all Xaa locations
  Clone ID: MRT4577_22011C.1.pep
MPSCPAPAPAVATFLLVALLSCGTRAIRTHGGYVSAVGDPGMRRDGLRVAWEAWNFCNEVGQEAPGMGSPRGADCFDLLETSSDEEGRPVYSVAHLVSDADNRLGAGDPFPGSPPGAARVTDADLYAPAKELYLGDRCQVADTPAPWQFWMVMLKNGNLDTTAAACPENGRPARPFPQTSRFPCPAGAGCMNQPLLFHNRTALDDAGRRLRGGLFGTYDLDAAAGLGAGDVSFYSVTWEKDVAASGRGGGWAFHHKLRTSTKYPWLMLYLRSDATRGFSGGYHYDTRGMTKTVPESPDFKVRLTLDVKQGGGRNSQFYLMDMGSCWKNDGRXIDQCPPWHTFRNGSRVHRRDGARFPYGAYHVYCSPGNAARAEQPTTYCDAYSNPQAQEILQLLPHPVWGEFGYPTARGQGWVGDPRAWDLDVGAMSQALYFYQDPGTPPARRRWTSLDVGTEIYVSDRAEEAEWTLSGFDILVPDKCTKSQQRASNSCW

SEQ ID NO: 283896 - protein, 362 aa, Zea mays
  Clone ID: MRT4577_22012C.1.pep
LDTTAAACPENGRPARPFPQTSRFPCPAGAGCMNQPLLFHNRTALDDAGRRLRGGLFGTYDLDAAAGLGAGDVSFYSVTWEKDVAASGRGGGWAFHHKLCTSTKYPWLMLYLRSDATRGFSGGYHYDTRGMTKTVPESPDFKVRLTLDVKQGGGRNSQFYLMDMGSCWKNDGRACDGDTATDVTRYSEMIINPATPAWCSPSRIDQCPPWHTFRNGSRVHRRDGARFPYGAYHVYCSPGNAARAEQPTTYCDAYSNPQAQEILQLLPHPVWGEFGYPTARGQGWVGDPRAWDLDVGAMSQALYFYQDPGTPPARRRWTSLDVGTEIYVSDRAEEAEWTLSGFDILVPDKCIKSQQRASNSCW

SEQ ID NO: 283897 - protein, 126 aa, Zea mays
  unsure (1)..(126): unsure at all Xaa locations
  Clone ID: MRT4577_22013C.1.pep
PATAGGATPQGTGRQGDTTPTTRETATEVTAAQAPPKPARPPPFXTPLLXSPPPEEGHPPPPQKERPVNRKNPQQTPKXXEKKKKKPALAPRGGAAQEKTSYLTCKHYINGNSNKHFFFFFSPPPP

SEQ ID NO: 283898 - protein, 70 aa, Zea mays
  unsure (1)..(70): unsure at all Xaa locations
  Clone ID: MRT4577_22014C.1.pep
EVVYARIQRLKGAMGLSLKHQDPPQGLPAQQVPFKGYFSDLLALVKKENPXSXALGALPLFQRTLPLIAG

SEQ ID NO: 283899 - protein, 237 aa, Zea mays
  Clone ID: MRT4577_22015C.1.pep
MTHPTLLFLLPLLATSMLLQFHDHPASADCEPAAACGNLTLRYPFWLGSSSANDTHHDTPSPSPPPCAHHHPGFEVWCSDDGRVASLKGTYIHVLSINYSAGSLVASHARIAGAGGVCQADFNVSSSIALSVFTFSPRKNRALCFLYACNGTAPPSGPRYANATSSCAAPVYAFLADGDFYWDRPPAVAAGACKYSYVPVLGSEAAVMTAANYSRLLKDGFVLNWEGAGVADCQDCN

SEQ ID NO: 283900 - protein, 79 aa, Zea mays
  Clone ID: MRT4577_22016C.1.pep
FILIFYFIYIFFFFFFFFFFFLKTEILPSLPNTIMYIILQYLRILQYSSKTAEKLCSQTPPKFPYMSLDQNFKHIFNGL

SEQ ID NO: 283901 - protein, 163 aa, Zea mays
  unsure (1)..(163): unsure at all Xaa locations
  Clone ID: MRT4577_22017C.1.pep
MQILATTLTGKTXTLKVESSDTIDNVKANIQDREGIPPXDQQRLIXFAGKQLKDRRTLDRYNIQKESTLHLVLRLMGGMRIFRKTLTXKTITLMEEPSDTIYNNXAKIQYKDGIPPDXQRLIFALKHVQDGHTLGDYNIHNESTLHLVLRLTGGMQISEKTLT

SEQ ID NO: 283902 - protein, 411 aa, Zea mays
  Clone ID: MRT4577_22018C.1.pep
MEAADASSAPPPAEGRVVWVNGPIVVGAGPGGLSVAACLRARGVPCVVLDRADCIASLWQRRTYDRLRLHLPRQFCELPGMPFPDHYPEYPTKRQFVDYLQAYAERAGVQPRFNQAVTSARYDRAAGLWRVRAADALADDDVASAASTEYIGRWLVVATGENAERIVPEFDGAQDFAGPVSHVSEYKCGEAYRGKRVLVVGCGNSGMEVCLDLCDHNALPSMVVRDAVHVLPREMFGVATFSVAVFLLRFLPLWLVDAVLVLLARLFLGDLEKLGIRRPAGGPLELKNARGRTPVLDIGALARIRSGHIQVVPGIKRFFRGGAELVDGRRVAADAVILATGYHSNVPQWLKGSDFFTQEGYPRVPFPHGWKGESGLYSVGFTRRGLSGVSSDAVKVAQDIAVEWEKQTSTR

SEQ ID NO: 283903 - protein, 110 aa, Zea mays
  Clone ID: MRT4577_22019C.1.pep
ASTVPAASPAPQLNDPRTLFRIVHAWMSPFFHCLLCACGVSIIKDVSVVWSDSGSPPCMLGVGSPVLVLVHVIIWHRYTPCISDLSAPVSVHRCMKCLSPSIRYQTHSGF

SEQ ID NO: 283904 - protein, 111 aa, Zea mays
  Clone ID: MRT4577_2201C.1.pep
MGGPGAGAAADADAAGEEGGVGVGVAVEKESSDPRADFRESMTQMVLEMGLCGWDDLRCMLRRLLALNAPRHHAAILAAFAEVCAQLTTAAPPQPAYHAAAYDYDYHYHHY

SEQ ID NO: 283905 - protein, 73 aa, Zea mays
  Clone ID: MRT4577_22020C.1.pep
SGSIGSSGFRRLKLPGSRRSRMLRIRLKLPNSLGSDAVGGWVSRDIRPGEEGQKDECKAWGPTSPSTRGRTRG

SEQ ID NO: 283906 - protein, 82 aa, Zea mays
  unsure (1)..(82): unsure at all Xaa locations
  Clone ID: MRT4577_22021C.1.pep
RGELKEQLRRMGVVIESRDARSPLCTTHPKRGSWVGDRRRGIVLSRKGMSXHTREMSAWATYFGDEGIKGGFSNGEVGVGTM

SEQ ID NO: 283907 - protein, 91 aa, Zea mays
  Clone ID: MRT4577_22022C.1.pep
FRGGPRRRAWPLFLVRRRFIFWPERQDKNRPLEGSSSCNCKPPSKGVPFPFLQPSWKLRTGFLWKDTWDSPWGFPGGKSWIGKTSMGRQGI

SEQ ID NO: 283908 - protein, 73 aa, Zea mays
  Clone ID: MRT4577_22023C.1.pep
IPNLENQGIGLLPVFFFVKNLFLKGPKVIICPPFLKTVAWKKGDFKDAICGCYPQWDPCPVFFNPCGCPKPFL

SEQ ID NO: 283909 - protein, 33 aa, Zea mays
  Clone ID: MRT4577_22024C.1.pep
LTTLGLLYKIVMIAMEVLPYSVRSVLKLIKCLN

SEQ ID NO: 283910 - protein, 340 aa, Zea mays
  unsure (1)..(340): unsure at all Xaa locations
  Clone ID: MRT4577_22025C.1.pep
MEALWKQASRLKDQVSRQGVFKQFGYGNSDNAFTDESEVKLHQRLEKLYLSTRAAKHFQRDIVRGVEGYIVTGSKQVEIGNKLSDDSQKYGVGNTCTSGDTLSKAATYFGKARXRLEKERGNMLKAFGTQVAEPLRAMVMGAPLEDARHMAQRYDRTRQEAEAQAVEVSRRQNRVRXSTGNGDMVSKLEAAEYKLEELKSNMVGLGKEAIAAMSAVEAQQQRLTLQRLIALVEAERTYHQRVLEILDKLEEEMVSERXXXEAXXTPAAENYIPPPAPPSYDEINGAFASTXXXXXXXXXDFFLGEALDSFNAESEFELTLSAGDIVIVRKVTYFFASIGF

SEQ ID NO: 283911 - protein, 293 aa, Zea mays
  unsure (1)..(293): unsure at all Xaa locations
  Clone ID: MRT4577_22026C.1.pep
APSSSMAPPMAXPSSGPVRARSPPWPTSLLPSRPPLPXGPAPLPXSSKSPVPSRSSVPRPFLLVRRIAGRVLPWPDLPPXSSAPSLLPSRAXPRPRLPWAPPAGAPTPVVPLLSHLGTPSPSGSMVLGGSPPHPTLQPGVFPLLWPFRTAASSISAPLQPWSPSPSAPPWPSASAPPSTRHPSTQHTNQRHDALLYVLRPAMEVVGLQLPSARTPSSLRRVPSPAAPILQQPPWPSSVARRPCYLLPNADAFPAHQWRSCRRLTASLRGAPPHHRVLAEPTPLATLSSSPLPL

SEQ ID NO: 283912 - protein, 121 aa, Zea mays
  unsure (1)..(121): unsure at all Xaa locations
  Clone ID: MRT4577_22027C.1.pep
RLAPNPLQRPGKKNPPXPPPGGALKRAKSPPPGXPLGDPSPGPNGAKPGPKRDPGGNRNPPTIPPHKPTGNTXEPPGGPKGEPTHINGGAPTARLPGGKPGVPNGKKNRPTPGERGVAFWA

SEQ ID NO: 283913 - protein, 74 aa, Zea mays
  Clone ID: MRT4577_22028C.1.pep
MGTGLVYGSWLQVAKQPKLWASLYMATLWLVEYMDAHVLRAMARVTVGRSRGRLEVFYGKQFVTDDLQNYRVDR

SEQ ID NO: 283914 - protein, 163 aa, Zea mays
  Clone ID: MRT4577_22029C.1.pep
GAKSGFFLIWLGGGCPPSPGVIFREKQNPFSPGKTLPHNRVGKPFSLKMAAPGKPGKTLVSFFFTPSGGFFFLGTRQIWGFFFGAPLFPFQGPFGVGSPQSQKQFFLGPSPKNRPGLGGLLKVFPRGPLYLVLLGGKRLPHFFFWRGSPQRPFLNRGGGKTWV

SEQ ID NO: 283915 - protein, 105 aa, Zea mays
  Clone ID: MRT4577_2202C.1.pep
VYYSRITLVSTRRNKPETKESGRVVAVSLPEESHVFRVRRHHHENLPTTSQIAASTKHSSSHAAVVPTHTSCGTMSKALFPTHIECPALDTELSVSFLMRHIILR

SEQ ID NO: 283916 - protein, 89 aa, Zea mays
  Clone ID: MRT4577_22030C.1.pep
MAVMKSRTVIVAAVLLAVVILSSLCPCYEAGGCIGKPPKTPAPKRPCFSPYSEDHCDRQNCRFVCMSHGYSDGGWCDEREVRKMCCCYH

SEQ ID NO: 283917 - protein, 106 aa, Zea mays
  unsure (1)..(106): unsure at all Xaa locations
  Clone ID: MRT4577_22031C.1.pep
VCKKRISFRVHPFFPERGLFTKKPFRPPPPLKKSPPFFPLSPRGDKPNKKKKKQXHPKKKKKKKKKQKQTKKKKKQPKKKKNNKPKKKKKKPKKKKKKKKKKKNPN

SEQ ID NO: 283918 - protein, 45 aa, Zea mays
  Clone ID: MRT4577_22032C.1.pep
HQEAGLAPSSWIQHRSFEPGHLVLSSVRVDVALRVLVVAGQPPGP

SEQ ID NO: 283919 - protein, 129 aa, Zea mays
  unsure (1)..(129): unsure at all Xaa locations
  Clone ID: MRT4577_22033C.1.pep
LTTAPYLWVHRPAXLXCRTRWWAFLTGVTHWCQHXARNNCRAEQVADQSWIDRSHHWXGWALCGPEELLSNLRGGYPSPGLAAXXWSALYPTRARLSHCRTSQXTLGSSPLKGPSCTLGILPVNEPGTP

SEQ ID NO: 283920 - protein, 70 aa, Zea mays
  Clone ID: MRT4577_22034C.1.pep
SSVFLLCCTVPQDRVCCVVEWMYCSKVCGLRPCSAARLVRYAVQFPAPLQYGRPHVKLGDDIMIGWALVI

SEQ ID NO: 283921 - protein, 63 aa, Zea mays
  Clone ID: MRT4577_22035C.1.pep
LIKGPPFFFFFFLRHNTPIYSYIINKLFEFIYITYLLCALYYTEAAYRRSLDPLLDRPLLMDP

SEQ ID NO: 283922 - protein, 701 aa, Zea mays
  unsure (1)..(701): unsure at all Xaa locations
  Clone ID: MRT4577_22036C.1.pep
MSSPSSSPARRREMGEGGELPVPVPVPASVVGDDKVLAAAQHIVKSLATSKNAADDMIRILSGFDHRLSSITSDLFPSPSPAAASDADPAEPPGEQEPSSSTSSSSLADFDAAEQLIHLWDTTPEALVFEAPEDDAAHYLAAVDVAVDHLSAPAVSARAGVAVQLAMSRLEDELRHLMLRHSVPLDASGLYCSLRRLSLGSMDDLDTSSEFDPATPHSQDGGAGAGPDTARSASIAGNNPFEDQVFDLVRPDAIDEIRAIADRMLHAGYDSELAQVYCAIRRDLLDECLTVLGVERLSIDEVQRIEWKHLNDKMKKWVHGVKTVVRCLLTGERRLCDQVLAVSDELRDECFVESTKCCIMQIRNFGDAVSVCTRSPEKLSRILDMYEALAEVIPELKELFFGSYGGDVIHDLEGVLERLGDAVKGTLLEFGKVLQQESSRRPMMAGEIHPMTRYLMNYLRLLVVYCDTLDILLDDXCWSCRXNILHNGTDEDQEYLKSLTPFGRRLVKLISYLEVNLDEKSKLYEDGALQCIFSMNNTLYIVQKVKDSELGRILGDHWIRRRRGKIRQNSKSYLRVSWTKVLSYLKDDGHGSSGSGSFGSSGNSSSRIKEKIKNFNLAFEELYRSQTVWKVPDPQLREELKISISENVIPAYRAFTGRYGSLVDSGRNSGKYIKYTPEDLENHLSDLFEGSLGSANHSRRR

SEQ ID NO: 283923 - protein, 105 aa, Zea mays
  Clone ID: MRT4577_22037C.1.pep
SPGRGFFKFPGRGPLGPQKNPAPKWGENPPIFPFFFPKIPPFCWGETPKPGGGFIISGFFLGRKPQIFKWLYSPPPGRGENYRSPRLPKWGFGPPPLKKRPLNGG

SEQ ID NO: 283924 - protein, 55 aa, Zea mays
  Clone ID: MRT4577_22038C.1.pep
RVGWLLLPLRFGYGFLRFCGTRFPGWADQNCRLRCRAPLFLRRPPLGQGRTLLSK

SEQ ID NO: 283925 - protein, 40 aa, Zea mays
  Clone ID: MRT4577_22039C.1.pep
WIEVKIQQELNNNDDIRNLYSFSNINRRFPSLYFKFNNRY

SEQ ID NO: 283926 - protein, 657 aa, Zea mays
  Clone ID: MRT4577_2203C.1.pep
KDRKVIARKLGAKCKGDKTCIWVPKDIVTNLVGPNKSWVYASGGSSWIIDSGCTNHMTGEKKMFTSYVKNKDSQDSIIFGDENQGKIKGLGKIAISNEHSISNVFLVELLGYNLLSDKSETQGTLKRFLRRAQNEFELKVNKIRSDNGSEFKNLQVEEYLEEEGIKHEFSAPYTPQQNGVVERKNRTLIDMARTMLGEFKTPECFWSEAVNTACHAINRVYLHRLLKKTSYELLTGNKPNVSYFRVFGSKCYILVKKGRNSKFAPKAVEGFLLGYDSNTKAYRVSNKSSGLVEVSSDVVFDETNGSPREQVVDLDDVDEEDVPTTAIRTMAIGDVRPQEQNERDQPSSSTMVHPPTQEDEQEELNNFKRNEVWTLVPRPKQNVVGTKLFQMDVKSAFLNGPIKEEVYVEQPPGFEDERYPDHVGKADPTLFTKTCDGDLFVCQIYVDDIIFGSTNQKSCEEFSRVMTQKFEMSMMGELSYFLGFQVKQLKDGTFISQTKYTQDLIKRFGMKDAKPAKTPMGTDGHTDLNKGGKSVDQKAYRSMIGSLLYLCASRPDIMLSVCMCARFQFDPRECHLVAVKRILRYLVATPCFGIWYPKGSTFDLIGYSDSDYAGCKVDRKSTSGTCQFLGRSLVSWSSKKQTSVALSTAEAEYVAAG

SEQ ID NO: 283927 - protein, 35 aa, Zea mays
  Clone ID: MRT4577_22040C.1.pep
GYCQARSRRLPSHLFHRCQRTLHVYADVIAHITPP

SEQ ID NO: 283928 - protein, 162 aa, Zea mays
  Clone ID: MRT4577_22041C.1.pep
MAAEGKVPTLAEEYSLPPKEVSVEKSATSTVAEVVPQKDTETSPADETAAAVEEKSETPEVKEPEAEETVPAAEESDEAPEETEEKPEIVIETAPADFRFPTTNQTRHCFTRYVEYHRCVAAKGDDAPECEKFAKYYRSLCPSEWVERWNEQRENGTFPGPL

SEQ ID NO: 283929 - protein, 34 aa, Zea mays
  Clone ID: MRT4577_22042C.1.pep
NEKIPIFQFNVPMIQHCHNISYITVLLKPSYSTY

SEQ ID NO: 283930 - protein, 69 aa, Zea mays
  Clone ID: MRT4577_22043C.1.pep
PLPCQHTARAQPCPPSRQPRPSTPTRRRRRRSPDRPSPAPQWPRRPRAPTPCTPGTPAAARGYLAAPRC

SEQ ID NO: 283931 - protein, 114 aa, Zea mays
  Clone ID: MRT4577_22044C.1.pep
LFLLFLTQQNWSTLASPVAWATDLTPNPSRRRHPHLVVPSPERAVGNSCGPRGRRRRQGPPSSSLTDWGRSSGGGGGTASRFNSRRHKCLALWATLLSDVVFGQDLAASGQGTG

SEQ ID NO: 283932 - protein, 55 aa, Zea mays
  Clone ID: MRT4577_22045C.1.pep
KTITLVKPIYSYYEVINFIYIGHTGLIGTLYLRIAQNKSLFFKKNYGHLFSKNNP

SEQ ID NO: 283933 - protein, 97 aa, Zea mays
  Clone ID: MRT4577_22046C.1.pep
YMMVSNYPTLGCPKYFQIIHGISRSSTLFELERFNLHKTAGVSLALQISPFQQPLHSLLEGISRFEQTTPPMSYSLICVFLCAPTHGLLSTGTNNFP

SEQ ID NO: 283934 - protein, 58 aa, Zea mays
  Clone ID: MRT4577_22047C.1.pep
VNRNTNDDHGRAAKPCKEEAGVVVLPACPCLRYIGARRPCGRMAVFTKSATRGGGGRT

SEQ ID NO: 283935 - protein, 73 aa, Zea mays
  unsure (1)..(73): unsure at all Xaa locations
  Clone ID: MRT4577_22048C.1.pep
VTDRHPSPWDAQASIVLNEPLTWSMNNWGGGKIFFFSXXXXXMXIDFGMRMMCRTYEPALLWLPQTAMDGDLS

SEQ ID NO: 283936 - protein, 109 aa, Zea mays
  unsure (1)..(109): unsure at all Xaa locations
  Clone ID: MRT4577_22049C.1.pep
SHGILQLYPFEVLYQRGSFXLFNLPTYRGLKARPNLNVGICXEHDGYPSSVTFFSNTALDYFSCSPFNFPIAMLASSHVLVLCASLLYSNLLFVHLFINNTTITYPYSS

SEQ ID NO: 283937 - protein, 498 aa, Zea mays
  Clone ID: MRT4577_2204C.1.pep
MARTMLGEYKTPERFWLEAVNTACHAINRLYLHHLLKKTSYELLTGNKPNVSYFRVFGSKCYILVKKCRHSKFVPKAVESFLLGYDSNTKAYRVFNKSSGLVEVSSDVVFDETNGSPREQVDTDDIDEYEVSAAAMRTMAIGDEELNNFKRNEVWSLVPRLKQNVVGTKWVFRNKQDEHRVVIRNKARLVEKGYAQVAGLDFEETFAPVARLESIQILLAYAAHHSFRLFQMDVKSVFLNGSIKEEVYMEQPSGFEDDRYPDHVYKLSKALYGLKQSPRAWYQCLRDFLIANAFKVGKADPTLFTKTCDGDLFVCQIYVDDIIFGSTNQKSCEEFSRVMMHKFEMSMMGELTYFLGFQVKQLKDGIFISQTITQDLLKRFGMKDVKPAKTPMGTDGHLNLNKGGKSVDQKTYRSMIGSLLYLCASRPDIMLSVCMCARFQSDPKECHLVAVKRILRYLVSTPCFRIWYPKGSTFDLIGYSDSDYNGCKVDRKSTSETC

SEQ ID NO: 283938 - protein, 255 aa, Zea mays
  unsure (1)..(255): unsure at all Xaa locations
  Clone ID: MRT4577_22050C.1.pep
FPDSXGIIAVSHNCIGVAARACGLVSLEPTKVAEILKDRPSWYRDCRCVDILHVFPTGNGGTIELIYMQTYAPTTLAAPRDFWTLRYTCGLDDGSLVICERSLTQSTGGPSGPNTPGFIRAEVLPSGYLIRPCEGGGSMIHIVDHVDLDAWSVPEVLRPLYESPKIVAQEMTIAALRHIRQIAHESSGEIPYGAGRQPAVLRTFSQRLSRGFNDAVSGFPDDGWSLLTSDGAEDITITVNSSPXKACRVPHKPFP

SEQ ID NO: 283939 - protein, 130 aa, Zea mays
  Clone ID: MRT4577_22051C.1.pep
GSLVNRIFNIIIRTLNIRKYATKYHLIHADIMLLRNVSLHANTTHNISNLLVLLNNNNKYLLPRGSQLPILPSQSSPNRPLVPPSRSLDLQSLRNDLSHISRSSLSLSLLCVFSLSLSPFGQAHKSAQSS

SEQ ID NO: 283940 - protein, 85 aa, Zea mays
  Clone ID: MRT4577_22052C.1.pep
TSSRSHDTMPVTASPALSSTFSAYGSHPQRQRAWYTLEKLPRPRRWPSLVHAEERGAGLGGRLAIGHGAHGTKTAGRASRLLRNN

SEQ ID NO: 283941 - protein, 133 aa, Zea mays
  unsure (1)..(133): unsure at all Xaa locations
  Clone ID: MRT4577_22053C.1.pep
CLGSRRIRRPTATQGTWLLVVAYLLVVVACNATASADDVTAILETGGCEGDDEKIELLLLHLSERDITXESLAGPRRRQLHLPXDGTGAAARAAAGAGGAAPACEADPDTKAGKKEEGDADVRFRLFDYAAHP

SEQ ID NO: 283942 - protein, 545 aa, Zea mays
  Clone ID: MRT4577_22054C.1.pep
MSQIVSLQVHLSLSASTPPTPEKSGRVRPWAATASNRKVLVFALAFRAANALLVRTYFNPDEHWQCLEVAHRVAFGYGHLTWEWKRGLRSYLHPLLFAALYKTLALLHMDTPWVMVMAPRLVQSLFAAFGDLYLYKLSKLIFNGQVAKWTLFSQLVNWFMFFCITRTLSNSLETVLTVAGLYYWFAAIESSKATSIVSKQHAACEQSIPSRKVALLIAALSCAIRPTSAVTWLYVGLLDFIQMKSKCRFILLDVIPVGAIVLAVTTLLDWWMYGSWVIVPLNFLKFNLLSSGGDYYGTHVFHWYFTQGFPSMIWTFLPFALCGIVKSQEWRLSGLIAWVLGVYSILGHKEFRFVLPVLPLALMFSGYCLASMSQSKGKNQHRKGSLSRLQLSVILLVITNVPMALYMSLFHQRGTEDVMYYLSKEAYDGRVRSVLFLMPCHSTPYYSTLHYNLPMRFLDCTPSDSKGTLDESDRFLTSPSEFVGDVFGNLSAFSHIVLFESEERHVLQLLLHNSFLEMRRFFHSHFKVDRDLQSAVVVYSRRDVL

SEQ ID NO: 283943 - protein, 147 aa, Zea mays
  unsure (1)..(147): unsure at all Xaa locations
  Clone ID: MRT4577_22055C.1.pep
VAVGSVDFIRSIFLVRETIREGRNGTEDAKLKLDELDATTPAYQTADIVVFNTGHWWTHYKTSRGYTVLSGESIISSLSFHNPNILKCLLASLQXNYYQEGNHVYPSLDVLDAYRRALVTWARWVDMNIDPRRTQVVFRGYSLSHFR

SEQ ID NO: 283944 - protein, 52 aa, Zea mays
  Clone ID: MRT4577_22056C.1.pep
TFELLPLGPIDIVELLTAFLPLPKGEGAPRRVNTWLPIVVRSLLVASLGVFL

SEQ ID NO: 283945 - protein, 304 aa, Zea mays
  unsure (1)..(304): unsure at all Xaa locations
  Clone ID: MRT4577_22057C.1.pep
MMCRRRRSRAAGSPPGDASTGTAPTPEKSGRVRPWAATASNRKVLVFALAFRAANALLVRTYFNPDEHWQCLEVAHRVAFGYGHLTWEWKRGLRSYLHPLLFAALYKTLALLHMDTPWVMVMAPRLVQSLFAAFGDLYLYKLSKLIFNGQVAKWTLSLNSFMYLYNFLREYMTSXPWTSALTNCLQLFSQLVNWFMFFCITRTLSNSLETVLTVAGLYYWFAAIESSKATSIVSKQHAACEQSIPSRKVALLIAALSCAIRPTSAVTWLYVSLLDFIQMKSKCCFILLDVIPVGAIVLAVTTLL

SEQ ID NO: 283946 - protein, 114 aa, Zea mays
  unsure (1)..(114): unsure at all Xaa locations
  Clone ID: MRT4577_22058C.1.pep
MMSHRRRSRAAGSPPGDASTGTAPTPEKSGRVRPWAATASNRKVLVFALAFRAANALLVRTYFNPDEHXQXLEVAVCALVVRAHLALHWRTYLHPDEHWQLLGCVHRVAALLHM

SEQ ID NO: 283947 - protein, 73 aa, Zea mays
  unsure (1)..(73): unsure at all Xaa locations
  Clone ID: MRT4577_22059C.1.pep
TTQLRSCTSEVMRVLPYLKKAYGNAMQKVLHVGPDSCTVVSNLLKEGKVEAWGVEPYDLXNTDSTCISLRGES

SEQ ID NO: 283948 - protein, 50 aa, Zea mays
  Clone ID: MRT4577_2205C.1.pep
FLARHSQGLAHSLSQRCSADSSLKKACQRLSDCIVGLASPKPSDVRELTH

SEQ ID NO: 283949 - protein, 42 aa, Zea mays
  unsure (1)..(42): unsure at all Xaa locations
  Clone ID: MRT4577_22060C.1.pep
QARVSYIVEKRGACCVSPXHHLYFPWHCVXXREKQNGVGXTR

SEQ ID NO: 283950 - protein, 133 aa, Zea mays
  unsure (1)..(133): unsure at all Xaa locations
  Clone ID: MRT4577_22061C.1.pep
LVYTAGAQDLSEGGRNYTGXPSLGRAQSILSHCAYRAGLMGYDNGYRVDWRAPSRKRLAKVDPGDAFDPMSLGDDPNTVNVIKVKELKNVDLPCIDIYGFLVQAILTGEGPIENLFYHDDDPDDNKSWAYSTN

SEQ ID NO: 283951 - protein, 75 aa, Zea mays
  Clone ID: MRT4577_22062C.1.pep
PIPNSTHSSYHTSSYLTKMLYFPLHILQQRSCNILLLSPHFPLNILLTIPQQIITLPILTTNIPTQSLLQTLTSQ

SEQ ID NO: 283952 - protein, 79 aa, Zea mays
  unsure (1)..(79): unsure at all Xaa locations
  Clone ID: MRT4577_22063C.1.pep
HQAKLTVYNLTTLAGGRLSLLALLALFASAANATIIPECXLXSNSIISQFLPPDISMVWEHPTEQAYLLQQAIAASVVQ

SEQ ID NO: 283953 - protein, 92 aa, Zea mays
  Clone ID: MRT4577_22064C.1.pep
TTPECACTSTAVPPATDATQEYAQASSSHARITPSLSPSPSVPLTIHHLQSWPLLVVCCPAPPCSPLTHAVGHQRALHVRAPALAPRRRTGR

SEQ ID NO: 283954 - protein, 81 aa, Zea mays
  Clone ID: MRT4577_22065C.1.pep
RNQRANGILTRAPHQQVRRRQIQQPEHEKVKRASCLPYDHCPCLTRAGHHCKSLVFSGHQPLILTVSVRAHTHVSIRQLGC

SEQ ID NO: 283955 - protein, 558 aa, Zea mays
  Clone ID: MRT4577_22066C.1.pep
MLFFNVSCARKPLMIYLLLRLHSKDCNTIISNSCPHPLLEILMCTLYFFLFDRSYYFIGCSKNWCLMCELEQYASTLRESGGPLSPSRILSNLRNIGCRLGGGTQEDAHEFLRHLVMSMQAACLDGLGGEKHVEPSLQETTLIQQMFGGRLKSKVKCLRCYHESERYENIMDLTLEIHGWVESLQDALTQFTAPEDLDGDNMYKCGRCSAYVKARKQLSVHEVPNILTVVLKRFQSGKYGKINKCVTFPDMLDMVPFVTGSGDNPPLYFLYAVVVHVDTENASFSGHYISYVKDMQGTWLRIDDSEVQVVSVNQVMSEGAYMLFYMRSFPRPPRIYIEKGLPVTSAKRHTSKSSKGSKHDRKQTELLFPANDQAYGVYDFRPDGEGYAQDQHAELRSRAFHHADDAFADSVSADFSEATSSEWSLFTSSDESSFTTESTRDSFSVVDYGDNAGLDPISSIFGPSYAPEHGAPGSFVSRTRFSPSSPQTRYFSESTGFVSDSSMPAHPHGIVHRGRYPDSRACASSAEPLASAAHQRSGYGRYPLSRDGFVQTSGFCQM

SEQ ID NO: 283956 - protein, 45 aa, Zea mays
  Clone ID: MRT4577_22067C.1.pep
YDADRTAQVLQALMENVMARMWDKNILHGDDIKGGSHNETGDYMF

SEQ ID NO: 283957 - protein, 55 aa, Zea mays
  Clone ID: MRT4577_22069C.1.pep
CLACYSTVFIQLNDISSECYRLLSICIIPFVLSSLFKRFIVFSILNTIIIQWNFW

SEQ ID NO: 283958 - protein, 1570 aa, Zea mays
  unsure (1)..(1570): unsure at all Xaa locations
  Clone ID: MRT4577_2206C.1.pep
MDPKGKGMVVNDKEKESFVNDPKDDKPTDSGSGHKRKNGRKKKTRRIKEIVYYDSDKSSSSQKDNDNDYEKKKTVNSNFSFDYSRIPQSSNAHLLSIPLGKPPTLMERTMDXSHKXVATCSLSIQVSGLDNAKQIWDTLKISHEGNDVTMLTKMELVEGELGRFAMIRGEEPTQTYNRLKTLVNKIRSYGSTRWTDHDVVRLMLRSFTVLDPHLVNNIHENXVHQDDVRGDTWKVXSGRMIIKEARYVDDALNGPIHEPQTVALKATRSKEVLPSKVAQVEAAGLNEEEMALIIKHFKTALRGRKEHPNKTKTKGKHSCFKCGKIGHFIANCPDNDSDQEQGNKREKKKAYKKAKGEAHLGKEWDSDCSSSDSDNEGLAATAFNKSALFPNEHHTCLMAREKKVSTRDTSTYASSSDEESSDDEIDYSCLFRGLNRTKVDKINELIDALNDKNRLLKKQEDLLYEEHDKFVEAQKSLALEIKRNEMLSDELSTCHDSISSLKSINDDLNAKLEIANRSTSCVEHVAICNRCKDFNVDACSEHLVSISNLNDEVASLNAQLKTSKSEFDKLKFARDAYTIGRHPSIKDGLGFKREVKNLTSHMASISAKEKGKAPMASSAQKNHAFMYHDRRHSRNVYRSYDAHAMIASSSSIMHDRNLAKKNVVHHTPRRNIVHVPRKIMNEPSTIYYACNASFAICRKDKKVYASGGSSWIIDSGCTNHMTEEKRMFSSYVKNKDPQDSIIFGDGNQGKVKGLGKIAISSEHFISNVFLVESLGYNLLSVSQLCNMGYNCLFTNVDVSVFRRSDGSLAFKGVLDGKLYLVDFAKEEVGLDACLIAKTSMGWLWHRRLAHVGMKNLHKLLKGEHVIGLTNVTFEKDRPCAACQAVDDFSRFTWVFFLQDKSETQGTLKRFLRRAQNEFELKVKKIRSDNGSEFKNLQVEEYLEEEGIKHEFSAPYTPQQNGVVERKNRTLLDMARTMLGEFKTPERFWTEAVSTACHAINRVYLHRLLKKTSYELLTGNKPNVSYFRVFGSKCYILVKKGRNSKFAPKAVEGFLLGYDSNTKAYRVFNKSSGLVEVSSDVVFDETNGSPREQVVDLDDVNEEDVPTAAMRTMAIGDPFRVEEALLDPDWVLAMQEELNNFKRNEVWTLVPCPKQNVVGTKWVFRNKQDEHGVVTRNKARLVAKGYAQVAGLDFEETFAPVARLESIRILLAYATHHSFKLFQMDVKSAFLNGPIKEEVYMEQPPGFEDERYPDHVCKLSKALYGLKQAPRAWYECLRDFLIANAFKVGKADPTLFTKTCDGDLFVCQIYVDDIIFGSTNQKSCEEFSRVMTQKFEMSMMGELSYFLGFQVKQLKDGTFISQTKYTQDLIKRFGMKDAKPAKTAMGTDGHTDLNKGVATPCFGIWYPKGSTFDLIGYSDSEYAGCKVDRKSTSGTCQFLGRSLVSWSSKKQTSVALSTAEAKYVAAGQCCAQLLWMRQTLRDFGYNLSKVPLLCDNESAIRMADNPVEHSRTKHIDIRHHFLRDHQQKGNIEVFYVSTENQLADIFTKPLDESTFCRLRSELNVLDSRNLD

SEQ ID NO: 283959 - protein, 281 aa, Zea mays
  Clone ID: MRT4577_22070C.1.pep
MLPPAARLAARRLLGLASASASEAAGRRVASSPIASAGYSAAASRGSVSSTRPFSTALNYHLDSPENKPDMKWEFSQANMKKVNEILSHYPSNYKQSGIIPLLDLAQQQHGGWVPVAAMDAIAKIVEVAPIRVYEVATFYTMFNRTKVGKYHLLVCGTTPCMIRGSREIEETLLEHLGVKRNEVTSDGLFSVGEMECMGCCVNAPMIAVADYSKGSEGYTYNYYEDLTPKRVVEIVEMLRRGETPPRGTQHPERKNCGPAGGNTTLHGEPKPPPCRDLDAC

SEQ ID NO: 283960 - protein, 61 aa, Zea mays
  Clone ID: MRT4577_22071C.1.pep
LPALPYNLSNHINRTPHLQLFKYKHIHSQFNTHCKQIILHYLKTPTSLIHIISIYKPSKSF

SEQ ID NO: 283961 - protein, 50 aa, Zea mays
  Clone ID: MRT4577_22072C.1.pep
ALHMHSTLHQYCRNVSVWQQHVSRVSSFSSLSLCTNQFKDSLTSLGLLAL

SEQ ID NO: 283962 - protein, 67 aa, Zea mays
  Clone ID: MRT4577_22073C.1.pep
SFNGRPPLFYIYFFNRDFQQGFFYYPHSIRGCTQYTNSKANPGIYVFYLIYYLFKKGISLYPSNIFT

SEQ ID NO: 283963 - protein, 76 aa, Zea mays
  Clone ID: MRT4577_22074C.1.pep
RFFYWESVNVLKFIRDLRVSNQIFDSSKSPTRVYKVHAFRSLIRELSRNICKKMAMAPVIKLVLGSVAFAIFWILA

SEQ ID NO: 283964 - protein, 139 aa, Zea mays
  Clone ID: MRT4577_22075C.1.pep
MPRSLAGDLTDPEMAQPYMKKDDDDSDIEYSPFFGIEKGAVLQEARAFHDPQLDARRCSQVITKLLYLINQGESFTKVEATEVFFAVTKLFQSNDAGLRRLVYLMIKELSPSSDEVFIVTSSLMKDMSSKTDMYRANAI

SEQ ID NO: 283965 - protein, 59 aa, Zea mays
  Clone ID: MRT4577_22076C.1.pep
KRDPRSNEATMKYLLMGGASSSILVHGFSWLYGSSGGEIELQEIVNGLINTQMYNSPGI

SEQ ID NO: 283966 - protein, 79 aa, Zea mays
  Clone ID: MRT4577_22077C.1.pep
LFLKDHHCFRAFQCCTPMCHAVQIECSSEIKCLPIDRAARNLVVVHDALGAVKSSALQALSKVFPLIVRLDMSGKDTPS

SEQ ID NO: 283967 - protein, 69 aa, Zea mays
  Clone ID: MRT4577_22078C.1.pep
MHGKVEHASDGGAGVTRPRRSRDHTDSATHGDMDQNTWGILMREFLSWSFRGPITTELLAPGNHVQQGF

SEQ ID NO: 283968 - protein, 207 aa, Zea mays
  Clone ID: MRT4577_22079C.1.pep
IAVVSEEKKRLVAYHEAGHALVGALMPEYDPVAKISIIPRGQAGGLTFFAPSEERLESGLYSRSYLENQMAVALGGRVAEEVIFGDENVTTGASNDFMQVSRVARQMVERFGFSKKIGQVAVGGAGGNPFLGQSMSSQKDYSMATADVVDAEVRELVEKAYVRAKEIITTQIDILHKLAQLLIEKETVDGEEFMSLFIDGQAELYVS

SEQ ID NO: 283969 - protein, 87 aa, Zea mays
  unsure (1)..(87): unsure at all Xaa locations
  Clone ID: MRT4577_2207C.1.pep
ARNSARGRVLDTPIAENSFTRMXAVPAGMKXLKPVRERMNMGFLLLAYNQISNNSGMLDYTSGGQLKIPLVIRGPDDVDRQLGAEHS

SEQ ID NO: 283970 - protein, 218 aa, Zea mays
  unsure (1)..(218): unsure at all Xaa locations
  Clone ID: MRT4577_22080C.1.pep
SRTPGHAYRRHNLGPPHGTLGSGLPWSFNNRPSRGFPRNGQQRASSSLVSFSSFLVGKTLLRQAEAARPSFAVRAAADSDRPIWFPGSTPPPWLDGSLPGDFGFDPWGLGSDPESLRWNVQAELVHCRWAMLGAPGIFIPECLTKIGVLSTPFWYTAGEHEYLPDTTTLLIXIELILIGWYEGRRCGDIIKCNSVKTDPILHSNELVVNDIVDPVVLW

SEQ ID NO: 283971 - protein, 58 aa, Zea mays
  Clone ID: MRT4577_22081C.1.pep
VFHRKEIFRALLTSPVWSLEKVTWGLVEFSIILILVLRAPHTELSTPKQIRRAARVKR

SEQ ID NO: 283972 - protein, 594 aa, Zea mays
  Clone ID: MRT4577_22082C.1.pep
MSGSGDRRGGGPPGSHSGWETMGKKSKKPGQAGGRQWAPWSSTNVTPNTARPAWGGSGSSHPSGTSWAQAPDHGAATRGNPRPPSQTSRPVLAPPLANGWQWQSRPRPSGSEVKKDDAPPSGSVPEVENVDGNNTSDDDDDDDDDLSDDISDDYDSDASEKSFETRKTNKWFKEFFEVLNTLSLEQINEQTRQWHCPACKNGPGAIDWYKGLQPLVSHARTKGSTRVKLHRELAALLEEELSRRGTSVLPAGEQFGKWKGLQESTDREIVWPPMVIVMNTFLEKDEDDKWKGMGNQELLDYFGEYEASKARHAYGPSGHRGMSVLIFESSAVGYMEAERLHKHFVNQGTDRNSWHLRKVRFVPGGKRQLYGFLANKEDMEAFNKHCHGKSRLKYEMRSYNEMVVIQMKQMSEDNQQLNYLKNKMVKTEQRSKAVEESLGVVTQKLRETIEENIFVRSKAKEKHMEYEEEMKSQEEIFHGLIEDIHKATEDKEKQFEKLLQEERSKARRFDVDSGTMKDRQLRKEYVQKFIDCQVKDVAEFEVERDELIKVHEDKKLKLKKEYMDLELELEKEFDAALTGLMEKHKPDTFEASSS

SEQ ID NO: 283973 - protein, 166 aa, Zea mays
  unsure (1)..(166): unsure at all Xaa locations
  Clone ID: MRT4577_22083C.1.pep
MLHLPSRTPKNLIANYIFIFTIISGKSRLKYEMRSYNEMVVIQMKQMSEDNXQQLNYLKNKMVKTEQRSKAVEESLGVVTQKLRETIEENIFVRSKAKEKHMEYEEEVIRLPKWLYFLLMNMRGSTIFICANDRVCCFLEGHTYILHFDTSVIRLMLPAFNLTTCC

SEQ ID NO: 283974 - protein, 65 aa, Zea mays
  Clone ID: MRT4577_22084C.1.pep
RKLSYLGLLSYENPDRHMRTLMVNPDDFPSLKTTQLHQKKGDQWILSLRVYVKLLHSCVKVTHYR

SEQ ID NO: 283975 - protein, 54 aa, Zea mays
  Clone ID: MRT4577_22085C.1.pep
MSKSKNHTAHNQNKKAHKNGIKKPKTYKYHSLKGMDPKFLRNQRYAKKHNKKQE

SEQ ID NO: 283976 - protein, 91 aa, Zea mays
  Clone ID: MRT4577_22086C.1.pep
LNPEICVHDCRPMKTAVNARNATNLIQLPSRIPMVRRDSTSHCSPFKTKTYASMNTLVPYRTLQAIYVTTLGFSSSAPGRHHHTVAPVRKG

SEQ ID NO: 283977 - protein, 91 aa, Zea mays
  Clone ID: MRT4577_22087C.1.pep
PFFHYSDEVIVDPATKRGVLWLNGGPDCSSFCDPTIAGDMVVPSGHGWHDTMQFQIRLYHKHKLAVPGEPHGRGLFVRRQLGLVQGDGPTT

SEQ ID NO: 283978 - protein, 87 aa, Zea mays
  unsure (1)..(87): unsure at all Xaa locations
  Clone ID: MRT4577_22088C.1.pep
PFXXXXPPXTXXLXXSXXYLTXXKIYXXIXXPFPNNXTXXXXLXXXQNTXXTPLSPSXXSLSKKLXPXXXLXXLSXLQFXXXXXXFS

SEQ ID NO: 283979 - protein, 81 aa, Zea mays
  unsure (1)..(81): unsure at all Xaa locations
  Clone ID: MRT4577_22089C.1.pep
NTLPRTLGIHQTLTLGCGGPMKYYLANKXLQPTLHFHFIASTPFLEYNHVYFSQIPRFFIVKNQVFKTTAGLTSLPDLYAL

SEQ ID NO: 283980 - protein, 1493 aa, Zea mays
  unsure (1)..(1493): unsure at all Xaa locations
  Clone ID: MRT4577_2208C.1.pep
MDPKGKGMVVNDKEKESTFNEPRDDKPIDSGSSHKRKDGKKKRRIKKIVYYDSDESSSSQKDDDDYEKKKTINSNFSFDYSRIPHNSNAHLLSIPLGKPPHFDGEDYGFWSHKMRSHLFSLHPSIWEIVDNGMQFDSTDNPMFINEQIHKNAQATTVLLASLCREEYHKVSGLDNAKQIWDTLKISHEGNDVTMLTKMELVEGELGRFAMIRGEEPTQTYNRLKTLVNKIRSYGSMRWTNHDIVRLMLRSFTVLDPHLINSIRENPRYTKMTPEEILGKFISRRMMIKEARYVDEALNGPIHEPQTVALKATSSREALPSKVAQIEAVGLNEDEMALIIKRFKTTLKGRKEHPKKSKTKGKRSWFKCGKIGHFIANCPDNDSDQEEGKNGKRENKKVYKKAKGEAHLGKEWDSDCSSSDSDDEGLAATAFNKSSLFPNEHHTCLMAREKKVSTRNTVTYASSSDDESSDDEVDYASLFKGLDRTKIDKINELIDALNEKNRLLEKQEDLLYEEHDKFVSAQNSLALEVKRNEMLSCELSTCHESISSLKGINDDLHAKLEVANKSSSCVEHVVICTRCKDFNVDACSEHLNSIARLNDEVASLNAQLKTSKNDFDKLKFTRDAYTIGRHPSIKDGLGFQREAKNLTSQRAPIPNKEKGKAPMANGSQKNHAFIYSDRKFSRNACRNYAYDSQAMTASSSSIMHGRNMAKRNVVHMPRSYNAFDSHAMIASTSNFNGRPRRNSMSHAPKNIIDSGCTNHMTGEKKMFTSYVKSKDSQDSIIFGDGNQGKVKGLGKIAISSEHSISNVFLVESLGCSVFRRSDGSLAFKGVLDDKLYLVDFAKEEVGLDACLIAKTSMGWLWHRRLAHVGMKNLHKLLKGEHVLGLTNVTFEKDRPCADCQAGKQVGSTHHSKNVMTTSRPLELLHMDLFGPVAYLSIGGSKYGLVIVDDFSRFTWVFFMQDKSETQWTLKRFLRRAQNEFELKVKKVRSDNGSEFKNLQVEEYLKEEGIKHEFSAPYTPQQNGVVERKNRTLIDMARTMLGEFKTPERFWSEAVNTACHAINRVYLHRLLKKMSYELLNGNKPNVSYFRVFGSKCYILVKKGRSSKFAPKAVEGFLLGYDSNTXDEDDVPTAAIRAMAIGDVRPQEQKEQDQPSSSTMVYPPTQDDEXRVEEALLDPDWVLAMQEELNNFKRNEVWTLVPRPKQNVVGTKWVFRNKQDEHEVVTRNKARLMAKGYAQVVGLDFEETFAPVARQESIRILLAYAAHHSFRLFQMDVKSAFLNGPIKEELSKALYGLKQAPRAWYECLRDFLIANAFKVGKADPTLFTKTCDGDLFVCQIYVDDIIFGSTNQKSCEEFSRVMTQKFEMSMMGELNYFLGFQVKQLNDGTFISQMKYTQDLLKRFGKMDAKPAKTPMGTDGHVDLNKGGKSIDQKAYRSMIGSLLYLCASRPDIMLSVCMCARFQSDPRECHLVAVKRILRYLVATSCFGIWYLKVA

SEQ ID NO: 283981 - protein, 129 aa, Zea mays
  Clone ID: MRT4577_22090C.1.pep
LISTGSLTMTRTVPSPSRLDHLVRIQNLSSGSAYPSEYICTQLELALYIIPSAGGAMHGKSGTRGHSSCQCPYRCSCRLSSLASIRSFPPLTAIPSENPSLQRSLGLEPVSCEAEQTGGARGYDAGRVG

SEQ ID NO: 283982 - protein, 48 aa, Zea mays
  Clone ID: MRT4577_22091C.1.pep
SMVIKHLATMGAEISSRQHFPEPWPYHTSHGEITSRVLCSTHMLCQEN

SEQ ID NO: 283983 - protein, 143 aa, Zea mays
  Clone ID: MRT4577_22092C.1.pep
MKALILVGGFGTRLRPLTLSVPKPLVDFANKPMILHQIEALKDVGVTEVVLAINYQPEVMLNFLKDFESKLGIKITCSQETEPMGTAGPLALARDKLDDGSGEPFFVLNSDVISEYPFAELIEFHKSHGGEATIMVTKVDEPS

SEQ ID NO: 283984 - protein, 73 aa, Zea mays
  Clone ID: MRT4577_22094C.1.pep
FLCATTSAASAVEALAARTTRVIRAYSAPSLSPDVAILGWIRHLLAGSLPAVFKSALSFPPGKELLRKRICGM

SEQ ID NO: 283985 - protein, 161 aa, Zea mays
  Clone ID: MRT4577_22095C.1.pep
IKKKKKKKKKKKKKKKKKKKKKKKKQKKKKKKKKKKKNKTLERNKKNKGGGGLTRDPTPIFPALARRIPAFVLGAPQINRGPPPGFPIPTAWAKPEWLSPHFSLLPATIPFSGVWLVTTQGPPLRWPSPSRPLLKVHCVPSLSPPLNPPRLAVNPRLPLWL

SEQ ID NO: 283986 - protein, 50 aa, Zea mays
  Clone ID: MRT4577_22096C.1.pep
LNSMLITANGNCSYHSTFSISKTWSPSFGVMKPSPYNNKVTKEAQIASLS

SEQ ID NO: 283987 - protein, 47 aa, Zea mays
  Clone ID: MRT4577_22097C.1.pep
TKQTLFNQIAGTSIKLDSRLNKKKFLHHFKNKKNTSMVVFTCNDLCG

SEQ ID NO: 283988 - protein, 80 aa, Zea mays
  Clone ID: MRT4577_22098C.1.pep
TARAFNNGVVILPRSMVIALAACCHSCSTQPSSLGSVSSMCTGLQFQLAVGGFQRRETSSWHRPTKSKPKPESCQIRQAG

SEQ ID NO: 283989 - protein, 155 aa, Zea mays
  Clone ID: MRT4577_22099C.1.pep
TSPFFFFFFFFFFFFFFFFFFFFFFFFPQKKIKSLPTNPRRDFQETSPGGGGPSLPLSSGSFTGPAVEAQAPPRGGLTHFPILAPGPGRPRKETNSFTGPQPVGCGGPEKAPGGHGFFATFSFSFWPWSSWGGGASWSCWSSATRSFFLLWASVN

SEQ ID NO: 283990 - protein, 53 aa, Zea mays
  Clone ID: MRT4577_2209C.1.pep
PTLSPFPPNPFTIQFQTPSPGGPLHLSGSYYLHLLNLLQPIFPLKQADIYPNY

SEQ ID NO: 283991 - protein, 255 aa, Zea mays
  Clone ID: MRT4577_220C.1.pep
MRECISIHISQAGIQVGNACWELYCLEHGIQADGQMPGDKTIGGGDDAFNTFFSETGAGKHVPRAVFVDLEPTVIDEVRTGTYRQLFHPEQLISGKEDAANNFARGHYTIGKEIVDLCLDRIRKLADNCTGLQGFLVFNAVGGGTGSGLGSLLLERLSVDYGKKSKLGFTVYPSPQVSTSVVEPYNSVLSTHSLLEHTDVAVLLDNEAIYDICRRSLDIERPTYTNLNRLVSQVISSLTASLRFDGALNVDVNEY

SEQ ID NO: 283992 - protein, 115 aa, Zea mays
  Clone ID: MRT4577_22100C.1.pep
KKQRLVVEFAIENAQVVQRRRANEERSRQLNPEHNKGAKAEAQPKTNAQHTRDDKKRGRKGDRGDEAHKGGKDRGSKQAEEEGGRKPETDAEMKHRLIARTRVMRKKKALSRGKK

SEQ ID NO: 283993 - protein, 108 aa, Zea mays
  Clone ID: MRT4577_22101C.1.pep
TSSGYRPVMSPIRGPCKLGFPYNSSVYRPVKSPSGLLLVSNQPMAAREACISLAKKAYEESFGKMIFQSAKDCKAEPVSHQDKTSGSISRNFEYLDFKSSLLQPGNSY

SEQ ID NO: 283994 - protein, 61 aa, Zea mays
  Clone ID: MRT4577_22102C.1.pep
LPFFFFFPFLSFGGIFNTVYIKTEIHDEIQHIIGHLLAILLILAPQLFPSKKTLTSFLENT

SEQ ID NO: 283995 - protein, 110 aa, Zea mays
  Clone ID: MRT4577_22103C.1.pep
KSILKLNYLIFLLSGLRGKYQRVSGLIYKNSPDSDFFQVDRGFDSVKFRDLFVKRLRRSGIPACGLLDRQFTTRIKRPSQTSQYPIDQFLAAHPVIYDHDFKLQDLAVRV

SEQ ID NO: 283996 - protein, 225 aa, Zea mays
  unsure (1)..(225): unsure at all Xaa locations
  Clone ID: MRT4577_22104C.1.pep
MSHFGRTGPPDIRDTFSLLVLNISFRTTADDLFPLFERCGKVVDVFIPRDRRPGVSRGFAFVRYKYADEAQKAIDRLDGRNVDGRNIMVQFAKXDDRRRSRSRSRSRSRERHVHDRDRDYRRRSRSRSRSMSSSPGHKSHRRARDDVKRKSRSKSRSKSRSRSRSRSYHSSSPARRSASPPKSPPPQRSPTPEKHANGKDSPLSRSVSPSPKRASSRSPGSDSKE

SEQ ID NO: 283997 - protein, 262 aa, Zea mays
  Clone ID: MRT4577_22105C.1.pep
MSHFGRTGPPDIRDTFSLLVLNISFRTTADDLFPLFERCGKVVDVFIPRDRRTGDSRGFAFVRYKYADEAQKAIDRLDGRNVDGRNIMVQFAKYGPNAVPIHKGRVKEGVEKSRDRSRSRSPRPRHRDRDDRRRSRSRSRSRSRSRERHVHDRDRDYRRRSRSRSRSMSSSPDHKSHRRARDDVKRKSRSKSRSKSRSRSRSRSYHSSSPARRSASPPKSPPPQRSPTPEKHANGKDSPLSRSVSPSPKRASSRSPGSDSKE

SEQ ID NO: 283998 - protein, 86 aa, Zea mays
  Clone ID: MRT4577_22106C.1.pep
NLTGQSLLACNSLRPVVWFPRSTSALFEMSAAAAMKLRTAVSTAARNTRTPAWRPILWPTSTSSGRDKLLLALVWMEEEGRESPAG

SEQ ID NO: 283999 - protein, 185 aa, Zea mays
  Clone ID: MRT4577_22107C.1.pep
DRPSGPGRTIAPRLLLSSPCTARPPLPVVPPPPSPHTALQPAHHLLPLWLPRVSALVKSTTLSPPPLVVSLCPASPPGLYCPLLRRLQWKVRRRTAVAGSGEHATAPRLWPGGARIRVALQPPASRSIPGTIGWLRIAWRLVCCCARTLQGSFWKNIASFSNRAMINEYDELMDTCHWIMALLVA

SEQ ID NO: 284000 - protein, 256 aa, Zea mays
  Clone ID: MRT4577_22108C.1.pep
MSHFGRTGPPDIRDTFSLLVLNISFRTTADDLFPLFERCGKVVDVFIPRDRRTGDSRGFAFVRYKYADEAQKAIDRLDGRDVDGRNIMVQFAKYGPNAEPIHKGRVKEGVEKSQDRSRSRSPRPRHRDRDHRSQSRSRSRERHVRDRDRGYRRRSRSRSRSLSSSPDNRSHHRARDDDKRKSMSKSRSRSRSTSRSRSYYSASPARRSASPRKSPPPQRSPTPAKHANGKDSPLSRSVSPSPKRATSRSPGSDSKE

SEQ ID NO: 284001 - protein, 272 aa, Zea mays
  Clone ID: MRT4577_22109C.1.pep
MSHFGRSGPPDIRDTFSLLVLNISFRTTADDLFPLFERYGKVVDVFIPRDRRTGDSRGFAFVRYKYADEAQKAIDRLDGRDVDGRNIMVQFAKYGPNAEPIRKGRVKEGVEKSQDRSRSRSPRPRHRDRDHRSQSRSRSRERHVRDRDRGYRRRSRSRSRSLSSSPDNRSHHRARDDDKRKSMSKSRSRSTSRSRSYYSASPARHSASPRKSPPPQRSPTPAKHANGKDSPLSRCVSPLPKRATSRSPGSDGKVRLMSNCLLCSLLPMHLFM

SEQ ID NO: 284002 - protein, 226 aa, Zea mays
  unsure (1)..(226): unsure at all Xaa locations
  Clone ID: MRT4577_2210C.1.pep
RLASYNGLQPQLGECKKLKLLKYLSLLPDIITQVPSSMSNLQCLETLEVGEVNGRAAVLVPIQVLELPRIKHLIGKFELIDXSTDYQLGLIQMHXPKAIKESNLETVSGFFTRRGQGFPPLMRHIRQLRKVKIWFYRDAEPKYLASYLPKAITKFLRNDNVHRSLSLDFQDGPRQTEILQACVAEASGNLYSLKLSSGTNLSTIQLSVIATNKLTGITKLCLSRWK

SEQ ID NO: 284003 - protein, 72 aa, Zea mays
  Clone ID: MRT4577_22110C.1.pep
FAERDKRRRREKVCCGAQALPMEMTCLRQQRIWAQTISDEGTGESGDHYSYLNGTLSAHALPLGARNPGVAR

SEQ ID NO: 284004 - protein, 1091 aa, Zea mays
  Clone ID: MRT4577_22111C.1.pep
VLAQLLAVEGICHLPSSPDLDHVAADFIDAARSYPSALANRCFAFCPTDAQLSAKKRDDIIMFPPSDQQSLELHMLTMIQDLAASLLMEFEKWVLRAESTGTILKTPLDSQSSLGSEEVIKAKKRRLGRAQKIIGDYCLLAGSPVDANAHYTTAIELARWTGDVFWHAGALEGSVCALVVDRMGQSDPILVHDVKYRYYTIIQLYRRATLQDNAQRVSPVSFELEAALKLARYLCRRELAKEVSDLLMGAADGAKALIDASDRLILYIEIARLFGTLGYKRKAAFFSRQVAQLYLQQDNAYAAMSAMQVLTMTTNAYHVQSRKTMKMNHDPSKEPRAGNTDSGKVHPQSIVSLFESQWSTLQMVVLREILISSIRAADPLSSWSAAARLLRSFYPLITPAGQSGLASSLANAADKLPTGTRCADPCLPFIRLHSFPLHPSQRDIVKRNPHKKEWWAGAGPSGPFIYTPFSKAGASGTSKQEVSWIVGEPVQVMVELANPCSFDIVVESIYLSVHSGNFDAFPVSVSLPPNTSKLVLLSGIPTKVGQISIPGCIVHCFGVITEHLFKEVDCLLLGAAQGLVLSDPFRCCGSSKFKSVNFPSISVVPPLPLLIANVVGGDGSILLYEGEIRDVLITLTNAGTVPVEEANVALSGKNQDSVISIAHSTWKSALPIKPGGEVTFAVTLRAWHLSSADLEADGSRSPVNSRRIAREGINPFLDIHYAGPAANLENGDVSLLPGRRLVVPLNICVVQGMRLVRARPRVREIPARFTETHLKPVSGKDINLLKVDPYKGSWGLRLLELELFNPTDVVFYVDVAVHLDDTDVDQEVISDGDAACHKTRIDRDYSARVLIPLENFKLPVLDASFFVKASSSDEPLGSRAAAIAERNAKAELNASINNLISKIKVKWHSGRNSSGELNIKDAIQTALQASIMDILLPDPLMFSFKLVTNGTVVNVDSPKDSGNVLRCKDPISAHEMTHMEVQIRNNTKEIIRMNLSISCKDVAGENCFDENSATVLWAGVLSDIHLEVPPLQEVVHPFSMYFLVPGDYSLQAASVIIDATDVLRARAKAESPDEPILCRGSPFHIRVVGTA

SEQ ID NO: 284005 - protein, 301 aa, Zea mays
  unsure (1)..(301): unsure at all Xaa locations
  Clone ID: MRT4577_22112C.1.pep
LQVDSRASTKYTTSSDEGSSSDDEDDLLALFANLNMQQKXKLNELIGAIHENDELLDSQEEFLIKENKKHVKVKNAYAQEVEKNEKLTSELSICHDTISNLRIENVKLIAKVEKLNVCDDSLVNLKNDNASLITKIDNLNESLSSLKIENDKLISKAKDLNVCNVSISNLRNENAILHAKIDELKSCKPSTSSVDHVSICTRCRDINVDAIHDHLALIKEQNDHITQLTSKINEHEIENEKFKFARSMLYNGRRPGIKDGIGFQQGDNVKLNXPKRLSNFVKGKAXQAQDNEGYILYPAGY

SEQ ID NO: 284006 - protein, 36 aa, Zea mays
  Clone ID: MRT4577_22113C.1.pep
ELGFGSSRFICWHLKLSQDPFFTHLTRLYFYYSLFP

SEQ ID NO: 284007 - protein, 118 aa, Zea mays
  Clone ID: MRT4577_22114C.1.pep
LYPPYLLLAANPILLHYPNTHTHYYSLMILHQCTRLFTFICHVYDTHFSFQLHKCASSPYSLPTLTYPLLLTTNDCPLCHQHLFSFLHLSPKILNHNPIISALHILYMYSFILLHDFH

SEQ ID NO: 284008 - protein, 86 aa, Zea mays
  Clone ID: MRT4577_22115C.1.pep
SITSNVSKNFGFLTFESPVDSCFGKYQCLNFENLFATKRYDVAIFVRQMLPLSAAFIDKIYAVLNVDAASDVWRHLAQVHVPGRVG

SEQ ID NO: 284009 - protein, 55 aa, Zea mays
  Clone ID: MRT4577_22116C.1.pep
RQSMLVGQKSSIACSRNRIPYYSVVIIANGKSTCYLKVLIEPHNCSEGYLFSMPP

SEQ ID NO: 284010 - protein, 105 aa, Zea mays
  unsure (1)..(105): unsure at all Xaa locations
  Clone ID: MRT4577_22117C.1.pep
MSRARARAGEGLGKGGAERHRKVLRDNIQGVTKPAXRTVRRRGGVKRISGLIYEETRGGLKIFLENVIRXDGVTYTEHARRKTVTAMYVVYWLERHGRRLYGFRG

SEQ ID NO: 284011 - protein, 491 aa, Zea mays
  Clone ID: MRT4577_22118C.1.pep
MGSRSGCGAAMAAAAVLVSWLCFAAAGVGAIGANWGTQASHPLPPETVVRMLKDNGFQKVKLFDAEEGTMSALRKSGLEVMVGIPNDLLSTMATSMKAAEKWVDTNVSSYLNDGVSIRYVAVGNEPFLETYNGSFLQSTFPAIRNIQGALIKAGLGNQVKVTCPLNADVYSSTTSKPSDGDFRTDIHDLMLTIVKFLSDNGGAFTVNIYPFISLYIDPNFPVDYAFFEGASSPIVDGSFTYSNMFDANHDTLIWALKKNGFGNLPVIVGEIGWPTDGDRNANAQMAQRFNQGFMTHIASGRGTPMRPGPVDAYLFSLIDEDDKSIQPGNFERHWGIFTYDGLPKYQLNLGTSNAGGGLVRAKGVKYLERKWCVLKPSVNLNDPKLADNVGYACSMADCTSLGYKTSCGMLDIRGNVSYAFNNYFQKNDQDDVACGFQGLATTTGQDPSTGTCRFGVMIEVDSAFSWRLQGLGSNLLLFLLLGVLQLSLSFS

SEQ ID NO: 284012 - protein, 90 aa, Zea mays
  Clone ID: MRT4577_22119C.1.pep
MAMHRAGELALCRLYGAGAAVAPSPVCLAHVRPWEEAATATNAGTVMQSTTDAAALRLRSGYTESGGAGRKAVIEDEDDDEDELEAMGSD

SEQ ID NO: 284013 - protein, 622 aa, Zea mays
  unsure (1)..(622): unsure at all Xaa locations
  Clone ID: MRT4577_2211C.1.pep
MDPKGKGIVINDKEKEFFVNEPRDDKSNDSGSGHSRKDGKKKKTRRIKEIVYYDSDESTSSQKDDDHNEYERKKPATRSKEALPSKVAQVEAAGLNNEEMALIIKRFKTVLKGRKGQPSKTKTKEKRSCFKCGKIGHFIANCPDNESDQEKGNKREKKKHYKKAKGEAHIGKEWDSDCSSSDSDNEGLAATAFNKSSLFPNERHTCLMAREKKVYASGGSSWIIDSGCTNHMTGEKKMFTSYVKNKDSQDSIIFGDGNQGKDKSETQGTLKRFLRRAQNEFELKVKKIRSDNGSEFKNLQVEEFLEEERIKHEFSAPYTPQQNGVVERKNRTLIDMARTMLGEFKTPERFWSEAVNTACHAINRVYLHRLLKKTSYELLTDNKPNXEEDVPTAAIRTMAIGEVRPQEQDERDQPSSSTTVHPPTQDDEQVHQKEACDQGGAQDDHVMGEEAQPAPPTQVRAMIQRDHPVDQILGDISKGVTTRSRLVNFCEHYSFASSIEPFRVEEALLDPDWVLAMQEELNNFKRNEVWTPVPRPKQNVVGTKWVFRNKQDEHGVVTRNKARLVAKGYAQVAGLDFEETFAPVARLESIRILLAYAAHHSFRLFQMDVKSAFLNGPIKEEV

SEQ ID NO: 284014 - protein, 256 aa, Zea mays
  Clone ID: MRT4577_22120C.1.pep
SRSRTRESKKEGYVQLHTTHGDLNLELHCDITPRTCENFLTHCENGYYNGLIFHRSIKNFMIQGGDPTGTGSGGESIWGKPFKDEPNSKLLHSGRGVVSMANSGPHTNGSQFFILYKSAPHLNYKHTVFGMVVGGLTTLSTMERVPVDDDDRPMEEIKILKVSIFVNPYTEPDEEEEKAKEEKKKDEDYDKVGSWYSNPGTGVAGSTSTGGGVGKYLKARAAGSIDVTGSAGVADDSSKKRKATASSVEFKDFSGW

SEQ ID NO: 284015 - protein, 54 aa, Zea mays
  unsure (1)..(54): unsure at all Xaa locations
  Clone ID: MRT4577_22121C.1.pep
SSLCGSPLXRMGSFRRPVPAFTPHSCRQSPAARALWRRGARSLAQXRIVAXPIT

SEQ ID NO: 284016 - protein, 84 aa, Zea mays
  unsure (1)..(84): unsure at all Xaa locations
  Clone ID: MRT4577_22122C.1.pep
MRIIDRGDPEQIIXVLHPDPNIRCGRHPISVFLTMIKHCIDTINMSYGRYEHSSXRKNMRYNSLSYASAAAKGAVVSGKEDKLD

SEQ ID NO: 284017 - protein, 84 aa, Zea mays
  Clone ID: MRT4577_22123C.1.pep
MCSGRHQEASLMFKRMKEDGIRPGKISFNSMINAYATSGLFSEAKSVFQEMQDCGHAPDSFSYLALIRAYTEAKLYTEAEEAIR

SEQ ID NO: 284018 - protein, 158 aa, Zea mays
  unsure (1)..(158): unsure at all Xaa locations
  Clone ID: MRT4577_22124C.1.pep
VQYFMDVPGLELSEAANKISDFQLAGLLETGLRAXNAQXDDCYISDRREVKMTDHVDGDRAWDVSLSEYEARGPLDTVXTASSMKMCLKVFNFLTKLKRVDHXLTGVRKTMTPNCIGSCPFYKERTSIRAQCESGLNKCQXLCKEMNHFVTKAQYYIM

SEQ ID NO: 284019 - protein, 64 aa, Zea mays
  Clone ID: MRT4577_22125C.1.pep
IGTKTNHRLTGPYIRFSCYDYDSNCCVHFSCSVDDGFPTITFHFEDDLALHVYPHEYFFANGVT

SEQ ID NO: 284020 - protein, 136 aa, Zea mays
  unsure (1)..(136): unsure at all Xaa locations
  Clone ID: MRT4577_22126C.1.pep
MSEASGAITIRTKKFLTXRLLQRKQMVIEVLHPTRANVSKDELREKLGKMYKSPKEQVIVFGFRTHFGGGRSTGFALIYDTKEALKFEPKYRLVRFGLAEKKDQASRKLRKERKNRAKKFRGTQKVKAASADKKKK

SEQ ID NO: 284021 - protein, 51 aa, Zea mays
  Clone ID: MRT4577_22127C.1.pep
VHVDLDAHGPEADADASEVGLQHRVILECACSGSSDGKSGPPNICARPNEK

SEQ ID NO: 284022 - protein, 358 aa, Zea mays
  unsure (1)..(358): unsure at all Xaa locations
  Clone ID: MRT4577_22128C.1.pep
SALKIEVGRKIGITDTKQXLERSLANDVEQIAAEVSKTVVLDCELYSAIHVQRSPTTIKFGSTHGKNVVEAVSTAVQQSQHLRNILPVGVIVGVTLACLRNYFHVGVSKHGDHMIATMKSDIFGEEVIVQDSSKENVQDSGKANTNDNNIEKTSGENQQEMTKSQGQDMMVGAVTAALGASALVAHQQNKDENCKDFVEIEGAKHEETGXEKSQNSLMSSFAEKAMSVAGPVVPTKGDGEVDHERLVAVLAELGQKGGFLRFIGKIALLWGGIRGAMSLTDRLISFLRISERPLFQRIMGFSLMVLILWSPVVIPLLPTLVQSWTISASTGIIGYACIVGLYISIMILVMLWGKRIRG

SEQ ID NO: 284023 - protein, 106 aa, Zea mays
  unsure (1)..(106): unsure at all Xaa locations
  Clone ID: MRT4577_22129C.1.pep
RDSEHKSKQDINAPDRYERIGLAEGTKKLAYDRDTKIVNAAXSFTVQREDRTVXTILRMHLTYTXNAIFAVDKLPHPLQXKSIGTICTTSLSXAMQSYYFDINDLD

SEQ ID NO: 284024 - protein, 226 aa, Zea mays
  Clone ID: MRT4577_2212C.1.pep
GVQLPYPHQSKPNNPLSLRRSFPAASDQIITIYCFYTRNTMKSLINSLIAVAILNDVQGALFPTFPTQTDTCAVLRDCQIKWLDDSNQPSTKTMGETTIDLVMGSATNLQAVQNLGGVSNPSEATAITFQPIAGLSPTQKYAVRFIAKSDPSHPIFSTYFTITGGSGTAKALITPNSSLAGSVAGSPSPIIGSKAPQAAVNSNATDVRTTVKNNTASANAEQSEAS

SEQ ID NO: 284025 - protein, 241 aa, Zea mays
  Clone ID: MRT4577_22130C.1.pep
TIERTIEQSDERTNKLRTGGRTILVLVWELEWGGDSCHEMAWGGLRGGPCPSIYRLMASDIGAEVVAAEEVLVADGVPATIRAPGLRLFGFDSLSSPLEWGRGRGHCCSGVRPEAIVVAVWPPGAEVVVAATGAGGGEPPGAMSPRGPPNVGGCSYPRGRNRSSVCNGTLNAGVCSLWLSGPEHRILSKRSRKFFSIITKSPGLNHPDSSIPVDTDYSNRFELCAEVYTLPTSSALRSHGQ

SEQ ID NO: 284026 - protein, 56 aa, Zea mays
  Clone ID: MRT4577_22131C.1.pep
YLLHSLKTFIHARPIYSHCSLHCDITNLPPACPPPERRRDRSYCQVLSAEKRRQNI

SEQ ID NO: 284027 - protein, 888 aa, Zea mays
  unsure (1)..(888): unsure at all Xaa locations
  Clone ID: MRT4577_22132C.1.pep
GDVAAGERDLGYQSPEGVLKDVFTGDSDTGGESDRRRSCTSCTAGARSSPPAGTSSPCATRSCRRPQGSRKLLHISDGGAPLSPSGHPTAPTTWXGRTDENFRTENVQFDVVEVNLPFNAIIGRPAVYRFMAIAHYGYLVLKMPSPAGVLTMRGDRAAAVTAVEKLHALVAEAAHPDNGGRDPSTSITKALAKVQPSGADRGPVKTIQMPGIPREVIEHHLKIHPDAKPVSQKPRRQSVERQDFIRQEVRKLLDAGFIEEVHHPVWLANLVTFQRSGWLGRIGSIPLFVTVDGLYCFVVMLYGLKNALPTFVRAMSKTFGDLIRDKVEIYVDDIMVKTRRGSTLVEDLTLVFDKLWATRTKLNPDKCVFGVSAGKLLGFLDSHRGIEANPEKIRAIEAIRPPARIKDVQKLMGSLAALSRFISRLAERALPFFKLLRKSGPFSLTEETEQALQELKQHLVSLPVLVAPDPGEPLYIYIAAAAEVVSMVLVVERMAQEGQEPEGSGPATGAHRVVVVTSFPLRAILHNSNATGNITKWAAELTEFQLDFQPRHAIKSQVLADFIMEWTPPPSGSWDPDPDLDPTPAEPRGPVFTEPHWTIFFDGSARQQVGRVGVVLVDPIGDQVKYMVHLEFKATNNMVEYETLIFGLSAALSLGIHKLLMKGDSYLIIKQVRGECSCNEPRLVAYLLHEEGRELLTEIHGGECGSHSSYRTLVGKAFRYGFYWPTALQDAAKMEYCEGIDTQLCFASVAHPRSNGQVERANAEILRGLKTRTYDCLKKHGTNWEQLRREDVDFIDEHRWRAAIRNAWYNQALRCYHQRFVHSRELRVWDLVLRRVLNREGLHKLSPSWEGPFKVTEICRPRCVRLATTEGEPLTNPWNIEHLHKFFP

SEQ ID NO: 284028 - protein, 674 aa, Zea mays
  unsure (1)..(674): unsure at all Xaa locations
  Clone ID: MRT4577_22133C.1.pep
MTPGADLEGLRMSSNPLPVDDLHRRVADTLGKPDAGALSQPLMRPDRGCVSLVSVRSLFLLASDCPWFSQPRLFVCLQEVGHHKPSLPPVPEDTMVRAARRVATEKRKEKKDAKKARARERTWARDALERLRRRQERDGLLREPSPETPDDDDDEDDDEDDDMAAHLGLSPDLRLGQGLSSQPPSGLVPSVSGAGTSGSRSEERGQTEGVLDPLAEVVEVTPXEGDPRVVVAASGQSVPRVPRAPKARTVPRPAAGHTLVVPSGIEVRETSPQARLIMAQSGXILGYLRPGSSFVCPDPDFPFLLSKRRHGSTGLAPRKVLKTASASAASAAPGLAGQLTSSQDAPQRGAQAAPVSVGRAPKADSSVEAAIALGEAAGAVVASGPPDMLPAVAPAAAEAVAVLAMEQPVAADAEMAEASLLGASEEGGVELRPVQSSGSLVPARRSSDGRRQLLRFRTRGALDPLFVLDDEREEQSWDGLRECAEATVGSLRSTLEVLCRDVPKILQSSALAXFAELESALDESTKALAQAAEQREADRAAMSKAISAFCRVFGSDDVPPGSSPQSRLQALGDHARGRLREALHHGVRRAFAVLASYYDVDLERFSEGYCLPDEDEAALAEVQRLDAAAAGPSAVLATTFEAEVLPLVPSSEAGADLAEGGDEAEGTAPSPGDA

SEQ ID NO: 284029 - protein, 1174 aa, Zea mays
  unsure (1)..(1174): unsure at all Xaa locations
  Clone ID: MRT4577_22134C.1.pep
MSEEKMTEEKKITDEKKLYEEKKVADHFIAGFYEFMVKTNTEKITKEIMEGLFEDSNDSCRRFETGGSLDRRVNCRRVPQPRWVGARRSAKEGGSRRETGVRGGNPAAFVFVPCPVGVAIWPRLLLGEDWASGEPKLCADGGYQLRIRSLEGTPNYGTPNTRLEAFAALFCKGTSLSRLRFVSFSGWYVDAVNGLAGAGFARAAPEPLHRARGRFLQPESFSHRKGNRPPNPFRRHPFCSMMADRVTIVSSRDPLPFSTVTADDLEDLVAEGLLRPLSDERQPEWIPLASEAAPSPPSGYVVSFVSFHERGFGVPASRFMRAILHNYGVELHNLSPNSISQAAIFVAGGSAGGSASGMTARCSRRFLSEWXAAADAWRYXPRTTGRRISSPFSRPWRRCGKEGLTAAGVIAAIHRRRVLPLAERRLPLWEVTPEADLEGSRMSSDPLPIDVLHGRVAVALGKPDASAFSQPLMRPDCGCVTLVSVRSFFLLAPDCPWSLRSRLFICLQEVGWHKPSRPRVPEDAVDRAARRVAAEEKKKKKDAKKARARERTRARDALEKLRRRQERDGLPREPSPETPDDDDDDEDDDEDDDMAARLGLSPGLRLGQESSSQPPSGLAPSVPGVGTPRFRPEERGQTEGVLDPSAGEVEVTSGRERPLXVPWQRLGSPSPRRPRCXKARMVPKPAARRTSVVPSGVKIRETSPQARLIMARSGXTLERLRPGSSFVCPDRDFPFLLSKRSHGLTDLAPRKVLKTVSASAAGAAPGLAVQLTFSQDAPQQGAQAAPLVVERVPEAGSSVEVAVALGEATGADVASGPPDMPPVLAPAAAEATAVPVGERPAAADAEMAEASALGASEEGAVETRSVPPSGSLVPARRSSERRRQFLRFRTREASDPFFVLDDEREEQSWDELRECAEATVGSLRSSLEVFCRDVSKILQQGAEVADLRLLCADLRAEAAAARAEVQRRQSEFDQVADERDQSQGRTAEAESRAGALAADLAVAQAAASEQRARAGELESALDESTRALAEAAERREADHAAMSKAISDFCRVFGFGNVPSGSSPQSRLQALGDHVRGRLREALHHGFRRAFAVLASHYVVDLERVSEGYCLPDEDEAALAEVQRLDTAAAGPSAVLATTFEAEILPPAPSSEAGVDFAEGGDEAEGAAPSPGGA

SEQ ID NO: 284030 - protein, 54 aa, Zea mays
  unsure (1)..(54): unsure at all Xaa locations
  Clone ID: MRT4577_22135C.1.pep
DPHIVXQFGSGRFLACISSRPVMFARDNGSFLXGREHEFSLFKLQRREGKSAVV

SEQ ID NO: 284031 - protein, 87 aa, Zea mays
  Clone ID: MRT4577_22136C.1.pep
HTSGRFSLLGACLVGCLLRTPPIRISCSELSPHCTTHHEVRNGPHRIEDAREIENVEVMHEYDLHMQSCIHILGPRTVPQLLGSVYV

SEQ ID NO: 284032 - protein, 38 aa, Zea mays
  Clone ID: MRT4577_22137C.1.pep
SVWLTIQVVVFKNLCLCPGKCLRVSFHHPCVICSSLCI

SEQ ID NO: 284033 - protein, 249 aa, Zea mays
  Clone ID: MRT4577_22138C.1.pep
MSSIGTGYDLSVTTFSPDGRVFQVEYATKAVDNSGTVVGIKCKDGIVLGVEKLVTSKMMLEGSNRRIHSVHRHSGLAVAGLAADGRQIVSRTKSEAASYEKVYGEPIPVKELADRVASYVHLCTLYWWLRPFGCGVILGGYDRDGPQLYMIEPSGVSYKYFGAALGKGRQAAKTEIEKLKLSELTCREGIVEVAKIIYGVHDEAKDKAFELELSWICDESNHQHQKVPNELLEHAKAAAQAALEEMDAD

SEQ ID NO: 284034 - protein, 842 aa, Zea mays
  Clone ID: MRT4577_22139C.1.pep
MADRVTIIPPRDPWPFSTVTADDLEALVAEGLLRPLSDERQPEWMPPRAEPPRPRHRVVTVTADAWRYGTPNDRHKNLEPLLKALEVLRKGGLTVVGVIAAIHRRRVLPLAERRLPLWEMTPEVDLEGSRMSSDPLPVDVLHGRVAVALGKPDASALSQPLMRPDRGCVSLEKKKKKDAKKAQARERTRARDALEKLHRRQERDGLPREPSSETPDDDDDDEDDDEDDDMAARLGLSPGLRLGQESSCQPPSRLASSVPGVGTPRSRPEERGQTEGVLDPSAGEVEVTPGGQAEVPVPRKPSLVPAEQEGDPQVAVAAPGQSVSRTSRVPKARMVPKLAARRTSAVPSGVEIRETSPQARLIMARSGKRSHGLTDLAPRKVLKTVSASAAGAASGLAVQLTFSQDAPQRGAQAAPVAVERVPEAGSSVEAAVALGEAAGANVASGPPNMPPALAPAAAEAVVVLVVERPIAADAEMAEASLLGASEEGGVEPRPVPPSGSLVPARRSSEGRHQLLRFRTREASDPFFVLDDEREEQSWDELRECAEATVGSLRSSLEVFCRDVPKILQDLTDLSAAKSSFIHREVDVWGSLRSLRTSLARATARLSQQGAEVADLRLLCADLGVEAAAARAEVQRRQSEFDQVADERDQSRGRATEAESRAGALVADLVVAQAASSELRARAGELESALDESTRALAQAAEQREADHVAMSEAISDFCRVFGFGDVPSGSSPQGRLQALGDHVRGRLREALHHGVRRAFAVLASHYVVDLERVSEGYCLPDEDEAALAEVQRLDAAAAGSSAVLATTFEAEILPPAPSSEVGVDFAEGGDEAEGAAPSPGNA

SEQ ID NO: 284035 - protein, 203 aa, Zea mays
  unsure (1)..(203): unsure at all Xaa locations
  Clone ID: MRT4577_2213C.1.pep
GAHHPQDSKTLLXFGEKPVTXVFGIRNPXEEIPGGEAGAEYVEESTDVFTDKDKAVAHLKGGAKNVVISAPSKYAQMLGARVKEDMYTSXVNIDSRLARPHTALIPFYNFINYNFCIIEXLITTDHAIIVTHNTVDGPYTKDXKXGRTASFNIIASSTGAAKAXIKGLHELNEKLTDMSFRVPTVDVPVCDLTVRIEKGDCYE

SEQ ID NO: 284036 - protein, 88 aa, Zea mays
  Clone ID: MRT4577_22140C.1.pep
CLRFICSGAKIDPPTWSLYILSRGVMPSKIHENQRASSFMPCKAHPVAFSRQFGKGLCTTPCIIGASRFIAFKTTKKKKKGRPQTSEL

SEQ ID NO: 284037 - protein, 250 aa, Zea mays
  unsure (1)..(250): unsure at all Xaa locations
  Clone ID: MRT4577_22141C.1.pep
MSSIGTGYDLSVTTFSPDGRVFQVEYATKAVDNSGTVVGIKCKDGIVLGVEKLVTSKMMLEGSNRRIHSVHRHSGLAVAGLAADGRQIVSRTKSEAASYEKVYGEPIPVKELADRVASYVHLCTLYWWLRPFXGCGVILGGYDRDGPQLYMIEPSGVSYKYFGAALGKGRQAAKTEIEKLKLSELTCREGIVEVAKIIYGVHDEAKDKAFELELSWICDESNHQHQKVPNELLEHAKAAAQAALEEMDAD

SEQ ID NO: 284038 - protein, 608 aa, Zea mays
  Clone ID: MRT4577_22142C.1.pep
MADRVTIVPPRDPWPFSTVTTEDLEALVAEGLLRLLSGDSQPEWMPPPSGAAPSPPPGYVVSFVSFHERGFGVPTSRFMRAILHVYGVELHNLSPNSISQAAIFAAEVGHHKPSRPPVLEDAVDRAARSVAAEKRKEKKDAKKARARERTRARDALEKLRRRQERDGLPREPSSETPDDDDDEDDDEDDDVAARLGLSPDLRLGLGSSSQPPSGLVPSVSGAGTSGSRSEERGRTEGVLDPSAGEVEVTPGSQAELPVLREPSPVSAAQEGDPQVDVAAPGQSVSRAPRAPKERMVPKVAARQTSVVPLGVEDLTDLSAAKSSFIRREVDVWGSLRSLRTTLARATARLSQQSAKVADLRLLCADLGAEAAAARAEAQRRQSELDQVTGERDQSRGRAAEAESRAEALGVQLAEASARAGAFAADLAVAQAASSEQRARAGGLPLWLFAELEAALDKSTKALAQAAEQREADHAAMSEAISAFCRVVGFDDVPSGSSPQSHMQALGDHARGRLREALHHDVRRAFVVLASHYVMDLERVSEGYCLPDEDEAALAEVQRLDAAAAGPSAVLATTFEAEILPLAPSSEAGVDLAEGGDEDEGAAPSPGDA

SEQ ID NO: 284039 - protein, 806 aa, Zea mays
  unsure (1)..(806): unsure at all Xaa locations
  Clone ID: MRT4577_22143C.1.pep
MADWVAIISPRDPWPFSTVMAGDLEDLVAEGLLHPLSDERRSEWIPPASGAAPSPPPGYVVSFVSFHERRFGVPASRFMRAILHNYGVELHNLSPNSISQAAIFVAVCEGYLGIAPHWDLWTHLFSAELFASPMGERRVRAAVRAGGCILQLRQSRASLYIPAILVSSNKGWQRRWFYLRNDGELLPLFSQRVVTVAADAWRHGTPHXDRRTSSPFSRPWRRCGKGXLTVAGVIAAIHRRREVGWHKPSRPRVSEDAVDRAAQRVAVEENKKKKDAEKARAHERMRARDALEKLHRRQEREGLPREPSLETPDDDDDDEDDDEDDDMAARLGFSPVPGAGTPRSRPEERGQTERVLDPSTGEVEVTPGSQAEASVPREPSPASAAQASDPQVAVAAPGQSVPRASKVLEARVVPKLAARRTSAAPSGVEIRETSPQARLIMARSGKRSHGLTDLAPRKALKTTSASTAGAVPGLAVQLIFSQGAPQRGAQAAPVAVERVPEAGFSAEAAIALEEAASAGAASGPPDMSSVLAPIAAEAAAVPVGDRPVAADAEMAEASTLGASEEGGQGAEVADLRLLYADLRAEAAAARAEVQQRQSESDQVANELDQSRGRAAEAESRAGALAADLVVAQVAASVQRGRAGELESALDESAKALAEALAGAAEQREADHAAMSEVVSDFCRVFGFGDVPSGSSPQSRMQALGDHVRGRLREALHHGVRRAFAVLASHYVVDLERVSEGYCLPDEDEAALAEVRRLDAAAAGPSAVLATTFEAEILPPAPSSEAGVDFAEGGDEAEGAAPPPGDA

SEQ ID NO: 284040 - protein, 1174 aa, Zea mays
  Clone ID: MRT4577_22144C.1.pep
MAPPVDVDGLRPRLGDVEAPPRSRSILSSVAGVESEPPGRARRRPSAEARAESEPWGHAKRSSSSSGAEPKSEPWVGRSGVRRLPGLSPSPSPGSGGAELPKAPEVGPDCLSASLCQVAPQSVWRRRRYPSVSPGARSGSKFSGWYVDAVNGLAEAGFARAAPEPLHRARGRSGTDPTFLHTPLRRLSARRRGESAMLPSVGAEHGVSVTTGDLEDLVAEGLLRPLSDERRPKWIPPVSGAAPSPPPGYIVSFVSFHERGFGVPASRFMRAILHHYGVELHNLSPNSISQAAIFVAVCEGYLGIAPHWDLWTHLFSVELFASPTGERKVRAAVRAGGCILQLRQSRASLYIPAILASSNKGWQRRWFYLRNDGELLPPFSQRVVTVATDAWRHGTPHERQKNLEPLLKALEALRKGGLTAAGVIAAIHRRRVLPLAERRLPLWEMTPEADLEGSWMSSDPLPFDVLHGRVAVALGKPDTSAFSQPLMRLDQGCVTLEVGWHKPSLPRVPRDAVDRAARRVAAEEKKKKKDAEKARARERRRARDALEKLHRRQEREGLPREPSPETPDDDDNDEDDDEEDDMAARLGFSPGLRLGQEPSSQPPSGLMPLRAPRGGPSVPGVGSPRSRPEERGQTERVLDPSAGGVEVTPGSQAEASVPRESSPTPAAEESDPQVAVAVPGQFVSRAPKAPKARVVPKLPARRTSAAPSGVEIRETSPQARLIMARSGKRSHGLTDLAPRKALKTASASAAGAAPGLAVQLTFSQGAPQQGAQAAPVAVERVPEAGSSAEAAIVLEEATDADVAPASPDVPAVLAPVATEAATILVGERPVAANAEMAEVSALGASEEGGAETRSVPPSGGLVAVRRSSEGRRQLLRFRTRGASDPFFVLDDEREEQSWDELRECAEATVGSLESSLEVFCRDVPKILQQGAEVADLRLLCTDLRAEAAVARVEAAAACAEVRLQQSEFDQIVNERDQSRGRAVEAESRAGALAADLAVAQVAASEQRARAGELEFTLDESAKALAEALAEAAEQREADHAAMSEVVSDFCRVLGFGDVPSGSSPQSRLQALGDHVRGRLREALHHGVRRAFAVLASHYVVDLERVSEGYCLPDEDEAALAEVQRLDAAAAGPSAVLATTFEAEILPPAPSSEAGMDFAEGGDEAEGAAPSPGDA

SEQ ID NO: 284041 - protein, 98 aa, Zea mays
  Clone ID: MRT4577_22145C.1.pep
TLASLLLRSGRRCVPSSAGRRRRCNHPPPPVHPSRAARPPVPTGLCGPNASSAPTTAELKPSAHTHSRQHRRTAPGTAPVRAASGIAAAGSRRGTCRH

SEQ ID NO: 284042 - protein, 59 aa, Zea mays
  Clone ID: MRT4577_22146C.1.pep
KSKRAASKVVANARLHVRVSTTLSEINARLPGSEPVSIQRAPLFASAMGAGLLAMSAGA

SEQ ID NO: 284043 - protein, 528 aa, Zea mays
  Clone ID: MRT4577_22147C.1.pep
MADRVTIISPRDPWPFSTVTVGDLEDLVAEDLLRPLSDERRPEWIPPVSGVAPSPPPGYIVSFVSFHERGFGVPASRFMRAILHHYGVELHNLSPNSISQAAIFVAVCEGFLGIAPHWDLWTHLFFAKLFASSTGERKVRAAVRAGGCILQLRQSRASLYIPAILASSNKGWQRRWFYLRNDGELLPPFSQRVVTVAADAWCHGTPHERQKNLEPLLKALEALRKGGLTAAGVIAAIHRRRVLPLVERRLPLWEMTPEADLEGSRMSSDPLPFDVLHGRVAVALGKPDPSAFSQPLMRPDQGCVTLEVGWHKPSLPRVPQDAVDRAARRVAVEEKKKKKDTEKARARERMRARDALEKLHRRQEREGLPREPSPDTPDDDDDDEDDDEEDDMAARLGLSPGLRLGQEPSSQPPSGLMPSVPGVGTPASRPEERGQSERVLDSSAGGVEATPGSQAKASAPREASPTPAAQESDPQVAVAVPGQSAPRAFKAPKARVVPKLPAKRTSAAPSGVEIRETSPQARLIMARS

SEQ ID NO: 284044 - protein, 93 aa, Zea mays
  unsure (1)..(93): unsure at all Xaa locations
  Clone ID: MRT4577_22148C.1.pep
XXXXLVCXXLFXXXXXWSXXXXCXLSGGXALFLXXXVSLXXXXLFAXAXXXXSGFPRXXXFXVXXSAXPXXLWFGXRLGXXXXPAASXFRCXA

SEQ ID NO: 284045 - protein, 927 aa, Zea mays
  Clone ID: MRT4577_22149C.1.pep
MRAILHNYEVELHNLSPNSISQAAIFAAVCEGYLGIDPHWDLWTHFFSVELFASPTGERRVRAAVRAGGCILQLRQSRALQYIPAVLASSNKGWQRRWFYLRNDDGRLPSFSQWVVTVAADAWRYRTPHDRQKNLEPLLKALEVLRKGGLTAAGVIVAIHRRRVLPLAERRLPLWEMTPEADLEGSRMSSDPLPVDVLHGRVAVALGKPDASALSQPLMRPDRGCVSLVSVCSFFLLASDRPWSLRPRLFICLQEVGCHKPSRPRVPEDAMDRAARRVAAEEKKKKKDAKKARARERTRARDALEKLRRRQERDGLPRELSPETPDDDDDDEDDDEDDDMAARLGLSLCLRLGLESSSQPPSGLAPSVPGVGTPRSRPEERGQTEGVLDPSAGEVEVTPGSQAEVSVPRKPSPMPAAQESDPQVAMAAPGQSVSRAPKVPKARMVPKPAARRTSAVPLGVEIRETSPQERLIMARSGKRSHGLTDLAPRKVLKTASASAAGATPGLAVQLTFSQDAPQRGAQAAPVAVERVPEAGPSVEVAVALGEAASAGVASGPPDMPPALAPAAAEAAAVLVVERPVAADAEMAEASLLGASEEGGVETRPVPPSGSLVPARRSSEGRRQLLRFQTREASDPFFVLDDEREEQDVPKILQDLTDLSAAKSSFIRREVDVWGSLRSLRTSLARAIARLSQQGAEVADLRLLCADLRAKAAAARAEVQRRQSEFDQVADERDQSRGRAAEAESRAGALAADLAVAQVVASEQRARVGELESALDESTRALAQAAEQREADHAAMSEAISDFCQVFGFGDVPSGSSPQSRLQALGDHVRGRLRKALHHSVRRAFAVLASHYVVDLERVSEGYCLPDEDEAALAEVQRLDVAAAGPSAVLATTFEAEILPPAPSSEAGVNFAEGGDEAEGAAPSPGDA

SEQ ID NO: 284046 - protein, 1562 aa, Zea mays
  unsure (1)..(1562): unsure at all Xaa locations
  Clone ID: MRT4577_2214C.1.pep
MDPKGKGIVVNNEKESIFNEPKDDKPTDSGSSHKRKDGKKKKTRRIKEIVYYDSDESSSSQKDDDDYEKKKTVNSNFSFDYSRIPQSTNAHLLSVPLGKPPHFDGEDYGFWNHKMRSHLFSLHPSIWEIVESGMHFDSTESPMFINEQIHKNAQATTVLLASLCRDEYHKVSGLDNAKQIWDTLKISHEGNDVTLLTKMELVEGELGRFAMIRGEEPTQTYNRLKTLINKIRSYGSTRWTDHDVVRLMLRSFTVLDPHLVNNIRENPRYTKMSPEEVLGKFVSGRMMIKEARYVDDALNGPINEPQPVALKATRSKEALPSKVAQIEAARLNDEEMALIIKRFKTALKGRKGQPSKTKAKGKRSCFKCGKIGHFIANCPDNESDQEHGSKREKKKNYKKAKGETHLGKEWDSDCSSSDSDNEGLAATAFNKSSLFPNERHTCLMAREKKVCSRNSTYASSSEDESSDEDEIDYSCLFKGLDRTKVDKINELIDALNDKNRLLEKQEDLLYEEHDKCVEAQKSHALEVKRNEMLSCELSSCHETISSLRSINDDLNAKIEIASKSTTCVENVVICNRCKDFDIDACNEHIASIAKLNDEMASLNAQLKASKSDFDKLKFARDAYTIGRHPSIKDGLGFKREAKNLTSHKAPIFAKEKGKAPMASSTKKNHAFMYNDRRQSHRSCNTFDSHAYDSYAIKDRKIVARKLGAKCKGDKACIWVPKEIVTNLVGPNKSWVYASGGSSWIIDSGCTNHMTGEKEMFTSYVKNKDSQDSIIFGDGNQGKVKGLGKIAISNEHSISNVFLVESLGYNLLSVSQLCNMGYNCLFTNVDVSVFRRSDGSLAFKGVLDGKLYLVDFAKEEAGLDACLIAKTSMGWLWHRRLAHVGMKNLHKLLKGEHVIGLTNVQFEKDRPCAACQAGKQVGGAHHSKSVMTTSRPLELLHMDLFGPVTYLSIGGSKYGLVIVDDFSRFTWVFFLQDKSETQGTLKRFLKRAQNEFELKVKKIRSDNGSEFKNLQVEEFLEEEGIKHEFSAPYTPQQNGVVERKNRTLIDMARMMLGEFKTPERFWSEAVNTACHAINRVYLHRLLKKTSYELLTGNKPNVSYFRVFGSKCYILVKKGRNSKFAPKAVEGFLLGYDSNTKAYRVFNKSSGLVEVSSDVVFDETNGSPREQVVDLDDVDXEDIPTAAIHTMAIGEVRPQEQKEQDQPSSSTMVHSPTQDDEQVHQEEACDQGGAQDDHXVEEALLDPDWVLAMQEELNNFKRNEDWTLVPRPKQNIVGTKWVFRNKQDEHGVVTRNKARLVAKGYAQVAGLDFEETSAPVARLELIRILLAYAAHHSFRLFQMDVKSAFLNGPIKEEVYVEQPPGFEDERYPDHVCKLSKALYGLKQAPRAWYECLRDFLIANAFKVGKADPTLFTKTCDGDLFVCQIYVDDIIFGSTNQKFYEEFSRVMTQKFEMSMMGELNYFLGFQVKQLKDGTFISQAKYTQDLLKRFGMKDAKPAKTPMGTDGHVDLNKGDSDYAGCKVDRKSTLGTCQFLGRSLVSWSSKKQTSVALSTVEAEYVTAG

SEQ ID NO: 284047 - protein, 1118 aa, Zea mays
  Clone ID: MRT4577_22150C.1.pep
MGRVVGGAAVARARAVRGTAVSLRVFESRVRFGRNVGTGLALVFIYPGEGLVTVLCSASCLPLRFSQPERLSQRRGNRPSCPLRRHPFRSVMADRVTIISPRDPWPFSTVTASDLEDLVGKGLLHPLTDEQRPEWIPPVGGVAPSPPPGYIVSFVSFHERGFGVPAGRFMRAILYHYGVELHNLTPNSISQAAIFVVVCEGYLGIAPHWDLWTHLFFVELFASPTGERKVRAAVRAGGCTLLLRQSRASLYIPAILASSNKGWQRRWFYLRNDGELLPPFSQRVVTAATDAWRHRTPHERQKNLEPLLQALEALRKGGLTAAGVIAAIHRRRVLPLAERRLSLWEMTPEADWEGSRMSPDPLPFDALQWRVSVALGKPDPHAFSQLLMRPDRGCVTLVAPGSYDRGFSPLLPEVGWHKPSLPRVPQDAVDRAARRVAAEEKKKKKDAEKARARERRRARDALEKLRRQQEREGLPREPSPEMPDDDDDDEDDDEEDDMAACLGLSPGLGFGQEPSSQPPSGLTPSVPGVGTSESRPEGRGQPETAPDPSAGGAEVTPGGQARASAPREPPLAPAAQGGDPQVTVTVPGQSAPRASKARVVPKLPAKRTSAAVPGAGIQETSLQARWIMAQSGKRSHGLTDLAPRKALKTTPACAASAAPGLAVQPTLSQGVPPQGARAAPVAVEQVPEAGSSAEAAIVIGEAADADVVSSPPDVPAMPAPTATEVAAIPAGERPVAADVETADASALGALEEEGVEARSIPPGGSLVAARQSSEGRRQLLRFRTREASDPVFVLDDEREDQSWDELRECAEATVGSLWSSLEVFCRDVPKILQDLTDRSTAKSSFIRREVDVWGSLRSLRTSLAGATARLSRQGAEVADLQLLCTDLRAEATAARAEAAAARAEAQRQRSEFDRVVEERDQSRGRAAEAESRAETLAADLAVAQVAASEQRARAGELESALDESAKALAEALAGAGEQREADHAAMSEAVSDVYRILDFGDVPSGSSPQSRLQALGDYVRGRLREALHHGGRRAFAMLASHYVVDLERVSEGYCLPDEDEAALAEVQRLDAVAAGPSAVLATTFEAEILPPAPSPEAEMDFTEGGDGAEGAAPSRGDA

SEQ ID NO: 284048 - protein, 45 aa, Zea mays
  unsure (1)..(45): unsure at all Xaa locations
  Clone ID: MRT4577_22151C.1.pep
QTXGRTRYAFLFFFFSTRHCCSPMTHLNTPPLYFNKHASPTKIHT

SEQ ID NO: 284049 - protein, 88 aa, Zea mays
  Clone ID: MRT4577_22152C.1.pep
NMEIPKRDVSKRQRLSMSKSHPFFHSSLISAPRNEVHPWEAWSALTSLIARLLLNPKELHGLFKPCGQQIACFCLTKGTQFRSTCYFV

SEQ ID NO: 284050 - protein, 133 aa, Zea mays
  Clone ID: MRT4577_22153C.1.pep
MADRVTIISPRDPWPFSTVTASDLEDLVGEGLLHPLTDERRTEWIPPVGGAAPSPPPGYIVSFVSFHERGFGVPASRFMRAILHHYGVELHNLSPNSISQAAIFVAVCEGYLGIALSVFWVRPHTRGCPSRCF

SEQ ID NO: 284051 - protein, 123 aa, Zea mays
  unsure (1)..(123): unsure at all Xaa locations
  Clone ID: MRT4577_22154C.1.pep
PTPARGQAASDTGAGXDDDXXXAGQRXXGPQGXXAATKAQGEGXQNXAPETNXDTXXSHXAGKRAXXSDXPAGXSASXXAXXXEEXAEXKNGRKXEXAXXXXXGXGSXQQXQXGSAQQEAQPQ

SEQ ID NO: 284052 - protein, 289 aa, Zea mays
  unsure (1)..(289): unsure at all Xaa locations
  Clone ID: MRT4577_22155C.1.pep
MGRSPCCEQAHTNKGAWTKEEDQRLVAYIKAHGEGCWRSLPKAAGLLRCGKSCRLRWINYLRPDLKRGNFTEEEDDLIIKFHELFGNKWSLIAGRLPGRTDNEIKNYWNTHIKRKLLARGMDPQTHRPLASATAGQQHYQLQEPQKRAAGGGPAGHPHQDHLXGRRHLQLAGRGLQXVAATTXPRSATPPRRHLDIDLNLSISLAAYQPPEETGIIKQPLVMKQEQETAAGGTNAAAVCLCLNSLGYRPGVECVCGDGSSSSSSWHSHSHSHQWALNFLQAAAPCYRGQ

SEQ ID NO: 284053 - protein, 58 aa, Zea mays
  Clone ID: MRT4577_22156C.1.pep
AIITLHHSAFFLRQELYNTSLLESYHYQPCHPPQFDLTESYHHRSYPFSLATLKPPIG

SEQ ID NO: 284054 - protein, 67 aa, Zea mays
  Clone ID: MRT4577_22157C.1.pep
ISTSDQTTYEQITYQHIHGDHPSHPRCCHNTLILCHQPVNHLSLPTSYPNYMSLIRIKTSRTKIEDD

SEQ ID NO: 284055 - protein, 80 aa, Zea mays
  Clone ID: MRT4577_22158C.1.pep
LVNRWPIYRPVRRRQRKEEYIIKPISLSCNDSQAPSAATLEPSLRQRDITSPEKTDIPMDRSSMTPGISSRLSSPPPAAA

SEQ ID NO: 284056 - protein, 118 aa, Zea mays
  Clone ID: MRT4577_22159C.1.pep
AALRGRSVGEAVRGDAEHRRVVNAGAHPRTPFYGEFLRAAKAVWMLHLLAFALEPPPSHFDAGRGAEFHQEYMESVTGAPPHGGAGLVVGFAVAPGFRLGNGAVVRARVYLVPRGGRP

SEQ ID NO: 284057 - protein, 858 aa, Zea mays
  Clone ID: MRT4577_2215C.1.pep
MTLIIKRFKTALKGHREYPNKNKTRGKRSCFKCGKTGHFIANCPDNDSDQGQEKSRKKEKKKNYRKAKGEAHLGKEWDSDCSSSDSDDEGLAASAFNKSSLFPNERHTCLMAKEKKVYASGGSSWIIDSGCTNHMTEEKKMFTSYVKNKDSQDTIIFGDGNQGKVKGLGKIAITNEHSISNVFLVESLGYNLLSDKSETQGTLKRFLRRAQNEFELKVKKIRSDNGSEFKNLQVEEYLEEEGVKHEFSAPYTPQQNGVVERKNRMLIDMARTMLGEFNTPERFWSEVVNTACHAINRLYLHRLLKKTSYKLLTGNKPNVSYFRVFGSKYYILVKKGRHSKFAPKVVEGFLLGVEEALQDLDWVLAMQEELNNFKRNEVWSLVPRPKQNVVGTKWVFRNKQDKHGVVTRNKARLVAKGYAQVAGLDFEETFAPVARLESIRILLAYAAHHSFRLFQMDVKSAFLNGPIKEEVYVEQPPSFEDERYPDHVCKLSKALYGLKQAPRAWYECLRDFIIANAFKVGKADPTLLTKTCDGDLFVCQIYVDDIIFGSTNQKSCEEFSRVMTQKFEMSMMGELNYFLGFQVKQLKDDTFISKTKYTQDLIKRFGMKDAKPAKTPMGTDGHVDLNKGGKSVDQEAYRSMIGSLLYLCASRPDIMLSVCMCARFQSDPRECHLVAVKRILRYLVATPCFGIWYPKGSTFDLIGYSDSDYAGCKVDRKSTSGTCQFLGRSLVSSSSKKQTSVALSTSEAEYVAAGQCCAQLLWMRQTLRDFGYNLSKVPLLCDNESAIRMADNPIEHSHTKHIDIRHHFLRDHQQKGDIEVFYVSTENQLADIFTKPLYEKTFCRLRSELNVLDSRNLD

SEQ ID NO: 284058 - protein, 66 aa, Zea mays
  Clone ID: MRT4577_22160C.1.pep
EIETRKGKKKRKRKELLPRPQPLWRPNIPHVTLAQPGRVGVNWWARAEAAHALPRKRTVVVWRGPP

SEQ ID NO: 284059 - protein, 250 aa, Zea mays
  unsure (1)..(250): unsure at all Xaa locations
  Clone ID: MRT4577_22161C.1.pep
MLARGVRPTVVTFNTLVGSACREGELAAAERLVDEMTRRGVAPNAVTYALLMQGLCDAGRYDDAKKLLFDMEYRDCQPDVANYGVLMSACAACGDADGVKGLISDMRKRKMKPDDASYNVLIRCLCDAGRVDEAHRALVEMQLKDGTAPSAAXLPRPPRRVLRSARLRPXSASFXRDACERPLLSAPHXRRLVRGLGEDGKAEEACFVLEQMGQRGMRLDAQGWQSVAACVCSSISASEMKLVDHLMSSS

SEQ ID NO: 284060 - protein, 397 aa, Zea mays
  Clone ID: MRT4577_22162C.1.pep
MASEVEDEAATPVVANGAADVRRMRDQAKAILSTQAVRIATKAEQHERFIFKVTHLLGVPGFRATKDLLGERFIFMLTHLLGVLGFGGFCYLLGARPQDVPYVYCLFYVIFVPLRWIYYRYKTWHYYLLDFCYYANTFLLVMILFYPEDEKLFMVCFSFAEGPLAWALIVWRCSLVFSSFDKLVSVLIHLLPGIVLFTIRWWNPQTFAAMHPEGRDARVTWPYVEDKSYLWTWLFFVPLAAYTLWQLMYFLIVNVLRRQRLLRDPEVMTSYRELSKKAQKANNIWWRLSGLLGDRNRQVMYILLQALFTVATMALTVPIFLSYRMHVVFLILKVCASTWNGGSFILEVMPRQVVQKQLKKLDMKPMEQGSSTQGAPGGDGGTLGNHHQHTSEEHIQE

SEQ ID NO: 284061 - protein, 288 aa, Zea mays
  unsure (1)..(288): unsure at all Xaa locations
  Clone ID: MRT4577_22163C.1.pep
MDACDDYIKDIINQWEQRKGKERKGRKFHIAIVSRIGGRTKVASRKFLPCWEGMASEVEDDAAVPGAPLVANGAADVRRRRDQAKAILSKQAVKIATKAEQHERFIFKVTHLLGVLGFGGFCYLLGARPQDVPYVYCLFYVIFVPLRWIYYRYKKWHYYLLDFCYYANTFLLVMILFYPKDEKLFMVCFSFAEGPLAWALIVWRCSLVFGSFDKLVSVLIHLLPGIVLFTIRWWXPQTFAAMHPEGRDARVTWPYVEDKSYMWTWLFXVPLAAYTLWQLMYFLIVNVL

SEQ ID NO: 284062 - protein, 68 aa, Zea mays
  Clone ID: MRT4577_22164C.1.pep
CAIDSKIRIYNHQENKSSIATSILGNSLVRLYISINTSKFRTHRSKFSKLPGKSRSASNLHTMHGMLA

SEQ ID NO: 284063 - protein, 92 aa, Zea mays
  unsure (1)..(92): unsure at all Xaa locations
  Clone ID: MRT4577_22165C.1.pep
MFPFGLLRKKGNARTVIIANRLLPCLNRVLVXKLVHAIMTRLLILLPGTCKQLNAAQVVAVGHDDRHTAGNLIPLALNEGDTVLLPHYDRTE

SEQ ID NO: 284064 - protein, 79 aa, Zea mays
  Clone ID: MRT4577_22166C.1.pep
LPSRRRRRRRSSGRSISAADREPPSVFSHHPPLRAADPYVLRPPAMARSSSQSQSSVGAGAGAGARPATVGPCGTVAVV

SEQ ID NO: 284065 - protein, 120 aa, Zea mays
  Clone ID: MRT4577_22167C.1.pep
QSGNQQEEHLLLSLPDLRIRPQPHPQPQSPSSDQHNISNPKPTIKITNSPSPNTTTMPTHKYTNSAMANNDTPPQDKDEGDVSHKKVEIQNHNKMDGMTSQQDEEAANNKNQRRIMPTKT

SEQ ID NO: 284066 - protein, 45 aa, Zea mays
  Clone ID: MRT4577_22168C.1.pep
PKRPNKSSLARFFFKKQMCYMYMRACMLADIFPKKNLNNFHLALF

SEQ ID NO: 284067 - protein, 46 aa, Zea mays
  Clone ID: MRT4577_22169C.1.pep
EQALHKSMEIILSFNLCSACSYETLHISRIAMGSCCVVVLFWHRIP

SEQ ID NO: 284068 - protein, 1719 aa, Zea mays
  unsure (1)..(1719): unsure at all Xaa locations
  Clone ID: MRT4577_2216C.1.pep
MDPKGKGMVVDNNEKESIFNEPKNDKSTDLGSSHKRKDGKKKKTRRIKEIVYYDSDESSSSQKDDDDDYRKTVNSNFSFDYSRIPHSSNSHLLSIPLGKPPHFDGEDYRFWSHKMRSHLFSLHPSIWEIVENGMKFDSSDSPMFINEQIHKNAQATTVLLASLCRDEYNKVSGLDNAKQIWDTLKISHEGNDITMLTKMELVEGELGRFAMIRGEEPTQTYNRLKTLINKIRSYGSTRWTDHDVVRLLLRSFTILDPHLVNNIRENPRYTKMSPEEVLGKFVSGRMMIKEARYVDDALNGPINEPQPLALKATRSKEALPSKVAQIEAAGLNDEEMALIIKRFKTVLKGHKGQPSKTKTKGKRSCFKCGKIGHFIANCTDNESDQEHGSKREKKKNYKKAKGEAHLGKEWDSDCSSSDSDNEGLAATAFNKSALFPNERHTCLMAREKKVCTRNSTYASSSEDESSDEDEVDYSCLFKGLDRTKVDKINELIDALNDKNMLLEKQEDLLYEEHDKFVEAQRSHALEVKRNEMLSCELSSCHETISKLRSINDDLNAKLEIASKSTSCVENVVTCTRCKDINLDAYSEHLACISKLNEEVASLNAQLETSKSDFDKLKFARDAYTIGRHPSIKDGLGFKREAKNLTSHKAPIPAKEKGKAPMASSVQKNHAFMYHDKRQTRNAYRSYNTYDDFDSHDMFASSSFYVHNRNVGRRNAVHNMPRRNVVNVPRRVNEPSTIYHALNASFAICRKDRKIVARKLGARCKGDKTCIWVPKDICTNLVGPNMSWVYASGGSSWIIDSGCTNHMTGEKKMFTSYVKNKDSQDSIIFGDGNQGKVKGLDVSVFRRSDGSLAFKGVLDGKLYLVDFAKEEAGLDACLIAKTSMGWLWHRRLAHVGMKNLHKLLKGEHVIGLTNVQFEKDRPCAACQAGKQVGGAHHSKNVMTTSRPLELLHMDLFGPVAYLSIGGSKYGLVIVDDFSRFTWVFFLQDKSETQGTLKRFLRRAQNEFELKVKKIRSDNGSEFKNLQVEEFLEEEGIKHEFSAPYTPQQNGVVERKNRTLIDMARTMLGEFKTPECFWSEAVNTACHAINRVYLHRLLKKTSYELLTGNKPNVSYFRVFGSKCYILVKKGRNSKFAPKAVEGFLLGYDSNTKAYRVFNKSSGLVEVSSDVXEEDVPTAAIXTMAIGEVRPQEQDERDQPSSSTMVHPPTQDDEXRVEEALLDPDWVLAMQEELNNFKRNEVWTLVPRPKQNVVGTKWVFRNKQDEHGVVTRNKARLVAKGYAQVAGLDFEETFAPVARLESIRILLAYAAHHSFRLFQMDMKSAFLNGPIKEEVYVEQPPGFEDERYPDHVCKLSKALYGLKQAPRAWYECLRDFLIANAFKVGKADPTLFTKTCDGDLFVCQIYVDDIIFGSTNKKSCEEFSRVMTQKFEMSMMGELNYFLGFQVKQLKDGTFISQTKYTQDLLKRFGMKDAKPAKTPMGTDGHTDLNKGGKSVDQKAYRSMIGSLLYLCASRPDIMLSVCMCARFQSDPKECHLVAVKRILRYLVATPCFGLWYPKGSTFDLIGYSDSDYAGCKVDRKSTSGTCQFLGRSLVSWNSKKQTSVALSTAEAEYVAAGQCCAQLLWMRQTLRDFGYNMSKVPLLCDNESAIRMAENPVEHSRTKHIDIRHHFLRDHQQKGDIEVFHVSTENQLADIFTKPLDEKTFCRLRSELNVLDSRNLD

SEQ ID NO: 284069 - protein, 722 aa, Zea mays
  Clone ID: MRT4577_22170C.1.pep
MTEVGWHKPSRPRVPEDAVDRAARRVAAEEKKKKKDAEKARARERTRARDALEKLRRRQERDGLPREPSPETPDDDDDDEDDDEDDDMAARLGLSPGLRLGQESSSQPPSGLAPSVPGVGTPRSRPEERGQTEGVLDPSAGEVEVTPGSQAEASVPREPSPTPAAQESGPQVAVAALGQSVSRASKVPKARTVPKLAARRTSVVPSGVEIRETSPQARLIMARSGKRSHGLTNLAPRKALKTASASAAGAALGLAVQLTFSQGAPQWGAQAAPVAVERVPEAGSSAEAAIVLEEAAGADVASGPPDMPPVLAPAAAEVAAVPVGERPVAADAEMAEASALGASEEGGVETRPVPPSGSLVPARRSSERRRQLLRFRTREASDPFFVLDDEREEQCWDELRECAEATVGSLRSSLEVFCRDIPKILQDLTDLSAAKSSFIRHEVDIWGSLRSLRTSLTGATTRLSQQGTEVADLWLLCADLRAEAAAARAEAVAARAEAAAARAEVQRRQSEFDQVADERDQSQGRAAEAESRAGALAADLAVAQAAASEQRARAGGLALWPFAELESALDESTRALAGAAEQREADHAAMSEAISDFCQVFGFGDVPSGSSPPSRLQALGDHVCGRLHEVLHHGVRRAFTVLASHYVVDLERVSEGYCLPDEDEAALAKVQRLDAAAAGPSAVLATTFEAEILPPVPSSEAGVDFAEGGDEAEGAAPSPGDA

SEQ ID NO: 284070 - protein, 249 aa, Zea mays
  Clone ID: MRT4577_22171C.1.pep
MAPAAAEAVAVLAVERPVAADAEMTEASLLGASEEGGAGPRPVPSSGSLVPARRSSEGQRQLLWFRTREASDRFFVLDDEREEQSWDELRECAEATVGSLRSSLEVFCRDVPKILEDLTDLSAAKSSFIHREVDVWGSLRSLRTSLARATTCLSQQSAEVVDLRLLCADLGAEAAAARAEVQQRQSELDQVTGERDQSRGWAAEAESRAGALAADLAVAQAASSEQRARAGELESALDKSTRALAQAAE

SEQ ID NO: 284071 - protein, 152 aa, Zea mays
  Clone ID: MRT4577_22172C.1.pep
AKTLGCKRRPRPPPRAIRGDKPGTTTHPSTSPPTVGRKKAHIHPRFKPQPDHGSARPQGRETGAPGPARQGGARQREKNPSPKPGKGRQASTKKVLKLPPPPQSPGTGGGSPPKKFKPSKGPIKQRVFFFPKKKKKKKKKKKKKKKHHPPPT

SEQ ID NO: 284072 - protein, 528 aa, Zea mays
  Clone ID: MRT4577_22173C.1.pep
MRAILHVYGVELHNLSPNSISQAAIFAAVCEGYLGIDPHWDLWTHFFSAELFASSTGERRVRAAVRAGGCILQLRQARAPQYIPAILASSNKGWQRRWFYLRNDDGRLPSFSQRVVIVAADAWRYRTPHDRQKNLQPLLKALEVLRKGGLTAAGVIAAIHRRRVLPLAERRLPLWEMTPEADLEGSRMSSDSLPVDDLHGRVAIALGKPDVGALSQPLMRPDRGCVSLVSVRSFFLLASDCPWSSRPRLFVCLQEVGCHKPSRPPVPEAAVDRAARRVAAEKRKEKKDAKKARARERTRARDALEKLRRRQERDGLPREPSPETPDDDDDEDDDEDDDMAARLGLSPGLRLGQESSSQPPSGLAPSVSEAGTPGSRSEERGQTEGVLDPSAGEVEVTPGSQAELPVPRKPSPMPVAQEGDPQVVVAALGQSVSRASRAPKARMVPKLAARQTSTVPSGVEVRETSLQARLIMARSGKRSHGPTDLAPQKVLKAASASAAGAAPGLAGQLTFSQDAPQRGAQAAPVVVE

SEQ ID NO: 284073 - protein, 769 aa, Zea mays
  unsure (1)..(769): unsure at all Xaa locations
  Clone ID: MRT4577_22174C.1.pep
MIWRPSLLRVYFALSPMRGSRSGCPPPPSGAAPSPPPGYVVSFVSFHERRFGVPASRFMRAILHVYGVELHNLSPNSISQAAIFAAXGDRRCXPGATGPRTTDRESPAPSEGPGGVAXGGLTAAGVIAAIHRRRVLPLTERRLPLWEMTPEADXGFADVXIPFPLTTSHRRVAVTLGKSDAGALSQPLMRPDRGXVGCHKPSRPPVPEDAVDRAARRVAAEKRKEKKDAKKAWARERMRARDALERLRRRQERDGLPREPSPETPDDDDDDEDDDEDDDMAARLGLSPDLRLGQESSSQPPSGLAPSVSGAETSGSRSEERGQTEGVLDPSAGEVEXAPKARMVPKLAARQTSAVPSGVEVRETSPQARLIMARSGKRSHGPTDLAPRKVLKTALASAAGAAPXLAGQLTSSQDAPQRGAQAAPVAVKRAPEVGSSVEAVVALGEVAGAAVVSGPPDMLPALAPAAAEAVDVLAVERPVAADAEMAEASLLALDPLFVLDDEREEQSWDELRECAEATVGSLRSSLEVFCRDVPKILQGLTDLSAAKSSFIRREVDVWGSLRSLRTTLAGATTRLSQQSAEVADLRLLCADLGAEEAAARAEVQRRQSELDQVTGERDQSRGRATEAESRAGALAADLVVAQAASSEQRARAGELESALDKSTKALAQAAEQRLREALHHGVRRAFAVLASHYVVDLERVSEGYCLPDEDEAALAEVQRLDAAAAGPSAVLATTFEAEILPLLPSSEAGADLAEGGDKAEGATPSPGDA

SEQ ID NO: 284074 - protein, 65 aa, Zea mays
  unsure (1)..(65): unsure at all Xaa locations
  Clone ID: MRT4577_22175C.1.pep
FDPLLVEEALDMLQYSEEKMMEFLQLMSKFKEMGFELKDIKEVLLXHNNDQDNALEDLMARTGAS

SEQ ID NO: 284075 - protein, 177 aa, Zea mays
  Clone ID: MRT4577_22176C.1.pep
MADRVTIVSPRDPWPSSTVTAGDLEDLVAEGLLRPLSDERRPEWIPPVGGAASSPPPGYIVSFVSFHERGFGVPASRFMRAILHHYGVELHNLSPNSISQAAIFVTEVGWHKPSLPRVPQDAVDQAARRVAAEEKKKKKDAEKAQARERMRARDALEKLRRRQEREGTPEGAVAGNS

SEQ ID NO: 284076 - protein, 175 aa, Zea mays
  unsure (1)..(175): unsure at all Xaa locations
  Clone ID: MRT4577_22177C.1.pep
YLRNDGELLPSFSQRVVTIAADAWRHGTPHERQKNLEPLLKALEALRKGGLTAAGVIAAXSTAGGCFXLGRATVAALGDDXPEAXLGGLADVLGSSSLRRSPRAGGRRVGKTRHQRLLPALNAPRPRVRDPGECPLPPSPCAGLPLILTVGISICFQEVGWHKPSLPWVPEDAVD

SEQ ID NO: 284077 - protein, 768 aa, Zea mays
  Clone ID: MRT4577_22178C.1.pep
MADRVTIISPRDPWPFSTVTAGDLEDLVAEGLLRPLSDERRPEWIPPASGAAPSPPPGYVVSFVSFHEQGFGVPASRFMRAILHNYGVELHNLSPNSISQAAIFVAEVGWHKPSRPRVPEDAVDRAARRVAAEEKKKKKDTEKARARERTRARDALEKLRRWQEREGLPREPSPETPDDDDDDEDDDEDDDMAARLGFSPGLRPGQESSSQPPSGLVPSVPGVGTPRSRPEERGQTERVLDPSAREVEVTPGSQAEASVPREPSPTPAAQESDPQVAVAAPGQSVSRASKAPKARVVPKLPARRTSAAPSGVEIRETSPQARLIMAWSGKRSHGLTDLAPRKALKTASASAAGAAPGLAVQLTFSQGAPQQGAQAAPVAVERVPEVGSSAEAAIVLEEAADADVALVSPDVPAVLAPVATEVAVVPVGERPVAADTEMAEASALGASEEGGVETRSVPPSGSLVAVRRSSEGRRQLLRFRTREASDPFFVLDDEREQSWDELRECAEATVGSLRSSLEVFCRDVPKILQQGAKVADLRLLCTDLRAEAAAARAEVRRQQSQFDQFVNERDQSQGRAAEAESRAGALAADLAVAQVAASEQHARAGELEPALDESAKVLAEALAGAAEQREADHAAMSEAVSDFCRVLGFGDVPSGSSPQSRLQALGDHVRGRLREALHHGVRRAFAVLASHYVVDLERVSEGYCLPDEDEAALAEVQRLDAATAGPSAVLATTFEAEILPPAPSSEAGMDFAVGGDEAEGAAPSPGDA

SEQ ID NO: 284078 - protein, 666 aa, Zea mays
  Clone ID: MRT4577_22179C.1.pep
MRARDALEKLRRRQEREGLPREPSPETPDDDDDDEDDDEDDSMAARLGFSPGLKLGQEPSSQPPSGLAPSVPGVGTPRPRPEERGQTERVLDPSGGGVEVTPGSQAEASVPREPSPTPATQESDPQVDVAVPGQSVSRASKAPKARVVPKLPVRRTPAAPSGVEIRETSPQARLIMARSGKRSHGLTDLAPRKALKTASASAAGAAPGLAVQLTFSQGAPQQGAQAAPVAVERVPEADSSAEAAIVLEEAADADVAPAPPDVPAVLAPVATEAAAVPVGERPVAADAEMAEASALGASEKGGAETRSVPPSGSLVAVRRGSKGRRQLLRFWTRGASDPFFVLDDEREEQSWDELRECAEATVGSLRSSLEVFCRDVPKILQDLMDLSAAKSSFILHEVDVWGSLQYLRTSLVGATARLSPQGAEAADLRLLCTDLRAEAAAARGEAAVARAEVRRQQSEFDQVVNERDQSRGRAAEAESRAGALAADLAVAQVAASEQRARAEELESALDESAKALAEALAGAAEQREADHAAMSEAVSDFCRVLGFGDVPSGSSPQSRLQALGDHVRGRLREALHHGVRRAFAVLASHYVVDLERVSEGYCLPDEDEAALAEVQRLDAAAAGPSAVLATTFEAEILPPAPSSEAGMDFAEGGDEAEGAAPSPGDA

SEQ ID NO: 284079 - protein, 93 aa, Zea mays
  Clone ID: MRT4577_2217C.1.pep
TPYYKKVPSTHCGFAHNAKYGNSSDNFFKLPIKNCPTSKIGSIGPYSGTFLARTTWASGAPAGSALRARGGGGPGPSTAPASSWSGAPCCCCT

SEQ ID NO: 284080 - protein, 65 aa, Zea mays
  Clone ID: MRT4577_22180C.1.pep
GSFKMISPVLTRKQMALPWLKMIASSFLFAYFVVNGKVAHCYTSGCNHDRRDSFGSNAYANLICC

SEQ ID NO: 284081 - protein, 51 aa, Zea mays
  Clone ID: MRT4577_22181C.1.pep
VHASVRGNCGRVARASRNRRRHTVAVSTATTPPTCRRCMSRTTSSAPQSAP

SEQ ID NO: 284082 - protein, 301 aa, Zea mays
  Clone ID: MRT4577_22182C.1.pep
MSGSSPNPNDSSVNMSPNGEGANPNYQITLANTQSPKRNRYSPPRNIPMEMQCGYFNNEYINALKVSYKDRSFYGTPDFECRYCKAVFWYRERARGKHIDASILYNNCCKGGKIAIPPYKPHPEPLATLARFDGDSISKKFMRNIRQYNCLFAFTSMGANIDNSVNDGRGPPLFKICGQVHHRIGSLLPPDGSPPKFLQLYIYDTADEITNRLQCLDTNREYNGDLNPNIVQSLTRMLDIHNPFVKKFRMARDHLAGNEPGDFIIRIVGAKEVPLQKESAKSLFMLWSAIQSSKGRRTRMH

SEQ ID NO: 284083 - protein, 198 aa, Zea mays
  unsure (1)..(198): unsure at all Xaa locations
  Clone ID: MRT4577_22183C.1.pep
MDEAATAALATARGRWTQWEEVVVSNDRGSRLVHYYLRGNSEEKQLAVVGRERSPRHMSYAVQGRFLRAXRLPPGRSPSRRRHHGXLSAAGSDGGAPRRWRSRREVVDWLSSLVSGHNYGSSSMATRCSRDSYDDSVNNCTQVTASKDVSSREALNVFTWLGASCYLSQRLKXHFKSFCRRGNTISVHIFVFIMSEEM

SEQ ID NO: 284084 - protein, 41 aa, Zea mays
  unsure (1)..(41): unsure at all Xaa locations
  Clone ID: MRT4577_22184C.1.pep
KFILETPVXSKQIFSFLIELPQLVMTFENCLHNTLKSNALE

SEQ ID NO: 284085 - protein, 61 aa, Zea mays
  Clone ID: MRT4577_22185C.1.pep
SSQILGPCPLLIYIWIRPRLKKQFSELWNDLFLPGVPIYIFIYSICLIYNSASIYSLPSEF

SEQ ID NO: 284086 - protein, 321 aa, Zea mays
  Clone ID: MRT4577_22186C.1.pep
MGKKKKKKKVTEVEGGMMSLLRSCLESKAGSSKSMISGYIDHHQSLSSEDKGWGCGWRNIQMLSSHLLKQRQEAREVLFGGSGFVPDIPSLQRWLEIAWDKKFDTIGSSHFHNKVYGAKKWIGTTECATLFRSFGLRAKIVDFDSTESSDLQSKNSSHAASQVRGLMDKFLIKSNSPKSSSEFCQEDAESMRGQHALVDWVWNYFACERSDRLTTQRATVSNKTPLYFQHQGHSRTIVGIQKEMVHRGSQEQYTLLILDPGHRTADLERSLRSKNGWQRLVKRGVHTLRKPQYQLCYVDPGIASSEEMEQLKTIDSMLVRF

SEQ ID NO: 284087 - protein, 74 aa, Zea mays
  Clone ID: MRT4577_22187C.1.pep
GSQEQYTLLILDPGHRTADLERSLRSKNGWQRLVKRGVHTLRKPQYQLCYVDPGIASSEEMEQLKTIDSMLVRF

SEQ ID NO: 284088 - protein, 69 aa, Zea mays
  Clone ID: MRT4577_22188C.1.pep
MYSSDRGLDPLQDFSKDSMLLTKRYHMPVHMLFTMVAAPTTIGFAYMNFALSFANLIFILINNIICTSD

SEQ ID NO: 284089 - protein, 74 aa, Zea mays
  Clone ID: MRT4577_22189C.1.pep
RFKILNFKTQNCWQSPQMQKEKSKGVNPRVNRFNLPFLAPTSHRITHPPPKWMGSPPRHCGSGNRGKKKTTPGT

SEQ ID NO: 284090 - protein, 2184 aa, Zea mays
  unsure (1)..(2184): unsure at all Xaa locations
  Clone ID: MRT4577_2218C.1.pep
MAPLYTSAVLGYASVRWLKAFSDEQCAGINHFVALYAVPVLIFHMVSTNDPYHMNERLIAADTLQKAVVLLALTAWAFWSHLSRRRGGRGKRQVVQGAESPIKWVVTNFSVASLPNTIIMGVPLLDGMYGPVSGGLMKQIVVMQFCIWYNVVIFLYEFMAARDGSARISPAVPATAGERVVDDENGGSSSVHRHAAADRSHHHHQVVVNIEITEVAPAPAAEAVVASSLMPAAATKEMSPEDDGDANKQVVVAVDVQPPVMHVVWMATKKLLQIPNTYASFLGLIWSLMAFKIGFSMPKIVSDSLFIIYTTAVGLSMFASGTFIARQSRFVPCGYTVASLSMLLKFLIGPVIMLIASLAIGMHGTLLHIAVVQASRPTAPNNVYIYAALPLAVTSFVYAEEYKVHADIMSTGSVPFKFISFSSVKRLSQKPYMCLDQRRQQSLIEVPFHTAYINKRTGRHVNRCSSYTISSYIDTWYPIYHYTVSEEKDTIVILVVTDTKESNSNHPNGLIPKSLRHNNVTLKGKCALGPFLSILVIECQHKCFCVNLCKVVDKVQTKSKGKIELEKRWLCTAKVCSVWVHRTVRCARLALANSLLSGLRRRCTEKESFVNELKDDKPTDSGSGHKWKDGKKKKTRRIKEIVYYDDIDESTSSQKDDYDYEKRKTVNSNFSFDYSRIPQSTNAHLLSIPLGKPPHFDGEDYGFWSHKMRSHLFSLHPSIWEIVESRMKFDSTDSPMFINEQIHKNAQATTVLLASLCRDEYNKVSGLDNAKQIWDTLKISYEGNDVTMLTKMELVEGELGRFAMIRGEEPTQTYNRLKTLVNKIRSYGSTRWTDHDVVRLMLRSFTVLDPHLVNNIRENPRYTKMSPEEVLGKFVSGRMMIKEARYVDDALNGPINEPQPVALKATRSKEALPSKVAQVEAAGLNDEEMTLIIKCFKTALKGRKGQPNKTKTKAKRSCFKCGKIGHFIANCPDNDSDQEKGNKREKKKNYKKAKGEAHLGKEWDSDCSYSDSDNEGLAATAFNKSSLFPNEHHTCLMAKEKKVYTRDTTYASSSDDDSSDDDEIDYSSLFKGLDRIKIGKINELIDALNDKNRLLEKQEDLLYEEHDKFVEAQKSHALEVKRNEMLSCELSTCHETISSLKSINDDLNAKLEKSSKLTSCVEHVVICTRCKDFNVDACSEHLVSIAKLNDEVASLNAQLKTSKSEFDKLKFARDAYTIGRHLSIKDGLGFKREAKNLTSHKAPISAKEKGKAPMASSAKKNHAFMYHDRRHSRNAYRSYDAFDSHDMFASSSSYMHGRNVVHHMPRRNVVNVPRKINEPSTIYYACNASFAICRKGKKVYASGGTSWIIDSGCTNHMTGEKRMFSSYIKNKDPQDSIIFGDGNQGKVKGLDVSVFRRCDGSLAFKGVLDGKLYLVDFAKEEAGLDACLIAKTSMGWLWHRRLAHVGMKNLRKLLKGEHVIGLTNVHFEKDRPCVACQAGKQVGSSHHTKNVMTTSRPLEMLHMDLFGPVAYLSIGGSKYGLVIVNDFSRFTWVFLLQDKSETQGTLKRFLRRAQNEFELKMKKIRSDNGSEFKNLQVEEFLEEEGIKHEFSAPYTPQQNGAVERKNRTLIDMARTMLGEFKTPERFWSEAVNTACHAINRVYLHRLLKRTSYELLTGNKPNVSYFRVFGSKCYILVKKGTTSKFAPKAVEGFLLGYDSNTKAYRVFNKSLGLVEVSSDVVFDETNGSPREQVVDLDDVDEEDVPTAAMRTMAIGDVRPQEQLEQDQPSSSTMVHPPTQDDEQVHQEEACDQGGAQDDHVMEEEAQPAPPXQVRATIQRKHPIDQILGDISKGXVEEALLDPDWVLAMQEELNNFKRNEVWTLVPRPNQNVVETKWVFRNKQDEHGVVTRNKARLVAKGYAQVAGLDFEETFAPVARLESIRILLAYAAHHSFKLFQMDVKSAFLNGPIKEEVYVEQPPGFEDEWYPDHVCKLSKALYGLKQAPRAWYECLRDFLIANAFKVGKANPTLFTKTCDGDLFVCQIYVDDIIFGSTNQKSCEEFSWVMTQKFEMSMMGELNYFLGFQVKQLKDGTFISQTKYTQDLLKRFGMKDAKPAKTPMGTDGHTDLNKGGKSVDQKAYRSMIGSLLYLCASRPDIMLSVCMCARFQSDPKECHSVAVKRILRYLVATPCFGIWYPKGSNFDLIG

SEQ ID NO: 284091 - protein, 79 aa, Zea mays
  Clone ID: MRT4577_22190C.1.pep
VHTIHLFNTEGKPTRSTTGGGWSFPFLALLLDGNPNSTNTSWGCSSPPPPSFNVPGPWHIPLPDHSPVEVHTPAPFHLA

SEQ ID NO: 284092 - protein, 98 aa, Zea mays
  unsure (1)..(98): unsure at all Xaa locations
  Clone ID: MRT4577_22191C.1.pep
SDSHLFHAYAWLKLCNLGEGCYKWVVXYDLQIIASSVLLGELSVSPYDXKYGAFVTNNEKERIMCLFYLGNFSVDIKXEYRGMPSRPYLLLKWAIRGV

SEQ ID NO: 284093 - protein, 102 aa, Zea mays
  unsure (1)..(102): unsure at all Xaa locations
  Clone ID: MRT4577_22192C.1.pep
GAYFVFSYKFLFDFVDFYFFNFTCDLMMITLLAAADVWLQRAAGQLTRXGVRLQRTSGQCSPVGQCPPRKFVWQEFAPSGASSPVFTDLGHQRALNGSNFLS

SEQ ID NO: 284094 - protein, 111 aa, Zea mays
  Clone ID: MRT4577_22193C.1.pep
QYDGLSHPIVKLACDHAERAVGATQRCWGLFYELGHRIAEHGAYGRLLRHDELRTAIAIRVPPRDSAVSQLRLACCVLGEPDICQYVHHGRAVCWLAGESKTARSLLQLWL

SEQ ID NO: 284095 - protein, 87 aa, Zea mays
  Clone ID: MRT4577_22194C.1.pep
MDVNMRTMWSSMRVHVTMAVALVFLVSGAWCGPPKVPPGKNITATYGKDWMDANATWYGKPTGAGPDDNGGSCGYKDVNKPPFNSIG

SEQ ID NO: 284096 - protein, 78 aa, Zea mays
  Clone ID: MRT4577_22195C.1.pep
LGRGVSVGSVMSDSLNAGSAGVTLGLTVVSMGSWPSVSDYNCSMGVALVESVWSFSTGVSHSNGNNSMGMSEPLVGPH

SEQ ID NO: 284097 - protein, 114 aa, Zea mays
  unsure (1)..(114): unsure at all Xaa locations
  Clone ID: MRT4577_22196C.1.pep
SPNLVPWPIGSVFRRRVVPATLRVSERAVSARDGDRGRGACALALAPPLPPFPSLPPPVPPVPRPHEPXCWSECRPPPAPPHPPPPPTPAPHPPCPWARDHPPSTPPPPCTRAA

SEQ ID NO: 284098 - protein, 88 aa, Zea mays
  Clone ID: MRT4577_22197C.1.pep
PAARLVSWRGPADPSTGGFSFGLDPVTNLQLMVWHGAEPYCRISVWNGVSVSGGRYTGSPSSIGYQTSVNTGDEFYLAYTVSDGSPYF

SEQ ID NO: 284099 - protein, 78 aa, Zea mays
  unsure (1)..(78): unsure at all Xaa locations
  Clone ID: MRT4577_22198C.1.pep
GSKFCPNKXLRPKNPGVCFGPHQARVVLENFEIFVSGRASKKQVFVYNEKTLCYWACCGVSPGVSNVKVPMVGFSNPP

SEQ ID NO: 284100 - protein, 556 aa, Zea mays
  unsure (1)..(556): unsure at all Xaa locations
  Clone ID: MRT4577_22199C.1.pep
MEITASCDDGAVTAGAVSGVLLASVLSLFGAFLVYFYAPFWSVRRVPGPPARFPVGHLHLLARNGPDVFRAIAKEYGPIFRFHMGRQPLVIVANAELCKEVGIRKFKDIPNRSTPPPSIGSLHQDALFLTRDSTWSAMRSTVVPLYQPARLAGLIPVMQSYVDTLAANIAACPDQDCVPFCQLSLRMAIDIIGRTAFGIEFGLSKNAAGTGSSGSESXQAAARARARATSXEFLREYKRSMEFVKMDLTSSLSTILGLFLPCVQTPCKRLLRRVPGTADYKMDQNERRLCSRIDAIIAGRRRDRATRRRCGPGAAPAPLDFIAALLDAMESGGGAGANKDFALADRHVRALAYEHLIAGTKTTAFTLSSVVYLVSCHPLVEAKLLREVDGFAPRRGRGRAPDADELQSGFPYLDQVIKEAMRFHVVSPLIARQTSERVKIGGYVXPKGAYVWLAPGVLARDAAQFPDPEEFRPERFAPEAEEERARHPYAHIPFGVGPRACIGHKFALQQVKLAVVELYRRYVFRHSPSMESPIQFDFDLVLAFRHGVKLRAIRRG

SEQ ID NO: 284101 - protein, 1557 aa, Zea mays
  unsure (1)..(1557): unsure at all Xaa locations
  Clone ID: MRT4577_2219C.1.pep
MDPKGKGIVINDKEKESFVNEPKDDKPTDSGLGHKRKDGKKKKTRRIKEIVYYDDSDESSSSQKDNDDNDYEKKKTINSNFSFDYSCIPQSTNAHLLSIPLGKPPHFDGEDYGFWSHKMRSHLFSLHPSIWEIVESGMKFDSTDSPMFINEQIHKNAQATTVLLASLCKDEYHKVSGLDNAKQIWDTLRISHEGNDVTMLTKMELVEGELGRFAMIRGEEPTQTYNRLKTLVNKIRSYGSTRWTDHDFVRLMLRSFTVLDPHLVNNIRENPRYTKMSPEEILGKFVSGRMMIKEARYVDDALNGPIHEPQTVALKATRSKEALPSKVAQVESAVLNDEEMALIIKRFKTALKGRKEHPNRNKTKGKRSCFKCGKIGHFIANCPDNDSDQEKKSGKWEKKKNYKKAKGEAHLGKEWNSDCSSSDSDNEGLAATAFNKSSLFPNEHHTCLMAKEKKGLDRTKVDKINELIDALNDKNRLLEKQEDLLYEEHDKFVSAQNSLALEVKRNEMLSYELSTCHETISTLKSANNDLNAKLEVSSKPNSCVEHIMICNRCKDFNVDACSEHLVCISKLNDEVASLNAQLKTSKSEFDKLKFARDAYTIGRHPSIKDGLGFKREVKNLTSHKASISAKEKGKASMASSAQKNHAFMYHDRRHSRNGYRSYDTFSHAMVASSSSIIHDRNLARRNVINHMPRRNVAHVPRKTNSEPSTIYHALNASFAIYRKDRKIVARKLGAKCKGDKTCIWVPKDIVTNLVGPNKSWVYASGGSSWIIDSGCTNHMTGEKQMFTSYVKNKDSQDSIIFGDGNQGKVKGLGKIAISNEHSISNVFLVESLGYNLLSDKSETQGTLKRFLRRAQNEFELKVKKIRSDNGSEFKNLQVEEYLEEEGIKHKFSAPYTPQENGVVERKNRTLIDMARMMLGEFKTPERFWSEVVNTACHAINRVYLHRLLKKTSYELLTGNKLNVSYFRVFGSKCYIQVKKGRNSKFAPKAVEGFLLGYDSNTKAYRVFNKSSGLVEVSSDVVFDETNGSPREQVLDLDDVDEEDIPTAAIRTMAIGDVRPLEQKEQDQPSSSTMVHPPTQEDKQVHQEEACDQGGAQDDHLMEEEAQPAPPTQVRATIQRNHPVDQILGDISKGVTTRSRLVNFCEHYSFVSSIEPFRVEEALLDPDWLLAMQEELNNFKRNEVWTLVPRPKKNVVGTKWVFRNKQDEHGVVTRNKARLXAKGYAQVXRLFQMDVKSAFLNGPIKEEVYVEQPPGFEDERYPDHVCKLSKALYGLKQAPRAWYECLRDFLIANAFKVGKADPTLFTKTCDGDLFVCQIYVDDIIFGSTNQKSCEEFSRVMTQKFEMSMMGELSYFLGFQVKQLKDGTFISLTKYTQDLIKRFGMKDAKPAKTPMGTDGHTDLNKGDSDYAGCKVDRKSTSGTCQFLGRSLVSWSSKKQTSVALSTAEAEYVAAGQCCAQLLWMRQTLRDFGYNLSKVPLLCDNESAIRIADNPVEHSRTKHIDIRHHFLRDHRQKGDIEVFHVSTENQLADIFTKPLDEKTFCRLRSELNVLDSRNLD

SEQ ID NO: 284102 - protein, 481 aa, Zea mays
  unsure (1)..(481): unsure at all Xaa locations
  Clone ID: MRT4577_221C.1.pep
MRECISIHIGQAGIQVGNACWELYCLEHGIQADGQMPGDKTIGGGDDAFNTFFSETGAGKHVPRAVFVDLEPTVIDEVRTGTYRQLFHPEQLISGKEDAANNFARGHYTXSNLIXRQFSLLLDICSVMNISFKPDSLFXVGKEIVDLCLDRIRKLADNCTGLQGFLVFNAVGGGTGSGLGSLLLERLSVDYGKKSKLGFTVYPSPQVSTSVVEPYNSVLSTHSLLEHTDVAILLDNEAIYDICRRSLDIERPTYTNLNRLVSQVISSLTASLRFDGALNVDVNEFQTNLVPYPRIHFMLSSYAPVISAEKAYHEQLSVAEITNSAFEPSSMMAKCDPRHGKYMACCLMYRGDVVPKDVNAAVATIKTKRTIQFVDWCPTGFKCGINYQPPSVVPGGDLAKVQRAVCMISNSTSVVEVFSRIDHKFDLMYAKRAFVHWYVGEGMEEGEFSEAREDLAALEKDYEEVGAEFDEGEDGDEGDEY

SEQ ID NO: 284103 - protein, 833 aa, Zea mays
  unsure (1)..(833): unsure at all Xaa locations
  Clone ID: MRT4577_22200C.1.pep
EFLWDIPQEXRAALWGHCQSLFMRYSFPPLKAGLFFLKHAEAVGKEIPAQELHEILLLSLQWLSGTMTKSSPVYPLHLLREIETRVWLLAVESESQSKVDGEFATSAVAHNKAVGNSSSIIEHTADIITKIDSNMSLPHMKITERNSTRDSLSYQHVQLFESNSEASSTTINNTRAKRRMKTNSPLKRGVNDNIESRANELDNNSNTLHSSKIGEQARNLLSEEEFVKMEASLSGWEQNVRPVDMEKAVLSLLEFGQITAAKQLQQKLSPSYIPEELVLVDVALRIAKNSSNGEINLSCFDTQALRILQSLRVANSCDMISPSQVMEILAAKCGEGRGRALIRRIIGVVRTARLLGLPFSEAFEKQPIELLQLLSLKAQDSFDEAKFLVETHIMPASSIARILADSFLKGLLAAHRGGYLDSQKEEGPAPLLWRSSDFLKWAKLCPSESEIGHALMRLVMTGHEVPHACEVELLILSHHFYMSSSCLDGVDVLVTFAANRVDSYVLEEDFSCLARLITGVSNFHSLSFILSILVENGQLELLLQKYSATDTATGTLASVRGFRMAVITSLKQFIPNDDDALSMVYKHFDMKHEAASLLESRAEQYMNSWLSRYDKERRNDELLDAMHHLVETAEVLSTIDAGQRTHRACARASLLSLQIRIPDLLWIGLSETNARRIFVEQSRFQEALIVAEAYNINQPIEWAPVFWNQMLKPDLIEQFVAEFVSVLPLQPPMLLELARFYRAEVAARGEQSHFSVWLSPGGLPAEWVKHLGRSFRSLLRRTRDMRLRLQLATLATGFIDVLVICNRVLDKVPDNAGPLILRKGHGGAYLPLM

SEQ ID NO: 284104 - protein, 70 aa, Zea mays
  Clone ID: MRT4577_22201C.1.pep
LNTMVAYRPNTLFISITANRFLNPRTHTHHFFIDPDPLHYLKKCSPASRSKTLGGCRAPTYTIRTPKMYI

SEQ ID NO: 284105 - protein, 92 aa, Zea mays
  Clone ID: MRT4577_22202C.1.pep
KKSKNRVGAQPNFENYPLAKGWKKRGPIFETQGLGKKRGEWQMGPPSKWGLGKPFYPSKLQKGGPSLSRNPRGLFRGKKTLGEQGLFPPPDQ

SEQ ID NO: 284106 - protein, 201 aa, Zea mays
  Clone ID: MRT4577_22203C.1.pep
FLLIFNAGQPHFPWPSSTSRLSVGRCSSPPHGASSAPARPRPACAAPWRSSSFLPTARPSHGCLRRAPCSSARSRVPLPTIHFPAEVSPSRPSFLSTPAALFPCLAASSSGPARCPSAHARPSSDLAPVRRSPFLAVEAGHCCSASLVRAICRPGPLTCGLLAACSGRRPRLACIVRLFNHGRCCAPLSLMHIARYLDHAD

SEQ ID NO: 284107 - protein, 109 aa, Zea mays
  unsure (1)..(109): unsure at all Xaa locations
  Clone ID: MRT4577_22204C.1.pep
SSDRLSSPTHRAKEEREIAAPLLVVSGAEVESPACRCRGRSRIDDDEENGHRARMESFVGGMAVSDLEKXTLGLNRMDKILERTGRGRNVTATDDGTTIXKSPSIDNPA

SEQ ID NO: 284108 - protein, 44 aa, Zea mays
  Clone ID: MRT4577_22205C.1.pep
ISTHCTYLARNSNSFGGGVLNDLLDISGSSTSRTAFPRTACFLL

SEQ ID NO: 284109 - protein, 92 aa, Zea mays; identical to SEQ ID NO: 249594
  Clone ID: MRT4577_22206C.1.pep

SEQ ID NO: 284110 - protein, 79 aa, Zea mays
  Clone ID: MRT4577_22207C.1.pep
LCSWLFWFPCWKTFFVPPPFFVGCFFFFPPPLFFFFFRLRIFLGNCFSYFFFSLMSSMPFFSLALIQFTIGKNGNPTKT

SEQ ID NO: 284111 - protein, 84 aa, Zea mays
  Clone ID: MRT4577_22208C.1.pep
AITIFPQFPLLPFFPPSLVPIWVPLESPAIVLNFAFSLFPAEFTIENGSNVFLSFFSFILICFPLFFLTFLILGNGHFFFFFTF

SEQ ID NO: 284112 - protein, 75 aa, Zea mays
  Clone ID: MRT4577_22209C.1.pep
CSIRSRRLDQSSAAHGSLHTLDHFTQETRPTNAEDGNQAMRSAGEQDYDDHKGGWNYCLSPGQYDRGELLREACI

SEQ ID NO: 284113 - protein, 158 aa, Zea mays
  unsure (1)..(158): unsure at all Xaa locations
  Clone ID: MRT4577_2220C.1.pep
MATGSAAGEESSAAARRLRRLSLHLLQPAPAXPPPAAGPRGVRAPRRGRHGRXAAALAAYLRGRHRAAQMRLFDFFRARPDLQTPIELPTAAHRDLCYRQLRTLVREAGVRPLTLMATDPAEYFAVMEAAGGADISLGVKLGVQYRIECPSPTNYRYI

SEQ ID NO: 284114 - protein, 81 aa, Zea mays
  unsure (1)..(81): unsure at all Xaa locations
  Clone ID: MRT4577_22210C.1.pep
NTTILVGYLDPNGTGDHLRQGYGHYAELVHVKIPAGKRCXFVQFADRSCAEEALRVLNGTLRSGQNVRLSWGQVFQQTAQQ

SEQ ID NO: 284115 - protein, 60 aa, Zea mays
  Clone ID: MRT4577_22211C.1.pep
DIARIKFVCGCAINVLVVYAHVYLAQLMTINALLSILLGSGMSFTMWGALAVHVQPCVMS

SEQ ID NO: 284116 - protein, 57 aa, Zea mays
  Clone ID: MRT4577_22212C.1.pep
TRLCQLGVAGPGASLYVSGRDGQQLPSGTGGARSTSPLTTLSSVGGSPCGGTHPGTA

SEQ ID NO: 284117 - protein, 48 aa, Zea mays
  Clone ID: MRT4577_22213C.1.pep
GAGRHPNTLDVAFPVFIHLMDLLKPLVYKDVQCDGCPISTWRIYQQHL

SEQ ID NO: 284118 - protein, 114 aa, Zea mays
  unsure (1)..(114): unsure at all Xaa locations
  Clone ID: MRT4577_22214C.1.pep
QAPPRAAAPATAARREEGKRRXPPEANPAXXNQPTRGPGXAERXEQXGDAHGPDDEGRAXXPHPAXAGPPRHPXTAPDEEXKEEARAPATPTAGGKDXSKKXHXTKQTPARPGN

SEQ ID NO: 284119 - protein, 255 aa, Zea mays
  unsure (1)..(255): unsure at all Xaa locations
  Clone ID: MRT4577_22215C.1.pep
MPPPPTLPPSSPDDPAEPSSMGREMDDEDLVEELLLTVNAARAFAEFRRTQRKECANLLRWLQLVLPHLSLAPNYALKNLILQWCERNMVELQKREPAETESERKGEAADAADSIPSLVEGMSSIHPDVQRKAVKKIRRLSKECPENRALIVDSGATXALIGLLACPDKKAQENTVTSLLNLSIDDKNKALIARGGAIPLVIEILRNGSPEAQENSAATLFSLSMLDENKAAIGSLGGLAPLVELLRSSGTAPRK

SEQ ID NO: 284120 - protein, 80 aa, Zea mays
  Clone ID: MRT4577_22216C.1.pep
KVEALTRRLVVLQGVRAACRGAKCSTCSTYKGFSAHQGACWGNSKTSLCFFLGHGTHKLTTRMIRTTSAFLLCDQETRMI

SEQ ID NO: 284121 - protein, 91 aa, Zea mays
  Clone ID: MRT4577_22217C.1.pep
LFRRLNLENVGGDSLRGIIREPFSFFRCHHGGLMLRRLTIKMDLKKEKCSLMKPLRLAAAVAVSQPSSLAWRMQGAPHASSAAPAGRRKVS

SEQ ID NO: 284122 - protein, 284 aa, Zea mays
  Clone ID: MRT4577_22218C.1.pep
IDEIDKITKKAESANVSRDVSGEGVQQALLKILEGTVVSIPEKGSRKNSRNDSIQIDTTDILFICGGAFVDLEKMSSERRQDSSIGFGAPIRTNMRSSGASCPMVTSSLLESVESGDLVRYGLIPEFIGRLPILVSLAALNEGQLVQVLTEPKNSLSKQYRKMFNLNKVKLHFTDGALRLLAKKAIAKSTGARGLRAILETVLLEAMYEVPDEKTGNERVDAVVVDEEAIGSVDRPGCGAKILRGDGALDQYITRTNVMNLQETNDGLAGELEEAYMLSRIVSL

SEQ ID NO: 284123 - protein, 52 aa, Zea mays
  unsure (1)..(52): unsure at all Xaa locations
  Clone ID: MRT4577_22219C.1.pep
GIITLIWLTHKSNTLEVYIEGLYXXYIGQXXXXXXXXXDDLGLETEAIPPRK

SEQ ID NO: 284124 - protein, 394 aa, Zea mays
  Clone ID: MRT4577_2221C.1.pep
YFCNLSAKTIIGTETNRTCHVTTLAFEEEDRFFEKNSELVDKNAASYFYNFAATEWLIQRLETMSAAVLSFSALIMALLPQGTFNPGFVGMALSYGLSLNISFVFSIQNQCQLASQIISVERVHQYMDIPSEAAEIIEENRPAPDWPQVGRVDLKDLKIRYRQDAPLVLHGITCSFHGGDKIGIVGRTGSGKTTLIGALFRLVEPTGGKIIIDSIDITTIGLHDLRSRLGIIPQDPTLFQGTIRYNLDPLGQFSDQQIWEVLGKCQLLEAVQEKEQGLDSLVVEDGSNWSMGQRQLFCLGRALLRRCRILVLDEATASIDNATDAILQKTIRTEFRDCTVITVAHRIPTVMDCDMVLAMSDGKVVEYDKPTKLVETEGSLFRDLVKEYWSYTSN

SEQ ID NO: 284125 - protein, 36 aa, Zea mays
  Clone ID: MRT4577_22220C.1.pep
LSFLFHSFLGFFICSLGTIRNVRTLSAGVKLPPGLA

SEQ ID NO: 284126 - protein, 78 aa, Zea mays
  Clone ID: MRT4577_22221C.1.pep
HPGRGGRLNWVVLHRRSTVNDFILCNNADGETGPLNFYWRHKVRHYGTDYIVIVLLTNDVFLAYMVCHVDRADICGQH

SEQ ID NO: 284127 - protein, 105 aa, Zea mays
  Clone ID: MRT4577_22222C.1.pep
IKKKKKKKKKKKKKKKKKKKKKKKPKKKKKIEPAPFCRFPWPCFGVFLSLGGPFLPPSGGPFPGLCSSLFLFLGGRFLRFYWDPLGFSVLFFLLPGPLFAPCGFA

SEQ ID NO: 284128 - protein, 88 aa, Zea mays
  Clone ID: MRT4577_22223C.1.pep
RRFKSKPYVTVSPVKKIPPIFFLPCLNSHGGYFFDLKGFFFALNHLFRGLFPQKKLNSSRLWFLIITVLMGFLGVSLFNNNSPFNWGP

SEQ ID NO: 284129 - protein, 177 aa, Zea mays
  unsure (1)..(177): unsure at all Xaa locations
  Clone ID: MRT4577_22224C.1.pep
GPSRAXXGRQPLPVDFFFPPLTPSSLFPASSIFSCASSRVPSLPARIPARRAPSSLPRHGRRAPVPARSAILPAFSHGTGRPYSIRQLASSRSAPWWLELAMGAGRCCFLCCSSGPYSDPLRAPLVLARPRPCRAPSLLLSPLDHHRCARGFESLRRLGRACSSXLQRARFSFFGLR

SEQ ID NO: 284130 - protein, 190 aa, Zea mays
  Clone ID: MRT4577_22225C.1.pep
YDPFVGGAPRAVLPCKGRFSPAGCGAVRRSPNSSCCGGRHPRHAAAVAKLVVPAVGFGSTAPSSCCCCSRSSCRYRQPPISAGSVPSGIHLRTTSSQRLFCCGSGQSVGVWNLLLFSCATFERRGSGCSMSSMLRSVLWPCREMRLMCPWIDDQASQKGCRQEETTRKLSVGGYDEEDGADAYTDGPDIP

SEQ ID NO: 284131 - protein, 73 aa, Zea mays
  Clone ID: MRT4577_22226C.1.pep
KKSSGAFLVSGKSQKTGSFGLTFTQKHKGGDILFYKTVLQPLNVQCARRLFSESHPALFCNPTNFFSPRHRFF

SEQ ID NO: 284132 - protein, 70 aa, Zea mays
  Clone ID: MRT4577_22227C.1.pep
MAASQSPTLLLLAVVLAAVAPGPSSARHVINFAPSRAVNPASLAWDPTAQHFVGVGGGDAGLCGSDSSSL

SEQ ID NO: 284133 - protein, 56 aa, Zea mays
  unsure (1)..(56): unsure at all Xaa locations
  Clone ID: MRT4577_22228C.1.pep
ASTSGIILLAKERIGLSYRVWPGGYRKCKLRSQLADCMSFGVFVGQCINKYSCXPT

SEQ ID NO: 284134 - protein, 115 aa, Zea mays
  Clone ID: MRT4577_22229C.1.pep
LFFTWNVKCIFYVIKKDTGRRMFRSRPTKRRDTSMKQLANIKMGYLPLPALLSKIINTDSRAGQILWQKKKTSACEAFQLYIYKETGTHSPIPRDTGTYHLMMDFKFYTIVLEYF

SEQ ID NO: 284135 - protein, 87 aa, Zea mays
  unsure (1)..(87): unsure at all Xaa locations
  Clone ID: MRT4577_2222C.1.pep
GDQASFEKDTQVSLQXFSGSSAISSADLFGHPANNSRVDLSASDLINRISFQATQDLSSLKNMAGETGKRLTSMASNIIIDFQDRIL

SEQ ID NO: 284136 - protein, 166 aa, Zea mays
  Clone ID: MRT4577_22230C.1.pep
VYRDTSRVAERQGGCWSRGFQPTPSMDLARREADRAAAAEFVALDIRGEGESPANDPELLMESSFVAAKEFERDRRGDVISSSSGAYEKQTVPVHVDDCPREHLQPSTPTAGGGAKRRRSSRRVLGWRDPRKILFAFAALSSVGTLILLYFTLSMGKMTGGQADGQ

SEQ ID NO: 284137 - protein, 92 aa, Zea mays
  unsure (1)..(92): unsure at all Xaa locations
  Clone ID: MRT4577_22231C.1.pep
ECLYVVGTMRGPNREVTGIATAIDNSPVIASFFFYKSGVVCDLSNPVHYTPESGVAADYIVGFRRLTGHFNCDQDXVLSSDXQFARXGSWDG

SEQ ID NO: 284138 - protein, 110 aa, Zea mays
  Clone ID: MRT4577_22232C.1.pep
PRVRKDAVLLAAKKAKEAGSTRFCMGAAWRETIGRKTNFNQILEYVKEIRYSLESFVYMAKVWYMTLDLHNHAQLSVTYDVQVIDLTALITWNMKIYPASKSFMHDSYIF

SEQ ID NO: 284139 - protein, 63 aa, Zea mays
  Clone ID: MRT4577_22233C.1.pep
PLSSFFFFFFFFFFFFFFFFFFFFFFFLAQKTHKKQSKIFFYKRKGPKGGLRVKNTPPLLVFF

SEQ ID NO: 284140 - protein, 86 aa, Zea mays
  unsure (1)..(86): unsure at all Xaa locations
  Clone ID: MRT4577_22234C.1.pep
HDKHYMRKTHXIRGLRELTWVVIYYYNDYILDKLHDLAHYNPLLNITPKQTDIIYKLEHTRSNQNKSSSKCTLHSSIFFRTLRTLI

SEQ ID NO: 284141 - protein, 78 aa, Zea mays
  Clone ID: MRT4577_22235C.1.pep
SGCLDGLDRLSPGSCFGVNQRISYRRLQNIPDYALLHKNNTSKARSAQYQQNLNNHVSCLISTCIFHLPVIRLLKQML

SEQ ID NO: 284142 - protein, 790 aa, Zea mays
  unsure (1)..(790): unsure at all Xaa locations
  Clone ID: MRT4577_22236C.1.pep
MESGDTKFDASQYAFFGNNAVEEVELGGLDDDDDAAFIEHEDEENPLYGRDNMLEEGVGSFADIDDLAGTFSKLTRIVNGPKQPVVVSHSGSISRQSSNAEWVQESELPYWPTQPVLDTDHGLDKKNWWSQPPHSVNFIDYRLQRTSSSPQQDAQHNPVEPILEAKPSPLHRTSTYPQQEPQYSNTEPIPVPKSSFISCPPSGAASHSSPSQPHHVNMPSPPTAFQLHMSSAQNDLLLPQFHHGGTPPGPPFGRQNHVLNNGSMHGKGPRFMPGLMPHQLQCPNGLMPPQMQPPHQHGMLPIQQSPPQFSQLHARMIGPHHSPPQSMQMFGPQHPSSQVMSRFDANFAMPDLSDPRARSMLQXKAGTALSSPRXELNNIRIDNGWSRFRSKYMCTEEIENIARMQQAATHINDPYIDDYYHQACLAKKSAGAQLKHHFCPTLIRDPSSRARSKDEPHAYLQVDALGRLPFSSIRRPRPLLDVEQASAPSDNAEKSVSKPLDQEPMLAARITIEDGLCLLLDVDDIDRLLQFSQQQDGGLQLRNRRQGLLEQLAESLQLVDLLAPNKNSPVSPYDDLVFLRIVTLSKGQKLLSHYLELLTSGSELARIACMAVFRHLRSIFGNMPSDISAVETMNRLAKAVSAHIVQMDLSDLSACLAAVVCSSLQPPLRPLGSPAGDWASVIIKYVLDRATVLLTDHHVASNYSMRNRSLWQASFDAFFGLLTQYCMSKFDRVVHTAQLQPAAATVITREMPVELLRASLPHTNEAQRKQLLSFAQRTVPVGTHSSHGSW

SEQ ID NO: 284143 - protein, 71 aa, Zea mays
  unsure (1)..(71): unsure at all Xaa locations
  Clone ID: MRT4577_22237C.1.pep
SHIAVEFVEFVXTKINCRSGXKLEMDPKFLNNGDAGMVXMIPPLPMVVVAFSXYPPLGRLPAFTIGIRRVL

SEQ ID NO: 284144 - protein, 179 aa, Zea mays
  Clone ID: MRT4577_22238C.1.pep
MAENGEEKLLATVQHIVQTLGRTDTMTEDILKVFSNYDGRLSLDKLYATRAAAAAAAVGGAGERSVPASPPMPPPPVAPSAAAAMPPVTSLERTVRTLDRQISQFVAMDRLIWADSADADAFLEAVDDLIGTVQELDAAGTNRGLLDRADELLSRCMARLEDEFRALIERPDDAAPQVT

SEQ ID NO: 284145 - protein, 333 aa, Zea mays
  unsure (1)..(333): unsure at all Xaa locations
  Clone ID: MRT4577_22239C.1.pep
MGSLDTTPTAAFADVAGGGFEPLNADDVRSYLHKSVDFIYDYYKNVESLPVLPGVEPGYLRRLLQSVPPTSSAPFDIALKEVRDAVVPGMTHWASPNFFAFFPSTNSAAAIAGELIASAMNTVGFTWQASPASTEMEVLALDWLAQLLRLPPTFMNRTAAAGRGTGGGVILGTTSEAMLVTLVSARDAALRRAGSVGVAGITRLAVYAADQTHSTFFKACRLAGFDPANIRSIPTGPETDYALDPARLLEVMQADVDAGLVPTYVCATVGTTSSNAVDPVGAIADVAAVFNAWVHIDAAYAGSACICPXFRHHLDGVERVDSISMSPHKWLMT

SEQ ID NO: 284146 - protein, 72 aa, Zea mays
  unsure (1)..(72): unsure at all Xaa locations
  Clone ID: MRT4577_2223C.1.pep
IRYPCLILILETELVYNKFSNDPFTADXSVHSIFNTXCEKHGMLIMVAGDSIILTPPLIMTSNEVQEIINKF

SEQ ID NO: 284147 - protein, 333 aa, Zea mays
  unsure (1)..(333): unsure at all Xaa locations
  Clone ID: MRT4577_22240C.1.pep
KYFCQTTALPTGVYNQALHWLSFAHAEAYDYIHSKGESKRKPVVGVAHHVSFTRPYGLFDVAAVTLANSLTLFPYIERLCGPWDKAGTDYAGQGEGTGPGQRVAGNDETSDGGXGFVHDIVSVSLTHFGEMRNIAKVRSISAKHGXVCEXSEMVNXFMKSCKQYMLQXXXXXXXXXXMGVPGLGYLFWTTSDNWEWADGYGPKFGLVAVDRANNLARKPRPSYYLFSKIVTTGKITRHDRLAAWRELQQAAFQKKTRPFFRAVDKHGRMYAGGLDRPIQRSFILRDWRFGHYEMEGLQDPFSRFITSIISTILWKKKKIRYIEDEDISYSLSC

SEQ ID NO: 284148 - protein, 134 aa, Zea mays
  Clone ID: MRT4577_22241C.1.pep
HTAISEAAILYLCPNDVVVLIHRYAQQTDAGQETKCLILSPKALVNVKPNLQIIADDVKCTHGAAISGELDPNELFYFQARGINTETATDALLYFFGAHVIKRIPFKQITEKALAQFKELLASSRQTTDEALRS

SEQ ID NO: 284149 - protein, 152 aa, Zea mays
  Clone ID: MRT4577_22242C.1.pep
MRSATLLTICTLSALLLVARGSEKPSAAPPPVVAVGVAAASDLIRSGGHRYLDVRTEEEFRSGHVEDSLNVPYLFFTSQGREKNPKFIAQVAAGFDKEDNIVVGCKSGVRSELACADLMAAGFRNVKNIEGGYTAWVESGLAVKKSQAQDEL

SEQ ID NO: 284150 - protein, 79 aa, Zea mays
  Clone ID: MRT4577_22243C.1.pep
MASVSLSEDVNVYIVHGVQADLRVDGRGCADYRCVEVATAVASNTSGSARVELGHTVILVGVTAEMGTPQLQRRRAGYL

SEQ ID NO: 284151 - protein, 157 aa, Zea mays
  Clone ID: MRT4577_22244C.1.pep
MTERRAGMAVAVAVALLLLSSFGVASAAGRGRPTKKTLKPGEKPSPKSKFFPLSRTKFGHKRNYEASCADEGGPACYVGCPAECPNSCLVFCEYCLSFCQCDIFPGTSCGDPRFTGGDGYTFYFHGSKDQDFCIVFDAGLHINAHFIGNHNPALNRD

SEQ ID NO: 284152 - protein, 96 aa, Zea mays
  Clone ID: MRT4577_22245C.1.pep
LLLDLFIYIIDGIGGRQGQIQAMSILLVHPYCQEQERRCRRGPGRAVARTRARRAPAPCAPTGHTLAVVREHVPGGVPESPVCPRPPRAPSSGGRS

SEQ ID NO: 284153 - protein, 137 aa, Zea mays
  Clone ID: MRT4577_22246C.1.pep
PGTSTYIAGVQEDRALYLDPHDVQSPVDIAPDNLEADTSSYHCSVVRDLALEQIDPSLAIGFYCRDKDDFDDFCSRASELAEKANGAPLFTVMQSVQPSKQMYKQDDGLCCCSGSSMANEDYDLDASGEAGEEWQIL

SEQ ID NO: 284154 - protein, 56 aa, Zea mays
  Clone ID: MRT4577_22247C.1.pep
LIINVFILFFDYFLIIFSRSVQLLNYGLFLCLPCNYNIIMYIIYKTIQPLRCWSCS

SEQ ID NO: 284155 - protein, 563 aa, Zea mays
  unsure (1)..(563): unsure at all Xaa locations
  Clone ID: MRT4577_22248C.1.pep
MADWEGIPPRERRQMEEILQLDMEELNVEVVDDNEEDEEEEEGDGNEEDYDVDAFLRDNNGDGVASTSGPFTFNRSLASLHTYLGEVDDTRGRVTLLDGGTILNLPMFYLQGVVLFPGATLPLRVIQDRLVVTIDKALRLVDAPCTIGVVLMRRLPNHRHYATASVGTTAEIRQFGRLEDGSLNVVARGQQRFRLRRHWIDVDRVVWGEVQIIEEDTPLRTPRDAFAQVAACNTFNLHASSSVISLDRSPMKQDHIDSELECNTPSPNSKISNPSSMDSRLCHLXSQSSDSMKSSSDEDGDLMPKQFWKRKQHSVRESGASSHSDKKTNMRNDNNLCLTPLQSSPXQKQEMLSGGDSTMLTQSRLXAPLSFWPRWVYEMYDSYTLARSAAELWRQIIANPSMDDHVRKPDILSFHIGSKLPVSESVRQKLLEIDGVSYRLQKEIQLLKAFNHIKCRNCQSHIAKRSDMVVMSTDGPLGAYVNPHGCVHETITVSNATGLALIGNPSKVHSWFPGYSWTIAACMACESHIGWLFRATKKNLRPRSFWGIRSSQIADDTQVDQGD

SEQ ID NO: 284156 - protein, 707 aa, Zea mays
  unsure (1)..(707): unsure at all Xaa locations
  Clone ID: MRT4577_22249C.1.pep
MADWEGIPPRERRQMEEILQLDMEELNVEVVDDNEEDEEEEEGDGNEEDYDVDAFLRDNNGDGVASTSGPFTFNRSLASLHTYLGXNVNLILTCLSCRLQTVKLFFLYHSEVDDTRGRVTLLDGGTILNLPMFYLQGVVLFPGATLPLRVIQDRLVVTIDKALRLVDAPCTIGVVLMRRLPNHRHYATASVGTTAEIRQFGRLEDGSLNVVARGQQRFRLRRHWIDVXGGKSKHVIILLKYEHFKEXLASFTLLNRCGXEVQIIEEDTPLRTPRDAFAQVAACNTFNLHASSSVISLDRSPMKQDHIDSELECNTPSPNSKISNPSSMDSRLCHLGSQSSDSMKSSSDEDGDLMPKQFWKRKQHSVRESGASSHSDKKTNMRNDNNLCLTPLQSSPXQKQEMLSGGDSTMLTQSRLXAPLSFWPRWVYEMYDSYTLARSAAGIEIQSHQPMFYICSFVKLFSCYSKISASCLRSHWNIWSIVXYTGALVAELWRQIIANPSMDDHVRKPDILSFHIGSKLPVSESVRQKLLEIDGVSYRLQKEIQLLKAFNHIKCRNCQSHIAKRSDMVVMSTDGPLGAYVNPHGCVHETITVSNATGLALIGNPSKVHSWFPGYXLPVVCCSFLCLAFFLQHNLNYEIKSEECYLQLXNTLFFLPCRYSWTIAACMACESHIGWLFRATKKNLRPRSFWGIRSSQIADDTQVDQGD

SEQ ID NO: 284157 - protein, 56 aa, Zea mays
  Clone ID: MRT4577_2224C.1.pep
LQLSCDAINSLGIDTTLTRIIRHRLRALRAQTWMHKLPRFSIVNLYVYAVSRIIYM

SEQ ID NO: 284158 - protein, 114 aa, Zea mays
  Clone ID: MRT4577_22250C.1.pep
LAQRRYIAESMAAESEVMSIRKESSKKSSFTSFNPYLRNKRVRTTWDLDSLQEELNNVVPKTKTRSSRRNYRPTPKVFSNATLDLRLELENIRREELAKSERILDMFKPTNSSS

SEQ ID NO: 284159 - protein, 71 aa, Zea mays
  Clone ID: MRT4577_22251C.1.pep
LMMSYICEVVDFYPQFTIFMYNTSCKFPTSPSCELQKVVQKESHFFLVIFVFIALEGIFAVPVTVGTGSRP

SEQ ID NO: 284160 - protein, 152 aa, Zea mays
  Clone ID: MRT4577_22252C.1.pep
MTENHRFWGVVVKPGETVKCDPGDSYYHISTIALEAGKAEEDVQVFVKIDDTRIMLGTLSVDNHPHVLADLVFKKEFELLHSSMTSNISFMGYKFDIMKRSHSCTKQDAESDEEVPLAIPLDFNTDGYKNNEAAHGANNLIAPRPADAPSSI

SEQ ID NO: 284161 - protein, 89 aa, Zea mays
  unsure (1)..(89): unsure at all Xaa locations
  Clone ID: MRT4577_22253C.1.pep
YAYAGHVVKAAVDPVAGTVMLVYYNKLGLRALLKPDWVQKNGPLFPKAARPPPXQRDKVDSCGRLPAPTKPLSFTPEDCNLHSSVMPIV

SEQ ID NO: 284162 - protein, 98 aa, Zea mays
  Clone ID: MRT4577_22254C.1.pep
MRAVETCITSASSDRTGGDPMWTSMEAVEREHAPTPSGAGSLLAPPSGAGSLPAPPSGAGSSAAATFKSEGPSATSIGVGWLGSALLHVRLPSKVNDA

SEQ ID NO: 284163 - protein, 305 aa, Zea mays
  unsure (1)..(305): unsure at all Xaa locations
  Clone ID: MRT4577_22255C.1.pep
MVKLTMIARVTDGLPLSEGLDDSRDLKDADFYKQQAKLLFKNLSRGQHEASRMSIETGPYLFQYXDLFLICKILCSTINHLEIYVILHHDPKXSFCELASLGSLTIYRKLDQYCVYIGFNIXVQVPLTSTSLCISYDYRLSPLMCGLHQVSAITNDVWYENDHFXLKCFWCSSCTXFXNSYIIEGRVCYLTLCDRSYPKKLAFQYLEDLKNEFEKVNGSQIETAARPYAFIKFDAFIQKTKKLYLDTRTQRNLAKLNDELYEVHQIMTRNVQEVLGVGEKLDREFVAVILSGLCFPHYICIFFLA

SEQ ID NO: 284164 - protein, 160 aa, Zea mays
  unsure (1)..(160): unsure at all Xaa locations
  Clone ID: MRT4577_22256C.1.pep
TILAWATMDIPQGVTVTVSGKLMTAEGPXGKITRNLKYLNLYLQVDEGXRKLNGDAWVGTWPTMAAICTAIXHLQKLIKGATNGYRCKMRFVYAHLPIYASITXNSYTDIDIWNLLGEKRGTKVDMLECLTILRSEKGKDXLILNGSDVVVVSRSAALID

SEQ ID NO: 284165 - protein, 149 aa, Zea mays
  unsure (1)..(149): unsure at all Xaa locations
  Clone ID: MRT4577_22257C.1.pep
MASEGDNKRMITLRSSDLEEFEVEEAVAMESQTLRLMIEDDCADNGIPLPNVNSRILSKVIEYCNPLTPLXLKSWDAKFVKVDQATLFDLILAANYLNIKGLLDLTCQTVADMIKGKTPEEIRKTFSIKNDFTQEEEDEIRMENQWAFE

SEQ ID NO: 284166 - protein, 181 aa, Zea mays
  unsure (1)..(181): unsure at all Xaa locations
  Clone ID: MRT4577_22258C.1.pep
LSYVVLTMSIAPRDRFEPQVQLALERGLPAMIGALVAHRLPYPSRSFDMXTVRTAVSHGLLMLIPDGLYMLEIDRLLQPGGYWVFSKPPVNWKSTYNISNQGTIDKQDNQVAMDDMSKRLRWTKVSEEGTISVWRKPSSCNLHCDQEANAKLAGLPPLCTGEDPDSALYANISMCMTCNPR

SEQ ID NO: 284167 - protein, 150 aa, Zea mays
  unsure (1)..(150): unsure at all Xaa locations
  Clone ID: MRT4577_22259C.1.pep
RNAETCSGLLLPARAYVSGRRTGAGAFWVSSYFXXRSCGAASGSFQPFWRAXXRLPSXPSRNVLFTEGDKVWLLVGPNQVXLAIHARSSLVWACFISAFXLRRLLAVGGVSGLETELIQTSANAIARPLFRTCMFCAYTALVHLALYLVL

SEQ ID NO: 284168 - protein, 69 aa, Zea mays
  Clone ID: MRT4577_2225C.1.pep
SGPYSIFSCCSAHTDTARDLDTSSRESRRSPPSPPFLPSFKKSARHVNLLCRHSQRMRISIHKECRNFN

SEQ ID NO: 284169 - protein, 64 aa, Zea mays
  Clone ID: MRT4577_22260C.1.pep
FVGFFCAFTRIRCNLGGVFVHHGGAEQRGPYDVPPLSSCCSFGFRELVRLPLKVALPFFFLCLL

SEQ ID NO: 284170 - protein, 307 aa, Zea mays
  unsure (1)..(307): unsure at all Xaa locations
  Clone ID: MRT4577_22261C.1.pep
MPSGSTQFRYTQTPSKVLHLRNMPWESTEEELVELCKPFGRVVNTMCNVGANRNQAFVEFADQNQAISMVSYYASSSEPAQVRGKTVYIQYSNRQEITNNKGTGDSSGNVLLVTFEGVQPNDVSIDVIHLVFSAFGFVHKIATFEKAAGFQALIQYTDAPTALEAKNSLDGRSIPRYLLAQHVSICHLRITFSAHKDLNIKFQSHRSRDYANPYLPVXPTAIEGIAQPMVSADGXDAWAESXVLLASIENMQYAVTVDVLHKVFSAFGAVQKIAMFEKNGGMQALIQYPGMCSPMHPTGYALDLGAL

SEQ ID NO: 284171 - protein, 53 aa, Zea mays
  Clone ID: MRT4577_22262C.1.pep
GRPWSSGIRHARFGSALLGCLPTVTLRSLVHCIGCHRNPGPTVLLLLSRSCRW

SEQ ID NO: 284172 - protein, 115 aa, Zea mays
  Clone ID: MRT4577_22263C.1.pep
MAAEGEKKMITLKSSDGEEFEVEEAVAMESQTIRHMIEDDCADNGIPLPNVNSKILSKAANYLNIKGLLDLTCQTVADMIKGKTPEEIRKTFNIKNDFTPEEEEEIRRENQWAFE

SEQ ID NO: 284173 - protein, 107 aa, Zea mays
  Clone ID: MRT4577_22264C.1.pep
KILSKVIEYCNKHVHAAAAAAAASKAGSDDVGAASANSTAASGEDLKNWDADFVKVDQATLFDLILAVADMIKGKTPEEIRKTFNIKNDFTPEEEEEIRRENQWAFE

SEQ ID NO: 284174 - protein, 91 aa, Zea mays
  Clone ID: MRT4577_22266C.1.pep
WGKHQKAEVRARSSCQFKAGAFSNPFVQIIGRKQINPGPTFVGRHPLRGEIFGAGTPNKLGIIMGRLGFTLFEANCQRAWVSPWNKRSIRS

SEQ ID NO: 284175 - protein, 70 aa, Zea mays
  Clone ID: MRT4577_22267C.1.pep
PCCFSSCGYIPTRKTNLLLQEDTSTVADLDIIWQGIWSSMDRHPLSRNSETSYTCYTRSQGFANALIKSA

SEQ ID NO: 284176 - protein, 57 aa, Zea mays
  Clone ID: MRT4577_22269C.1.pep
YVHSFVLLEYCSSFSSRAGSLTNRARMSARDKIQTSRSEPTMKRASQRATSILSSPR

SEQ ID NO: 284177 - protein, 49 aa, Zea mays
  Clone ID: MRT4577_2226C.1.pep
VGVGFFFFFFFFFFFFFFFFFFFFFFFFFFWETLHACWARDIIKKKKRF

SEQ ID NO: 284178 - protein, 58 aa, Zea mays
  Clone ID: MRT4577_22273C.1.pep
PGVLLCIPVFSLRSVVVRALRPLRVPPPWPCWLLRGRVENCLAGGHPFAWVVPAFPGR

SEQ ID NO: 284179 - protein, 103 aa, Zea mays
  unsure (1)..(103): unsure at all Xaa locations
  Clone ID: MRT4577_22274C.1.pep
YCGDGKTAVVTLFCPDMSNXLCNWLGPGTRIYLAYGLXPVLRAESPHTTQVPGDYDYDXFTVGNQQGDLVKDQMYELIHAIRAMLCANGAVIPEHCIKNAPNC

SEQ ID NO: 284180 - protein, 185 aa, Zea mays
  unsure (1)..(185): unsure at all Xaa locations
  Clone ID: MRT4577_22275C.1.pep
GDAAELGSWSLYRAVIAELMATLVFLXMTGGTVIGXXHHTDAXGXGADPGCGGVGGLXIAWAFXGMSFVLVYGAAGIXGGHINPARTFGLFLGREGSLGRARLYMVGXGLGAIGGVXLXKACGGAYFXRDGGGANSVGXGYSRGTGLGAXIIGTFVXRYTXFSGTDPKGNGRDSHGPGLAPLPIG

SEQ ID NO: 284181 - protein, 83 aa, Zea mays
  Clone ID: MRT4577_22276C.1.pep
HRPRVSSRAPVVGRTARLWPLWPRTDPGTASPQWPWYTGVGRPLHSSAGPPCAGCNSHGSRGLPVSHHNFTRWSCIRVTSSTR

SEQ ID NO: 284182 - protein, 318 aa, Zea mays
  Clone ID: MRT4577_22277C.1.pep
MAVLWWWSSSCLSSRAVAAALLCLLVAHGSDGTRHNSNNGGGSGSSSSSKSHKQGGGGRAHAAPTTPSPYPSPSPAAGNNSSSDDGWLNARATWYGAPNGAGPDDNGGACGFKGVNMPPFSAMTSCGNEPIFKDGKGCGSCYQIRCKAHPACSGVAETVIITDMNYYPVAPYHFDLSGTAFGAMAKDEHNDELRHAGIIDIQFKRVPCQYPGLTVTFHIERGSNPNYLAVLVEYENGDGDVVQVDLMESSPDDGEPTGVWEPMRESWGSIWRMDTRRPLQGPFSLRVTNESGKTLVADQVIPADWQPDNVYSSIVQFE

SEQ ID NO: 284183 - protein, 116 aa, Zea mays
  Clone ID: MRT4577_22278C.1.pep
GGPLVYRPPKGPPVSRAGKPFFSGENPGFRPPFFTPTEKLGPFNPNPGFFSPKIFFFPFAPNIRTAVCPIYFPKFGCSQGGQKRKVWGPAPFPLKKLGGGSLGFVPKSPPNPRGAV

SEQ ID NO: 284184 - protein, 110 aa, Zea mays
  unsure (1)..(110): unsure at all Xaa locations
  Clone ID: MRT4577_22279C.1.pep
PPPGGGRFFSRPGLFSPWGPSSCRPAGSGWCSSCPXCGAXLRSAXVPGCXSPRGLXXLPSPXGCCXXPGXWGCSXPGPAAGVLPRACLLFFXCWLPXAWVAPGFRVRXLR

SEQ ID NO: 284185 - protein, 148 aa, Zea mays
  unsure (1)..(148): unsure at all Xaa locations
  Clone ID: MRT4577_2227C.1.pep
GGRGKPPARARQARPRGAPKXXXXQXAAXEXPSXXXXHHERXAXTGGAXSXXQXEGDADDXXAARXXXNXETAXHGXAAKPDEDEAERXAEADGXXAXHPETXXQPHTTRSPDXRGXSPEXSDSXXXDGPADHDXDGGGPDTGEANRE

SEQ ID NO: 284186 - protein, 43 aa, Zea mays
  Clone ID: MRT4577_22280C.1.pep
ICELFIVVEIWYYVEIIIERGGEIKKRNVETYIGGCVVIVVKS

SEQ ID NO: 284187 - protein, 65 aa, Zea mays
  unsure (1)..(65): unsure at all Xaa locations
  Clone ID: MRT4577_22281C.1.pep
GINNKGLTNFIRYVRDXRYFICLLYGNLLQTKIYNIXSTLEGFDKFGNKYYXKLHDTYYLWYMWL

SEQ ID NO: 284188 - protein, 74 aa, Zea mays
  Clone ID: MRT4577_22282C.1.pep
ARPIYQFLTLCRVCTFYPRVVIPFQPGLYRSDLHYQGEWPGIHYVAFTKTPLVHSCSLGFASRTNVVHLPKVGD

SEQ ID NO: 284189 - protein, 80 aa, Zea mays
  Clone ID: MRT4577_22283C.1.pep
PGQAFLLQAPPQVTPRGVGCSSPLALLGPHLPIGSRVPPDPYQMGPPGPPPFFGQNQSPPKVFPFQTGEFPPGGPVLWEK

SEQ ID NO: 284190 - protein, 96 aa, Zea mays
  unsure (1)..(96): unsure at all Xaa locations
  Clone ID: MRT4577_22284C.1.pep
YGRSLWYCLSSXPSXLITTRGFSFRIFCQNGGGAVGSVRAASFSPVWLPAAERRGVVGAMPRAVPLPSAGFAPHPPDFRRTSLLPARLPKVRXRXL

SEQ ID NO: 284191 - protein, 390 aa, Zea mays
  unsure (1)..(390): unsure at all Xaa locations
  Clone ID: MRT4577_22285C.1.pep
PMQSISSELEVLGRHDHPRLTVPFLXDEAQSFYEKVSSEGQEVKIMIEKRMESSAISERKNVDARSYFMTLEYWEDLFCKLNEMRRYRRIVGSLAGSCLSAAIPLLSSNKETACLVALDIVESAAISIANVEEAYKCECQSKGVIEEAIQFCSFDELLDGTDATEDVDENRLLPAMNKLWPYLVICLRNKISVPVVRKCTEMLSRAICISGGDFYVRRFHKDGPICWRLLALSPFRRLSKMDEKAIFLPYRDTSLNSEEPMAEISSQKIQIAVLDMIAAISSNKRSVVALESVLKKVYGLVVGIAYSSLTDVYYSLNQRESLLPDQDLALVSDLLPPQVSSREYLFVQYGANIRTHDANEGCDEFVSINHIRLHVKHAPDLPDEQQDFGI

SEQ ID NO: 284192 - protein, 103 aa, Zea mays
  Clone ID: MRT4577_22286C.1.pep
ADPRVQRRHTRTSSFRSPPPTPRVAGVAFKALYQPPNAAPFPSLTPLDASRSLATSFPFTSHSARIACFQAYTPDHAQAYFSLRHANSYPHPAQCASCRLSPE

SEQ ID NO: 284193 - protein, 89 aa, Zea mays
  unsure (1)..(89): unsure at all Xaa locations
  Clone ID: MRT4577_22287C.1.pep
LQKAQLRALAGLACMEADXVRLLLADVNYSLNQRESLLPDXKDLAXVSDLLPPQVSSREYLFVQYGGEGVRCDVDPSSVYYVFRRMQGV

SEQ ID NO: 284194 - protein, 74 aa, Zea mays
  unsure (1)..(74): unsure at all Xaa locations
  Clone ID: MRT4577_22288C.1.pep
MDADLVWVGLADVYYXLNQRESLLPNQDLALVSDLLPPPVSSREYLFVQYGGEGVRCDVDPSSVHYVFRRMQGV

SEQ ID NO: 284195 - protein, 104 aa, Zea mays
  Clone ID: MRT4577_22289C.1.pep
FFFYINMCYIVKIKMFRNPFMILAIYKFYYLNLAISPLHSTVLVVVSLFLKSYSILSALANLGPKVLLLVRQVRGMLNVQPYMVNRHKLITSFIVIMSPDVCLI

SEQ ID NO: 284196 - protein, 125 aa, Zea mays
  unsure (1)..(125): unsure at all Xaa locations
  Clone ID: MRT4577_2228C.1.pep
RGRVRGERELWWRQPGGGKLVQRLSYRERHKYSTEYDVTLLGDTHGGRLRDQVTKERASGPKCPVIGKKIQGISQHXPAEFKTCNVVMNRATENRXYGGALSGSALREMIIRTFLVGEQRNMERG

SEQ ID NO: 284197 - protein, 177 aa, Zea mays
  Clone ID: MRT4577_22290C.1.pep
WRAWRGRGRRCWSPAPAASSYRPSSCLLLDRDYNGHDSVLNPDDKAHTEDLVGLGAGAVERRLRVFTGDLLDCEAVLFGERGCSDVYNLTHAVHGLPREGPAGREEGDGEVRDALQGGRPVRGPQRGPRGEHLGGVRHKNFRGVGLHPLHALARLSPHRTLLQDSGVPPSVRHGDRE

SEQ ID NO: 284198 - protein, 58 aa, Zea mays
  Clone ID: MRT4577_22291C.1.pep
TCPFRGTTLGSQRKRNPVYINFTDPGNRQFIKGNILGEWHPPKVHIDGPGLYDEPFNQ

SEQ ID NO: 284199 - protein, 100 aa, Zea mays
  Clone ID: MRT4577_22292C.1.pep
TATTGDGAPLKTTHIYPPVGGGPRMGPSCPYLAPYACWSRLACLLLLRVLLLNKTPPRAGGPWVWVCFKKKGAGDPPMPFWRFGLFLSSCGLYLFPCPLL

SEQ ID NO: 284200 - protein, 245 aa, Zea mays
  Clone ID: MRT4577_22293C.1.pep
MLITRFALFLHSYLNTVYKTREYEFLRLTSLGVIDALVKPVVRKCTEMLSRAICISGGDFYVRRFHKDGPIVWRLLALSPFRRLSKMDEKAIILPYRDTSLNSEEPMAEISSQKIQIAVLDMIAAISSNKRSVVALESVLKKVYGLVVGIAYSSLTGLQEATIRALAGLACMDADLVWLLLADVYYSLNQRESLLPDQDLALVSDLLPPQVSSREYLFVQYGGEGVRCDVDPSSVYYVFRRMQGV

SEQ ID NO: 284201 - protein, 71 aa, Zea mays
  Clone ID: MRT4577_22294C.1.pep
RFLKLPRPIYYVQLGYHCHLGYFHTTQALYITQICSMPSIRHYNYSNGCFTNCIVSSMSLVWLSMALTKSS

SEQ ID NO: 284202 - protein, 126 aa, Zea mays
  unsure (1)..(126): unsure at all Xaa locations
  Clone ID: MRT4577_22295C.1.pep
TPIRTSCLLMGSFCGSIQSSVLIGNHGHHXMSLEILLEIGTSRPRPWPNFAPPLIPSQGYCSVVRQSDHNSRCVKFPYFGRCSAESQCFQFKALQYVLLHSWHQDPGYVQFLLRLGGKSNFKEGRM

SEQ ID NO: 284203 - protein, 58 aa, Zea mays
  unsure (1)..(58): unsure at all Xaa locations
  Clone ID: MRT4577_22296C.1.pep
TLTXXADEAPSEKQNSGSVPSPATIHKGVNSTMLRISCLQPRAELGVIWTLTRPASRV

SEQ ID NO: 284204 - protein, 91 aa, Zea mays
  Clone ID: MRT4577_22297C.1.pep
CRELPVTSSGPTGWASSRRCVPSCRSARRDRRGQMRSHLRAKAARRHLLLHPTRCGCRGRDTRRRAFWAAPAEEEDDGRWCSEGLVRSDWV

SEQ ID NO: 284205 - protein, 93 aa, Zea mays
  Clone ID: MRT4577_22298C.1.pep
MAPQLTPGAVVALSEHDKGNGTLHPVLQVVDVRVVNSLSNPSAERFRMVLSDDVHTTQRMLATVHKTTTRTSGTAPSSSSKSSPAAQSSTTAG

SEQ ID NO: 284206 - protein, 131 aa, Zea mays
  Clone ID: MRT4577_22299C.1.pep
MAPQLTPGAVVALSEHDKGNGTLHPVLQVVDVRVVNSLSNPSAERFRMVLSDDVHTTQRMLATVHKTTTRTSGTAPSSSSKSSPAAQSSTTAGECGYKMVLGRFGWYIPVPTQGRLLMVFHYLYIINLGLG

SEQ ID NO: 284207 - protein, 169 aa, Zea mays
  Clone ID: MRT4577_2229C.1.pep
RRPFFFFFFFMETRKRIRRHCLHYTRCALELFYEYFTSRGTFALAHRRASTGLQVNAVVAEKSSWHGGGLGQEKGEEKKKKKKKLVWGRPAPNIMAIDDRRKRETRRISLDLAPRRSVCFASGSNEARFQSWHAPRTRPNVWHLMSCSLEGEGSADNRVGSSLAFILNP

SEQ ID NO: 284208 - protein, 63 aa, Zea mays
  unsure (1)..(63): unsure at all Xaa locations
  Clone ID: MRT4577_222C.1.pep
SRIAPKLAFMYPKGAFLPWYVGKGMEKGEFFXAREDLAALEKDSEGVGPEFHKGGDGPQGSEY

SEQ ID NO: 284209 - protein, 74 aa, Zea mays
  Clone ID: MRT4577_22300C.1.pep
YKSAQRYTCFLSHFIIIILCTKHHMSYHHPIIISCVSLFIKYKVKKEGKLLPSGSDEKRTLKQFPTNCKVKSKR

SEQ ID NO: 284210 - protein, 56 aa, Zea mays
  Clone ID: MRT4577_22301C.1.pep
YTIMLLQSRSVIHHSRPYKSPSLTRHNLCGPVLTRSWQAPREGGPRMRGRVGGSSQ

SEQ ID NO: 284211 - protein, 65 aa, Zea mays
  Clone ID: MRT4577_22302C.1.pep
QYRSNLGGGPVPPLLTIVTLLTHTPPSSRGTPTPALLIIILKIWLCHILIPLKSYNQQENMIFPL

SEQ ID NO: 284212 - protein, 51 aa, Zea mays
  Clone ID: MRT4577_22303C.1.pep
CILKKKIELRMMKIIVIRRYWFFGSFKIVVVEVEVYYRRCSFVKSVGLEWV

SEQ ID NO: 284213 - protein, 592 aa, Zea mays
  Clone ID: MRT4577_22304C.1.pep
MVKRSKKSKSKRVTLRQKHKVLRKVKEHHRKKRKEAKKEGKAGQRKKVEKDPGIPNEWPFKEQELKALEARRAQALQELELKKEARKERARKRKLGLLEDEEIANLASAASAQGSEFAAKDAAKDKAPLTVAKSNDHSERSFYKELVKVIEASDVILEVLDARDPLGTRCIDMEKMVRKADPSKRIVLLLNKIDLVPKEAVEKWLTYLREEMPTVAFKCNTQEQRTKLGWKSSKLDKTNIIPQSSDCLGAENLIRLLKNYSRSHELKLAITVGIVGLPNVGKSSLINSLKRSRVVNVGSTPGVTRSMQEVQLDKKVKLLDCPGVVMLKSSNSGVSVALRNCKRVEKMEDPVTPVKEILGICPHEKLLSMYKVPSFSSVDDFLQKVSTVRGKLKKGGVVDVEAAARIVLHDWNEGKIPYFTLPPKRDAVEDSDVVIISEDGKEFNIDEIYKAESSYIGGLKSIEEFHHIEIPPNAPPAIDKEMLEDGSKPSEPAQENREEQMSDANDPQGSKPATASTQNDKLYTAEGILDPRKRKAEKKRRKANRFSVLNDMDADYDFKVDYQMEDAADGEDEDAGDEAKEDNEPMTGVDDS

SEQ ID NO: 284214 - protein, 594 aa, Zea mays
  Clone ID: MRT4577_22305C.1.pep
MVKRSKKSKSKRVTLRQKHKVQRKVKEHHRKKRKEAKKAGKAGQRRKVEKDPGIPNEWPFKEQELKALEARRAQALQELELKKQARKERAQKRKAGLLEDEDIASLASAASAQGSEFAAKENAPLLVAKINDHSERSFYKELVKVIEASDVIVEVLDARDPLGTRCIDMEKMVRKADPSKRIVLLLNKIDLVPKEAAEKWLTYLREELPTVAFKCNTQEQRTKLGWKSSKLDKTSNIPQSSDCLGAENLIKLLKNYSRSHELKLAITVGIVGLPNVGKSSLINSLKRSRVVNVGSTPGITRSMQEVQLDKKVKLLDCPGVVMLKSSNSGVSVALRNCKKVEKIEDPVAPVKEILSICPHEKLLSLYKVPNFGSVDDFLQKVATVRGKLKKGGVVDVEAAARIVLHDWNEGKIPYFTLPPKRDAGEDSDAVIISEDGKEFNIDDIYKAESSYIGGLKSIEEFHHIEIPPNAPPAIDEEMLEDGGKKPSEAIQESRDREEQMPDVKDSGGSKAASASTQNDKLYTAEGVLDPRKSKAEKKRRKASRPSALNDMDADYDFKVDYRMEDGGSEGAHADDEDGGDGSEDNEPMTGVDDA

SEQ ID NO: 284215 - protein, 167 aa, Zea mays
  unsure (1)..(167): unsure at all Xaa locations
  Clone ID: MRT4577_22306C.1.pep
MDAPSVALYNQLKAAQPFFLLAGPNVIESEEHVMKMAKHIKAITTKLGVPLVFKSSFDKANRTSSKSFRGPGLEQGLKILEKVKAAYDLPVVTDVHESCQCEAVGRVADIIQIPAFLCRQTDLLVAAAKTGEIINIKKGTFCAPXSVMANSAEKIRLAGNHNVMGCE

SEQ ID NO: 284216 - protein, 43 aa, Zea mays
  Clone ID: MRT4577_22307C.1.pep
QSESDREPKSATGRDEPATNHDIRQRYMLQHDATPMTFRFCLH

SEQ ID NO: 284217 - protein, 206 aa, Zea mays
  unsure (1)..(206): unsure at all Xaa locations
  Clone ID: MRT4577_22308C.1.pep
MKMSSVPAAAAVMVVGGGASICSDYVQNYYVNPMLSAAYTPDQFADALMQPFTSFVEGLYNLGARRIGVTSLPPMGCLPASVTLFGGGSAGCVERLNNDSLTFNRKLGVAADAVKRRHPDLKLVVFDIYQPLLDLVQNPTNAGFFESRRACCGTGTIETSVLCHQGAPGTCTNATGYVFWDGFHPTDAXNKVLADALLLQGLQLIA

SEQ ID NO: 284218 - protein, 129 aa, Zea mays
  Clone ID: MRT4577_22309C.1.pep
FFFFFFFLVVFLYIRFFFFFFFFFFFFGNGQSFPARLLKVETKNKINNFEQIKGLDPPRLPKPIIFFKLGTRTKHLLLRRGGLNGGGGSFKEPYSQTRAFYSWGPWETFIGPSNRKRGNTFLNGAYPFS

SEQ ID NO: 284219 - protein, 57 aa, Zea mays
  unsure (1)..(57): unsure at all Xaa locations
  Clone ID: MRT4577_2230C.1.pep
MGKEKSHINIVAIGHVDSGKTTTTGHLIYKLXGIDKRSDXRPENEAAEMINGPITSP

SEQ ID NO: 284220 - protein, 47 aa, Zea mays
  Clone ID: MRT4577_22310C.1.pep
KAHLLYNKCQIQKKKPEGAFFQNHTHKNITNHLKNKKKNKPNWVAAH

SEQ ID NO: 284221 - protein, 138 aa, Zea mays
  Clone ID: MRT4577_22311C.1.pep
APCPRQRRCLPASVTLFGGGNDGCVERLNNDSLTFNRKLGVAADAVKRRHPDLKLVVFDIYQPLLDLVQNPTNAGFFESRRACCGTGTTETSVLCHQGAPGTCTNATGYVFWDGFHPTDAANKVLADALLLQGLQLIA

SEQ ID NO: 284222 - protein, 359 aa, Zea mays
  Clone ID: MRT4577_22312C.1.pep
MKMSSVPAAAAVMVVVVLLSAAAATVTGQALVPGVMIFGDSVVDAGNNNRLATLVRADFPPYGRDFPATHAPTGRFCNGKLATDYTVESLGLSSYPPAYLSEEAQSNNKSLLHGANFASGAAGYLDATAALYGAMSLSRQAGYFREYQSRVGASAGEQRARELTSGSIYVVSAGTSDYVQNYYVNPMLSAAYTPDQFADALMQPFTSFVEGLYSLGARRIGVTSLPPMGCLPASVTLFGGGSAGCVERLNNDSLTFNRKLGVAADAVKRRHPDLKLVVFDIYQPLLDLVQNPTNAGFFESRRACCGTGTIETSVLCHQGAPGTCTNATGYVFWDGFHPTDAANKVLADALLLQGLQLIA

SEQ ID NO: 284223 - protein, 91 aa, Zea mays
  Clone ID: MRT4577_22313C.1.pep
SRVCVSHRSPKPTGDFPFSPPTLANPDEPNGDASNNITDKPPNISDEPQVGPPYNLRDCSTIRPDDRYGFPKVNVVDESSTYKEASSIPEW

SEQ ID NO: 284224 - protein, 85 aa, Zea mays
  Clone ID: MRT4577_22314C.1.pep
NQKAFVLRAELTVQHSCSVQNINNPNLKHRGQKPFKRQGFLKRCIKKLPVLYFYKMASINRVGYLTGSLVGQCCQPFFLQAFSFF

SEQ ID NO: 284225 - protein, 93 aa, Zea mays
  Clone ID: MRT4577_22315C.1.pep
HAFAHAYVPIPRSADYRQARAPACKVQTQLELRASMESGAPCPLAHAHPVDLRWLLSVAVGGLFALMLVLLATSPSFRVAYTSPFPRLFTRPR

SEQ ID NO: 284226 - protein, 62 aa, Zea mays
  Clone ID: MRT4577_22316C.1.pep
ADPCTGPFRELLGPIERERGSSPLHAHTTGSLDRSPIAPSDSEATLSSPQGTHQSMKSKTNP

SEQ ID NO: 284227 - protein, 212 aa, Zea mays
  Clone ID: MRT4577_22317C.1.pep
MADPSYWIGMDIETSVTMLVICLAAAVVSVCLFFIFMCIVQWLDSPRMRVFRLGGVTTLRQNLDYTCTLCQNSMEAGEKVRTLSCDHVFHCGGSVKCEGIDHCLRTGPMERCPTCYRVPHPVPWKRTPPPSPPAPTPSQGALAAALPPLRLPLSTRDLDEALLRWEQIQKLAEASSSASLHRRHPRTSTSDKEEVLPLPADDEILPEAPSSQ

SEQ ID NO: 284228 - protein, 118 aa, Zea mays
  Clone ID: MRT4577_22318C.1.pep
TVGCRPHCVVDGNTCTLIKWSFRVISARRKDGHPCGVFIGGAQIFLNVANNTIDWALKSNFRNSLICLGEAGFRQGQAGHHGILTAVRGTKPIQVWLAVTRRVALRFSLAHHARASGI

SEQ ID NO: 284229 - protein, 88 aa, Zea mays
  Clone ID: MRT4577_22319C.1.pep
GSLSLSGLSCRCPSPPPCSRGGLSAALAPRGRSSGLLSPFLAAWSCASWGVCCGGRAPGVPAFGVSSCPLFLALGVSARRGGVSVARP

SEQ ID NO: 284230 - protein, 98 aa, Zea mays
  unsure (1)..(98): unsure at all Xaa locations
  Clone ID: MRT4577_2231C.1.pep
MAAADVEXRCLLRGPAWANNNESLENAFASYGEILDSKVITDRETGRXRGFGFVTFSSENSMLDAIENMNGKELDGRNITVNQAQSRGGGGGGCGYGG

SEQ ID NO: 284231 - protein, 124 aa, Zea mays
  Clone ID: MRT4577_22320C.1.pep
LDSPFSQGYPRKGGIPFFIKEYGKGVGTYQGGLKHGPKNPEFLYGVKRCVLQINKGSKGGLSEGGLKKRQNKTLPGPEIQNILADPIMQQGFSGLQENPRGGQGPLQNPGVMQKIPKVVRAGIV

SEQ ID NO: 284232 - protein, 54 aa, Zea mays
  Clone ID: MRT4577_22321C.1.pep
LGCAAESLRGQIATLFMSYTLTSIDAIELSESHLTHRMPAPLTPIGFVPDRPNK

SEQ ID NO: 284233 - protein, 74 aa, Zea mays
  unsure (1)..(74): unsure at all Xaa locations
  Clone ID: MRT4577_22322C.1.pep
VKXLTPPPLTLXVESSDTIANVKAKIQDKEGIPPDHQRAHLCCKAAXRRPHDDLHAHPEAQHPVEQGAASQGRH

SEQ ID NO: 284234 - protein, 163 aa, Zea mays
  Clone ID: MRT4577_22323C.1.pep
MEDIGEGPAENLPEPLSPAVEAEDEDEDLQGVPAESYCLWAPGGQSPAPASPRRCRKSGSTGSVLRWRRISDRLVGRSHSDGKEKFVFLTAVPDPLRPSRSNKEVDEGGGDGEAGSVAHQLRYYGRGRGGGGGSRRRSYLPYKQELVGLFANVSGLRRSYHPF

SEQ ID NO: 284235 - protein, 147 aa, Zea mays
  Clone ID: MRT4577_22324C.1.pep
MAGSKDHTDISLDNILKPAIESLTADEQQQYEDYMRQAKEKFLSQYTVDRHQKVIKHGEIDVASLLSSLQVPNPLYGMPMNSYSGQIQPPSSLLGRSAPLNTVGPSEPLPGPSGPCADHTACSTGQSGAALGPPPSLIGRSMTLGRS

SEQ ID NO: 284236 - protein, 252 aa, Zea mays
  Clone ID: MRT4577_22325C.1.pep
MEDIGEGPAENLPEPLSPAVEAEDEDGDEFSFPVPPVAADACIVPVYPIFGRPPSPPRGEEEEPETATLRVPLGRLLLEEREFRAREPDGRSASAQAWQDEDEDDASGGGGGAGDEDLQGVPAESYCLWAPGGQSPAPASPRRCRKSGSTGSVLRWRRISDRLVGRSHSDGKEKFVFLTAVPDPPRPSRSNKEVDEGGGDGEAGSVAHQMRYYGRGRGGGGGSRRRSYLPYKQELVGLFANVSGLRRSYHPF

SEQ ID NO: 284237 - protein, 83 aa, Zea mays
  Clone ID: MRT4577_22326C.1.pep
RCSQHFKNVGGWPKTSTNHSNLHIKFTPALFKYHALQNHVSTVTTVRAGIVERWRGGTMNTKKKSSSRIPSLRTRACDVIALL

SEQ ID NO: 284238 - protein, 81 aa, Zea mays
  Clone ID: MRT4577_22327C.1.pep
IMLGRGGKRNPSRCSRNPTCWHNSTGSEKVSLIGLTFHPSFLSFPDLIGAGCSMLTNAILANERAIIRGHNGSAAPAGHSL

SEQ ID NO: 284239 - protein, 158 aa, Zea mays
  Clone ID: MRT4577_22328C.1.pep
TMMQGNYAVRRGSLVSHNHEQVTRAVDDQTTWRNCSRGSTAFMTRGKELLAAGRGERARLGLQTAMGAAVREMFFFPGDRRAGRTRTPARGTHSQPPALGSWERWQPTKGQDARRGARSRSCWAWPSSLALRWEARRKMHQEVGELEQGEHAAPAGLE

SEQ ID NO: 284240 - protein, 148 aa, Zea mays
  Clone ID: MRT4577_22329C.1.pep
SRPAGSLFFVAASIWRLAKRCAAVEGRTELPIVCAVCGLKIRALQDSEEDDIVGETNDVQKLKEELKYERQRTKDAREDLEKDRRAAEAAMNEVTTKNKILEGENGRLLMQVEHLKENMKMKRMGIIQILESRDHEFWNANLEAPVPV

SEQ ID NO: 284241 - protein, 107 aa, Zea mays
  Clone ID: MRT4577_2232C.1.pep
GKSSVTDIEGRIELGRRRRSSEGNTEPVLKLDDACHSRRNGRSGRASSRGLVRAKRSLRPRLSLASGEAELAPEVLVRVLSYYASRPPGGVRTLNDVGESLTRLLSY

SEQ ID NO: 284242 - protein, 69 aa, Zea mays
  Clone ID: MRT4577_22330C.1.pep
TMMQGNYAVRRGSLVSHNHEQVTRAVDDQTTWRNCSRGSTAFMARGKELLAAGRGERARLGLQTAMGAA

SEQ ID NO: 284243 - protein, 29 aa, Zea mays
  Clone ID: MRT4577_22331C.1.pep
MARGRGDQRAGNRCCGVYGKGRLGKNGEG

SEQ ID NO: 284244 - protein, 130 aa, Zea mays
  Clone ID: MRT4577_22332C.1.pep
TMMQGNYAVRRGSLVSHNHEQVTRAVDDQTTWRNCSRGSTAFMARGKELLAAGRGERARLGLQTAMGAAVREMFFFPETDEQGERGRRQGERTASHLRWGAGKDGDQQRDKMLGGARVQGAAGRGRAAWP

SEQ ID NO: 284245 - protein, 78 aa, Zea mays
  Clone ID: MRT4577_22333C.1.pep
GFGSSPRSDCKRVSPRPMAMAAATVLALLPVELGLGKPLCAVSYALSLRAVAGAPCRWSARTRMTVVRSSPTKKTKSP

SEQ ID NO: 284246 - protein, 109 aa, Zea mays
  Clone ID: MRT4577_22334C.1.pep
KKGVAQKPGSSPFGPPKKRGQKKIFLKRATRASRGPQSSGHPPKKWGATKRGGFKGTVGFKNPGSFSRGEPQKIPYPKGGVCLTNWKPRDFCPEPQGFKKTKVFARGVP

SEQ ID NO: 284247 - protein, 94 aa, Zea mays
  unsure (1)..(94): unsure at all Xaa locations
  Clone ID: MRT4577_22335C.1.pep
HASASGSTSYSYDYDYEHLVLDPASLGVPWADPAAVEIPPHLLAALGEYLSGSAARGDVEAEADADDEFMMHEFKVRRCARARXHDWTACPYAH

SEQ ID NO: 284248 - protein, 47 aa, Zea mays
  Clone ID: MRT4577_22336C.1.pep
HARGGRHTYYIKPLKRNTQSAHLQPHDCQNSGVTQLNLLRTHSILSQ

SEQ ID NO: 284249 - protein, 78 aa, Zea mays
  Clone ID: MRT4577_22337C.1.pep
QSKPYALALSEVVVGSRAKVVTCHSPYINSTNRICSNYIVSVRLRRWFKCFVIAIRNGLSLGVCWCRSPYCNNGRACA

SEQ ID NO: 284250 - protein, 130 aa, Zea mays
  Clone ID: MRT4577_22338C.1.pep
ATTKCDVYSFGVVLMELATGRKPIEPEFGDTRDIVHWVSGKVAAGAGAEADALDKRLAWSPYKEEMVQALRVAVRCTCSMPGLRPTMADVVQMLAEAGPPAGRTTKDDSSGEPKVLVADHHHASPPPPPP

SEQ ID NO: 284251 - protein, 204 aa, Zea mays
  unsure (1)..(204): unsure at all Xaa locations
  Clone ID: MRT4577_22339C.1.pep
IRHQVLYVPNSSCAFNIFTITWTAILVTIMMAVSLHSKVNEGLLSSGIMSSYIVFLCGCTXTSEPQTGRPSLENXAQDGDSATIVSFIIAICSIVMATFSTGIDTKSFQFRNDEVQLDEDIPYSYEIFPIVFAMGAMYFAMLFISWELNPPTRKWSIDVGWASTWVKIINEWFPASIYLWRLIYPVVLRNQLANEELMPPRPTV

SEQ ID NO: 284252 - protein, 289 aa, Zea mays
  Clone ID: MRT4577_2233C.1.pep
MRSCRRPPKDALLPPLFSRRRCHRHVEARYVSYIFWDPEISDIVIFSAPQDFSLDFRALVLEYMSNGSLEMLLHSEDRSHMGFQFHTRMDTMLDVSMAMEYLHHEHHEVVLHCDLKPSNVLFDDDMTAHVADFGIAKLLLGDDNSMVVSTMPGTLGYMAPEYGSLGKASRKSDVFSFGIMLFEVFTGKRPTDTMFEGELSIRQWVQQAFPSQLDTVVDSQLLQDAISSSANLNEVLPLIFELGLLCTTDSPNQRMSMSDVVVTLKKIKMNYTKFGISKDTMSFPAIDHA

SEQ ID NO: 284253 - protein, 81 aa, Zea mays
  Clone ID: MRT4577_22340C.1.pep
NRLKFCFPGVSPLGGSHSHPFSRIRTFIHLLHDPHAQRKSWAHLRGPNQRASNHEALYARDPEHQPPQQEQRKPRHAQEEG

SEQ ID NO: 284254 - protein, 79 aa, Zea mays
  Clone ID: MRT4577_22341C.1.pep
GAHGPVIGDLDLVPIPGRPVDYGKRSGAGPCRRRGYRRPVQRPASWALALQSWEETMACRPRVRSASSMARHRGVPCVT

SEQ ID NO: 284255 - protein, 33 aa, Zea mays
  Clone ID: MRT4577_22342C.1.pep
VAALVSEIIAAYLMPPIESGSVDFAEFEPQLVY

SEQ ID NO: 284256 - protein, 168 aa, Zea mays
  Clone ID: MRT4577_22343C.1.pep
QYPIFKYFENWCQDENRHGDFFSALLKAQPQFLNDWKAKLWSRFFCLSVYVTMYLNDCQRTAFYEGIGLDTKEFDMHVIIETNRTTARIFPAVLDVENPEFKRKLDRMVEINQKIIAVGKSDEIPLVKNLKRIPLVAALVSEIIAAYLMPPIESGSVDFAEFEPQLVY

SEQ ID NO: 284257 - protein, 63 aa, Zea mays
  Clone ID: MRT4577_22344C.1.pep
LCGSMGEGISPCSRRWLSWFAGQLVLGFIFGGGFSWNSCVLNGSGSLKWPHHCSWFGLYEKEN

SEQ ID NO: 284258 - protein, 222 aa, Zea mays
  Clone ID: MRT4577_22345C.1.pep
MPFTAISSQIQCQGLLPLYPVTSSATLSSSCSPTSISFYKDEDSSHEESSYSLTDYVCLKIPDGSLNKVNCIGVIKGSGNCCTTLSMMSLSGFLLHIPDGYECVDLSLYKDNQVVLLLSETSCSDSPGKSWMVMLQIENFSFMPLSGTFPANIYSLQELVALDLQLDTDYGKVRSIPHTVSTPFAVSASRGVACVFSSRRHALVYILDEDEEAEGDETSDME

SEQ ID NO: 284259 - protein, 116 aa, Zea mays
  unsure (1)..(116): unsure at all Xaa locations
  Clone ID: MRT4577_22346C.1.pep
MSAAKAKAAAVPESVLRXRKSVEQWASDNKEKALAYRKXGAREXKIIFGRANHYAEEYHAQEKDLVHLKPAAQMKGWFYVSPNAKLLVVVRIRGINAMHPKTRKILQLLRLRQILN

SEQ ID NO: 284260 - protein, 120 aa, Zea mays
  Clone ID: MRT4577_22347C.1.pep
WNYLSGEIPQELTNLTFLETLDLSNNNLAGMIPQSRQFGTFENSSFEGNIGLCGAPLSRQCASSPQPNDLKQKMSQDHVDITLYMFIGLGFGLGFAVAILVMQVPLGKFYRTISILRNLS

SEQ ID NO: 284261 - protein, 47 aa, Zea mays
  Clone ID: MRT4577_22348C.1.pep
LKFSPPTCFFFYSSLTNKKYRTTLVSYILLTPSKLTSSLQFQTFNNS

SEQ ID NO: 284262 - protein, 78 aa, Zea mays
  Clone ID: MRT4577_22349C.1.pep
IWKKKRNIKKEKEKVKEHSRARFHVFGPSHPLFPHGSAGKRAHRQMGPTCPSLVRKSSRVRGRRTRGLTRGSARVFWT

SEQ ID NO: 284263 - protein, 114 aa, Zea mays
  unsure (1)..(114): unsure at all Xaa locations
  Clone ID: MRT4577_2234C.1.pep
CIVSWNCNALYRRFRNVRVVRLARIGLKFXHHSLVQQYLPRRRGMFSRASCGGSDATSRVPYRDKGGEHDLSVAESPRPTVTTASFSVSCVSSSSKGRNGRWISDSVSLPKTGE

SEQ ID NO: 284264 - protein, 83 aa, Zea mays
  unsure (1)..(83): unsure at all Xaa locations
  Clone ID: MRT4577_22350C.1.pep
IPSVIATRYRARRRYEINITAVYDHSMYTSQFCMKLAALTTAICSFCCKXXSKAQAACAYTMNTASAVTVRSTIRRLREQTEA

SEQ ID NO: 284265 - protein, 68 aa, Zea mays
  Clone ID: MRT4577_22351C.1.pep
SSRLQLGRSELTRGFDSLTLNVGHVCLRGNSKSYTPNGKHVIKQKLVFDSRAMGASRASVLTKGVRGV

SEQ ID NO: 284266 - protein, 77 aa, Zea mays
  Clone ID: MRT4577_22352C.1.pep
NSALRLKTITAERLGKTFQTWYYFLAAFIREIRLSPASPKLSNPTSFVPKSRYIILNRCSSPSIAANTATCFLIINP

SEQ ID NO: 284267 - protein, 58 aa, Zea mays
  Clone ID: MRT4577_22353C.1.pep
LNHSNSEFSGSRGSRYDANINMHFVIMFGVMLIFPIPCWFVLLRIAARPRESKDHPST

SEQ ID NO: 284268 - protein, 114 aa, Zea mays
  Clone ID: MRT4577_22354C.1.pep
GPRGQEKKNPPKKKKKPGPTKNKKNPQNKKPGKQTKKPKPSKGQRTKRRKKKKTEGPHKRNPTPRQTRGPGTPKKKNKGEAPRTGEKKHGGHQKEGAQGWPKWGPSNPRQKAKP

SEQ ID NO: 284269 - protein, 73 aa, Zea mays
  Clone ID: MRT4577_22355C.1.pep
EYFFCIKSKYRQLGITHDFYFVRCTPMKVRFFPRGQQMGVHTCTEGDAKRMRSFFLFFLLERVVIASDQPRFL

SEQ ID NO: 284270 - protein, 308 aa, Zea mays
  unsure (1)..(308): unsure at all Xaa locations
  Clone ID: MRT4577_22356C.1.pep
ASPLQILVDASDGAFDYGNKFGEPLIQGYTRTFGMRLLNGERREWLKPIMFSGAIGQIDHAHISKGDPEIGMLVVKIGGPAYRIGMGGGAASSMVSGQNDAELDFNAVQRGDPEMAQKLYRVVRACAEMGESNPIISIHDQGAGGNCNVVKEIIYPKGAEIDIRSIVVGDHTLSVLEIWGAEYQEQDALLVKLESRSLLESLCERERVPMAVIGKIDGSGKIVLIDSAAVEHSKLNDLPPPTPVEELELEKVLGDMPQKTFEFRRVSQVTEPLDIAPGVTLLDALKRVLRLPSVCSKRFLTTXVDRCV

SEQ ID NO: 284271 - protein, 106 aa, Zea mays
  Clone ID: MRT4577_22357C.1.pep
PALGLNRAQEPPLPKTKGFTVWMIFFFPPRVEAPNQTRAPRFFPSRGGPNLFLTKRPPPSQGGFRVAGTRYKNPGWGFYGPLLLTKFSRAPPFVVWCPPKNYGPYP

SEQ ID NO: 284272 - protein, 82 aa, Zea mays
  unsure (1)..(82): unsure at all Xaa locations
  Clone ID: MRT4577_22358C.1.pep
LGPNFIFILKVRTHSXVGQSTAFGLIHYIVSSAKRTWPKCSFIRNWLDTMVEKSRKQMKERKIRSMKIRVEKKTLAVDAKKN

SEQ ID NO: 284273 - protein, 102 aa, Zea mays
  Clone ID: MRT4577_22359C.1.pep
ANPLSPGVGRFFYSTGPPGFPPGKRAVRPTPLIWVSSPLWPPRLFPFFFRLVFFLEFLTDNHFPPGTPFALFSPSFYTPPYRENWVPPRARARISGGTPGAH

SEQ ID NO: 284274 - protein, 160 aa, Zea mays
  unsure (1)..(160): unsure at all Xaa locations
  Clone ID: MRT4577_2235C.1.pep
RWPARADRPEYVPLVSPATTVRRVRRHCAEHQPVPRSLVNDQGDRTTPXRTXLTDSEXLMRDAXRTSVAIEPYEHRXDAKRFMERRSSEVXVQRDSKXWDTFNDISVPWENTMTVSQHRGEDTXPVNEEISLMDDMKXREIAEAYLGSSIKNAVITDPDY

SEQ ID NO: 284275 - protein, 50 aa, Zea mays
  Clone ID: MRT4577_22360C.1.pep
FWILAGGETYPRAMLYLAYVFMHCKKAQTNPKESDPGHAKWNKREVTCLR

SEQ ID NO: 284276 - protein, 63 aa, Zea mays
  Clone ID: MRT4577_22361C.1.pep
WPHPPTHSLLHSTTLYTSLPTPSIRTVIYPNPNIIHNTITTLLTLIHIKTITTSFTLRISLTK

SEQ ID NO: 284277 - protein, 71 aa, Zea mays
  Clone ID: MRT4577_22362C.1.pep
NRGRVLQPPLSSLRETNKATLRKATPNAPFRLGGGGGGSPKDRRPAVYDKEDEDEGRGGSEALTGTLIAGA

SEQ ID NO: 284278 - protein, 152 aa, Zea mays
  Clone ID: MRT4577_22363C.1.pep
REKIENINDQYWTLRAEEIPEEEKNLGPHDRLIHVYHFMKDPNQNQQIQNFGDPFLMVIREVETAAEVLERIQRKLRVPDEDFSKWKLAFISMNRPEYLQDTDVVSARFQRRDVYGAWEQYLGLEHTDTTSKRSYTANQNRHTYEKPVKIYN

SEQ ID NO: 284279 - protein, 119 aa, Zea mays
  Clone ID: MRT4577_22364C.1.pep
AGASSLGRAPRCATSACGQPAVCGFSRRGAGDEGSDLLQSAQHREVHNSHLSGAIARTRSKNHERKKLENNKAKNHAFEAKTPLRRRDSGGEASGSILRFNLRYGVYVCLSVYVQAAAS

SEQ ID NO: 284280 - protein, 582 aa, Zea mays
  Clone ID: MRT4577_22365C.1.pep
MDIAEHLRIRLKKEHEATAPKIQAKGPPPVHTIIKIARDEDLKEQIGKNIYFDLVDHEKVHSFRIQKQLPFTSFKEEVAKEFGIPVQFQRFWLWAKRQNHTYRPNRPLTPHEEAQSVGQLREVSNKAHNAELKLFLEVELGPELCPIRPPEKSKEDILLFFKLYNAEKEELHFVGRLFVNALGKPSEILTKLNAMAGFSPNEEIELYEEIKFEPNVMCEHIDKKLTFRSSQLEDGDIICFQKAPVPDGDAQVRYPDVPSFLEYVHNRQVVHFRCLDKPKDDDFSLELSKLHTYDDVVERVAHQLGLDDPSKIRLTSHNCYSQQPKPQPIRYRGVAHLLDMLVHYNQTSDILYYEVLDIPLPDLQRLKTLKVAFHHATKDEVVVHSIRLPRNSTISDVITDLKTKVELSNPDAELRLLEVFYHKIYKIFPPHEKIENINDQYWTLRAEEIPEEEKNLGPHDRLIHVYHFMKDPNQNQQIQNFGDPFLMVIREVETAAEVMERIQRKLRVPDDEFSKWKLAFISMNRPEYLQDTDVVSARFQRRDVYGAWEQYLGLEHTDTTSKRSYTSNQNRHTYEKPVKIYN

SEQ ID NO: 284281 - protein, 155 aa, Zea mays
  unsure (1)..(155): unsure at all Xaa locations
  Clone ID: MRT4577_22366C.1.pep
GKEEEDAEHLRTPPCSPPIPPRATLDCELHCRKHRIQPDGQEPGDITALHHDDDFSTVIIQTGDGNDGPRAIYYDLEPSALDEELTGTDLQLFHPVTLILEKXDAANXFRPGHYTTGXEIVDLCLGRIRXIADDCTRLQGFPYFSAAADGTDSVL

SEQ ID NO: 284282 - protein, 55 aa, Zea mays
  Clone ID: MRT4577_22367C.1.pep
SSFSSSRKLFTFREGAILTLRLTTPSTTFLLIRNFPTSVPSPSFTCFPYCIYYWV

SEQ ID NO: 284283 - protein, 67 aa, Zea mays
  Clone ID: MRT4577_22368C.1.pep
PRLQPFFWLLHALTGTHLHCSFMIFRNLVVFCVTYCYETMICFFLFMVPLTSELGSGLYIYAQCHFN

SEQ ID NO: 284284 - protein, 76 aa, Zea mays
  Clone ID: MRT4577_2236C.1.pep
INLELFTHLLCFQTVWDHWTHARTQKPYLCAKLLNPPGTPAIFWVWRNFLVATLWRFFKFLPMAFRCFLPPSSLGF

SEQ ID NO: 284285 - protein, 73 aa, Zea mays
  Clone ID: MRT4577_22370C.1.pep
CILPNIQFKYYYLIMATLNVCSGPSMQKQMLMVPAKFPHDMLHGSYAFILFALAPNSLDSISIWRVHLSSVRT

SEQ ID NO: 284286 - protein, 201 aa, Zea mays
  Clone ID: MRT4577_22371C.1.pep
MFLQRSAITAARRVAARPAVARTFVTSVARLDASRPATPSEQAAALAGTAEKKVGSYKVLKEIRTEEDLFGPGAAPGTVPTDLEQSTGLERLEILGKMEGVDIFDMRPLDATRLGTMKDPIMVRSAGEEQFAGCTGFPADSHSVTWLGITRERPIERCPECGSVYKMDYVGPEDDHHHHHPPEFEEPKTFADYIKPEYRYK

SEQ ID NO: 284287 - protein, 52 aa, Zea mays
  Clone ID: MRT4577_22372C.1.pep
CLCNGLDDGLLWCIIFVSRRPYISPSRVPLVLSTGALYFITLKEACQLTHNK

SEQ ID NO: 284288 - protein, 66 aa, Zea mays
  Clone ID: MRT4577_22373C.1.pep
APSRCMFPGTRRCPWNPVAVNWSDRSLRHNVYLTHFSSSSPMITINTKNGLSGSAVSGRNIHQFEV

SEQ ID NO: 284289 - protein, 154 aa, Zea mays
  Clone ID: MRT4577_22374C.1.pep
TLLMWRRVYPSKKERKKQEIVSNMEAVASLRSKPKEPARSVCVGENHGGGSILAPNPLPPSLFSISPVRHRHPPHTCSSCLLNPFASFNFSAIFFDSLVLLVTHSAQGKSGPRKSQLVLDSSFLGTSLVAAVTEVLTESGGWRDRHDDSRKANS

SEQ ID NO: 284290 - protein, 151 aa, Zea mays
  unsure (1)..(151): unsure at all Xaa locations
  Clone ID: MRT4577_22375C.1.pep
VKFKIWENAGQDRYDSLAPLYYKGADHASGVHYTSSAESFSEAQYXVKGVQKHGSFGIVMVLVGNRPDAPLLSECVLPVCASLGREQPYVFHSCPRPRQVIVHSNCFSKWQKGSIVLWSSMHNTCGHCLYHVMHARRIYCGLWMSNGSPFM

SEQ ID NO: 284291 - protein, 72 aa, Zea mays
  Clone ID: MRT4577_22376C.1.pep
RAPLIPQRYTAVRLPGPASGVSEPYAYGFVYCVQLSHDGVLPDRRVSNILRTTVTGTGVKLYTKACRSGCVI

SEQ ID NO: 284292 - protein, 69 aa, Zea mays
  unsure (1)..(69): unsure at all Xaa locations
  Clone ID: MRT4577_22377C.1.pep
LAAACVGVLWXXAXCGLSXAASXAXPSLLFLVXAVCWAXXAXAAXXAGXGRLGCLLGFLXAAXXXRRPA

SEQ ID NO: 284293 - protein, 217 aa, Zea mays
  Clone ID: MRT4577_22378C.1.pep
MALAARLVSRSRQLYSVQATLGNGGVTQVRSFAKDAAPADRPPVGGDDLLKGIFFEVKKKFETALGVLKKEKITIDPDDPAAVSRYAQVMKTDARTYLNTLQQLRIKSGLIDHLGIEPLMMEALEKIEKDIKKPLLRSDKKNMATLLAEFDKINKKLGFRKEDLPKIEEELELEIAKSELTELKKECVEAMETQLKREEFQDEEMPDVRKLDIRNFL

SEQ ID NO: 284294 - protein, 243 aa, Zea mays
  Clone ID: MRT4577_22379C.1.pep
MALAARLVSRSRQLYSVQATLGNGGVTQVRSFAKDAAPADRPPVSGDDLLKGIFFEVKKKFETALGVLKKEKITIDPDDPAAVSRYAQVMKTVREKADLLSDSQRIKYTIETFTKGIPDARTYLNTLQQLRIKSGLIDHLGIEPLMMEALEKIEKDIKKPLLRSDKKNMATLLAEFDKINKKLGFRKEDLPKIEEELELEIAKSELTELKKECVEAMETQLKREEFQDEEMPDVRKLDIRNFL

SEQ ID NO: 284295 - protein, 287 aa, Zea mays
  Clone ID: MRT4577_2237C.1.pep
MLGRGSPRLNMLARGSPRFNMLLSKGAQKKKSPIATTSKTHGGSPKGKTRANWNSMLEKTLYPPLVDLLHEHNTPEYKGNNGWTPDAWNKIAKEFQERERYAGFSKVQIQEKEKELKRDYRMLKDARKQSGVSWDEKRCMIQADPPIWDNIIKSFPRAFLFRNKSFPLFEALGELHDGNTAEGTYNFTSTQPNGPDLTQIGSGDVPINIEDREDVGDPLADHRQNEVEDREYEVEGVDVNADRQDERSVRTFVVSTTALLLGLMGPKKSSNIEVLMERYLDIRSKQA

SEQ ID NO: 284296 - protein, 65 aa, Zea mays
  unsure (1)..(65): unsure at all Xaa locations
  Clone ID: MRT4577_22380C.1.pep
RXXDHXKYIFICYTPXAAETSHGFQADKKQTXSGYSTELSPNFRMNVHLRAWFMLLHWKMPTVLV

SEQ ID NO: 284297 - protein, 71 aa, Zea mays
  unsure (1)..(71): unsure at all Xaa locations
  Clone ID: MRT4577_22381C.1.pep
ICSPKSVGTYGGDQAAHLCSDTTGDNDFCLVISRKRARKEKKMSLWKXYGAHASTPALYRNKKYVGHSSMQ

SEQ ID NO: 284298 - protein, 72 aa, Zea mays
  Clone ID: MRT4577_22382C.1.pep
PPPGGVVLGSVPPLAAASGRWAAASAAISPGRRPRAGLAPMWSPRPWRLCRRGKRCTGVVQAQEWAGAEAEG

SEQ ID NO: 284299 - protein, 145 aa, Zea mays
  unsure (1)..(145): unsure at all Xaa locations
  Clone ID: MRT4577_22383C.1.pep
MRFTASPVVELPVGGAVLMFEQDNDSFEVGTSVWPSSLVLVKFVERXASATRPXPFADVPRFPGTRAVELGSGCGPAGLGLSRLGLTDIAPVEAVKNSILESLFLRLVFFLASKCCFPAHHRTILSFPVTRNRFTDAMTSDARIR

SEQ ID NO: 284300 - protein, 87 aa, Zea mays
  unsure (1)..(87): unsure at all Xaa locations
  Clone ID: MRT4577_22384C.1.pep
MHYGWLTVMLRWVGWVEAVKRVLGLMXGVXSYDVDVVGEKVFFFCXXTPXAXLXTVCRTGMMTSFWEAEAVTGDSVTPAGASVWQVR

SEQ ID NO: 284301 - protein, 225 aa, Zea mays
  unsure (1)..(225): unsure at all Xaa locations
  Clone ID: MRT4577_22385C.1.pep
MRFTASPVVELPVSGAVLTFEQDNDSFEVGTSVWPSSLVLVKFVERXASATRPXPFADVLRFPGTRAVELGSGCGPAGLGLSRLGLTDLVLTDIAAVLPALRRNLRRNRVHLARAPRLAQLHWNCPAHLATLATPRRFDLVVAADVVYVQESVPHLIAAMDALADAERGVVLLGYQIRSPEAHQVFWETVPAVFPVIEKVAREHLDPEYAYEESDVFILRRSPRQ

SEQ ID NO: 284302 - protein, 134 aa, Zea mays
  Clone ID: MRT4577_22386C.1.pep
KKKKKKKKKKKKKKKKKKKKKKKSKQKKKKKIFIFFPFAPNLLMGNFCKFPSPWGPFYLAFRGPISPFGEPFSNPLAVFFQLVNWEIPAFSKFFRLAPFPLLAVWLIGKRPRPFRLFQHFHFFIGHSPPPLPFL

SEQ ID NO: 284303 - protein, 97 aa, Zea mays
  unsure (1)..(97): unsure at all Xaa locations
  Clone ID: MRT4577_22387C.1.pep
GSSTSPTATLARTEGSSTSPPATLAHSYTPIVHLNHLLVSIKGDVQXLPKGGEGRAEAGRVGETQRRLTHTTHLRAGPSLPLSRDTCNPYYEHPGAR

SEQ ID NO: 284304 - protein, 224 aa, Zea mays
  unsure (1)..(224): unsure at all Xaa locations
  Clone ID: MRT4577_22388C.1.pep
FCSYLLAQNLIPTGMAYLYLPVFIFLLSMACSCQSDDRLTPAKPLLPGDMXISHGGVFALGFFSLTNSSSSSYVGIWYNNIPERTYVWIANRDNPITTDVPGTKLVLTNSSDLVLLDSTGHTIWMTRSSISAGEGGTAAVVLLDSGNLVIQSIDGTAIWESFDHLTDTVIPGVSLSLSPSDAAAARRLVAWEGPDDPSSGNFSMGGDSSSDLQIVTWDGTRXFW

SEQ ID NO: 284305 - protein, 72 aa, Zea mays
  Clone ID: MRT4577_22389C.1.pep
YQGEQLTSIQGQNQQQVLQSSADIRYKLQGQFLFEGLFQFREASMRCVHLPGANFYSQLTHAAKLYASAESV

SEQ ID NO: 284306 - protein, 105 aa, Zea mays
  Clone ID: MRT4577_2238C.1.pep
GKFPVFFSIQAFLQTPCFPSQFCFGREQGFVPKQALCRRVFLLYKLFTTKIPGQRKKWFALWGQQGFFNLLNTKNNFHSLDLDGAGLMKSFLKILPDPFLGISPK

SEQ ID NO: 284307 - protein, 85 aa, Zea mays
  Clone ID: MRT4577_22390C.1.pep
HPLCPPIFVFSQTGSLGVLLSPFCPLFSLFAFSNGGRVKPRVALFQGVFPFSKPFFGGPKKTFSQAIYRFFKAPFFSKGGFVPFF

SEQ ID NO: 284308 - protein, 55 aa, Zea mays
  Clone ID: MRT4577_22391C.1.pep
QLFFSPGTGKKEGWSDSLLSWISEFFLILVHSSFGTGGLRTVTQVLFKKKKKKGP

SEQ ID NO: 284309 - protein, 180 aa, Zea mays
  unsure (1)..(180): unsure at all Xaa locations
  Clone ID: MRT4577_22392C.1.pep
AGFPIFNEGGVGFLGNPSLIPAQSILPLWACPVVVLGALQGFPVPGGPLGKVFYPLFPGGSFDPLGLPDDPEAFSGLKVKEVKNGPPPLFSLFGFFVQALVPGKGPLXNLSGPLSGPVNNNAWGFPPHFFPRKLGGWRGPPPPPPAPPSDILVFGCPLGRPGFRFFPYVNFFPVPGSIGQ

SEQ ID NO: 284310 - protein, 125 aa, Zea mays
  Clone ID: MRT4577_22393C.1.pep
LRDRGSPVHVSRRRRGCLSSSTSRTAASLGEQLLLRLYLSKLLSRRAPPLAAADADVYEFIASDPVYRPQLDVLLESRKFSLAAILVCAVPPRRRRAQVLQGAVRRPAVHRLPGHHRSRAGMRGA

SEQ ID NO: 284311 - protein, 108 aa, Zea mays
  unsure (1)..(108): unsure at all Xaa locations
  Clone ID: MRT4577_22394C.1.pep
AHCTKKSIERXSTGVLMASSSSISHRRLILAAAVLLSVLAAASASAGTSCVPVWAIQYNPFPSCLWYLTSRTCGIGPRLPWPELKRLCCLELADIPAYCHCTALSILM

SEQ ID NO: 284312 - protein, 57 aa, Zea mays
  Clone ID: MRT4577_22395C.1.pep
AAIASACYGKHCCFLEHTQVVPFYPQEAGNITASLQQQQLVAILRTPCGPHFWPIYN

SEQ ID NO: 284313 - protein, 140 aa, Zea mays
  Clone ID: MRT4577_22396C.1.pep
RCEETVASRTHMHGLKSSETTTLFFRSIYFTFWDSFFFRAGKGPGRVFRHVVARQLSAGAWVGLGCICKVVVGPSPYVCGRVESRRWCVKATIRIASSGSAATTAIAGGRQNGYGNGNKQVRHHPYRHAQAHKSAQRFQA

SEQ ID NO: 284314 - protein, 61 aa, Zea mays
  Clone ID: MRT4577_22397C.1.pep
QDLALRVAAPRPRSQSIRRLKSKAAGVQGNCTGLFKKTSFFFGNPNSQMFQMRGTLGCKNL

SEQ ID NO: 284315 - protein, 93 aa, Zea mays
  Clone ID: MRT4577_22398C.1.pep
APPQKGRGAPFYLIWVQIDCFSRFHESRLGNVPPPSCWVDHFGARHFFLLGTRNIFCLLNNEGEFPIKKKKKGKKESKNKTKKKKRKKYKKEK

SEQ ID NO: 284316 - protein, 215 aa, Zea mays
  Clone ID: MRT4577_22399C.1.pep
PVDPASVLLTFHKKLDKTIDNKTLHETFSSFGTILSCKVAVDEAGQSKGFGFVQYDKEEAAQNAIKSLNGMLINDKPVFVGPFVRKQERDHSFDKTKFNNVFVKNLSESTTKEDLLKIFGEYGDITSAVVMIGMDGKSRCFGFINFENPDAASRAVQELNGKKINLLPLQMLILSSKERYLVKTYTHWLSNWNQTKLQRSLECFWRWDQTESSTC

SEQ ID NO: 284317 - protein, 36 aa, Zea mays
  Clone ID: MRT4577_2239C.1.pep
ASPTKTSFYRCANQLKPCHDSGRYFVLEATLIPLDN

SEQ ID NO: 284318 - protein, 166 aa, Zea mays
  unsure (1)..(166): unsure at all Xaa locations
  Clone ID: MRT4577_223C.1.pep
CATSWGATLWRTFIRTMIMCTNLTRXHVIXACQGRCCPAYFSLISSXKHVDLWLIIXLQPRKTSSXTVAVXRVETRLSSFQLSVSRVXACIPMMMDMMKNRHSIEQXENXLSDXWTKNQQVAISTSTLLXMNKKLGIIYGLSSLINIMESGRLFIHSWYLHSKLDL

SEQ ID NO: 284319 - protein, 90 aa, Zea mays
  Clone ID: MRT4577_22400C.1.pep
GNDTEHTVLPEPENLKAIQGSDNKLETSEHVSVQPVSARNGSRQTKSVKRKERNAEVKSKKRKTSSAVTVVRAFPRLTALKGQLEVSIKH

SEQ ID NO: 284320 - protein, 34 aa, Zea mays
  Clone ID: MRT4577_22401C.1.pep
MKALIGAAAFLALASSAAFSTSKRYEAARTPPIY

SEQ ID NO: 284321 - protein, 98 aa, Zea mays
  Clone ID: MRT4577_22402C.1.pep
GYIILSLPFFVQAVSGFGLSGAVWDGSLRKAPEHQPNLKKDEINTLRRRYNPSKDPKKEDAPDCGAQTEAHNAPFLDPAKKGSRQLCTLEHTCATGFL

SEQ ID NO: 284322 - protein, 78 aa, Zea mays
  unsure (1)..(78): unsure at all Xaa locations
  Clone ID: MRT4577_22403C.1.pep
TSALANANPEQQRTILGENLYPLVEQLEPNQAAKVTGMLXKSKVAEAMDVLRNVAHQQNPNLPTSQLAALSLTEGIMS

SEQ ID NO: 284323 - protein, 84 aa, Zea mays
  Clone ID: MRT4577_22404C.1.pep
ASLVLFYKEESRNSNQIPRNGNASTVYSHNSYHLMQHISDKSFITTRGWQMHRGLPGINTTLVLLNDTRLASTSHPGTWLIYPL

SEQ ID NO: 284324 - protein, 255 aa, Zea mays
  Clone ID: MRT4577_22405C.1.pep
MSMLQAQFSQMSPAVPMTPTLAPRLPMYSPMAPQQLFYGQAPPAMMPPQPGFAFQQQLVPGMRPGGPHMPNYYVPVVQQGQQGPRPGIRRGAGAQGQQPVPPFQQQILPRGRMYRYPTGRNMPEAPAMPGVAGGMMQAYDMGGFPVRDAALSPAAQIGTLTSALANANPEQQRTILGENLYPLVEQLEPNQAAKVTGMLLEMDQTEVLHLLESPDALKSKVAEAMDVLRNVAHQQNANTPTSQLAALSLTEGIIS

SEQ ID NO: 284325 - protein, 88 aa, Zea mays
  Clone ID: MRT4577_22406C.1.pep
AGLSLISSFCKTGIKEDNQIPRNGNASTVSSLNSYHLMQHISDKSFKTTRRWQMHRGLPGINTTLVLLIDDHLVSIFHSVAGLMHPQD

SEQ ID NO: 284326 - protein, 155 aa, Zea mays
  Clone ID: MRT4577_22407C.1.pep
GTRAGGGPRSDPSPKAFQQPVPPFQQQILPRGRMYRYPTGRNMPEAPAMPGVAGGMIQAYDMGGFPVRDAALSPAAQIGTLTSALANANPEQQRTILGENLYPLVEQLEPNQAAKVTGMLLEMDQTEVLHLLESPDALKSKVAEAMVGLGRACGP

SEQ ID NO: 284327 - protein, 151 aa, Zea mays
  Clone ID: MRT4577_22408C.1.pep
VPRGRPGSVAYLCLSRAQRSSHIRHRLQLQATKPPARMDAPSGPHPVLAQAPSPSSCRPISTSGLCSLVVSAHWDRPQHRFTSTKPRRRALLAAVGSGLLLSLRYPLVPSSWCLCSSRRLGSHGVSSPSLPLPWTRAPRFCSSRPLPRCSR

SEQ ID NO: 284328 - protein, 652 aa, Zea mays
  Clone ID: MRT4577_22409C.1.pep
MSAQVAVVPNGGPGAVPAVVSPGAVGVAQPLPTTSLYVGDLEGAVSDSQLYELFSQAGQVVSVRVCRDVTSRRSLGYAYVNYSNPLDAARALEVLNFAALNNKPIRVMYSNRDPSSRRSGSANIFIKNLDKTIDNKTLHETFSSFGTILSCKVAVDEAGQSKGFGFVQYDKEEAAQNAIKSLNGMLINDKPVFVGPFVRKQERDHSFDKTKFNNVFVKNLSESTTKEDLLKIFGEYGDITSAVVMIGMDGKSRCFGFINFENPDAASRAVQELNGKKINDKEWYVGRAQKKSEREMDLKRRFEQSLKDAADKYQGLNLYLKNLDDSIGDDQLCELFSNFGKITSYKVMRDQNGLSKGSGFVAFSTREEASQALTEMNGKMISGKPLYVAFAQRKEDRKAMLQAQFSQMRPAVPMTPTLAPRLPMYSPMAPQQLFYGQAPPAMMPPQPGFAFQQQLVPGMRPGGPHMPNYYVPVVQQGQQGPRPGIRRGAGAQGQQPVPPFQQQILPRGRMYRYPTGRNMPEAPAMPGVAGGMIQAYDMGGFPVRDAALSPAAQIGTLTSALANANPEQQRTILGENLYPLVEQLEPNQAAKVTGMLLEMDQTEVLHLLESPDALKSKVAEAMDVLRNVAHQQNPNLPTSQLAALSLTEGIMS

SEQ ID NO: 284329 - protein, 180 aa, Zea mays
  Clone ID: MRT4577_2240C.1.pep
MGFVGDTMESIRSMQIRQLLTQIISLGMIVTSALIIWKGLIVFTGSESPVVVVLSGSMEPGFKRGDILFLHMSKDPIRTGEIVVFNIDGREIPIVHRVIKVHERPDTAEVDILTKGDNNFGDDRLLYAHGQLWLQQHHIMGRAVGYLPYVGWITIIMTEKPFIKYLLIGALGLLVITSKD

SEQ ID NO: 284330 - protein, 660 aa, Zea mays
  Clone ID: MRT4577_22411C.1.pep
MAAQVAAVVVPNGSPGAVPAVVSPGAVGVGLGVAQPLPTTSLYVGDLEGSVSDSQLYELFSQAGQVVSVRVCRDVTSRRSLGYAYVNFNNPLDAARALEVLNFAPLNNKPIRVMYSNRDPSSRRSGSANIFIKNLDKMIDNKSLHETFSSFGTILSCKVAMDEGGQSKGFGFVQYEKEEAAQNAIKSLNGMLINDKPVFVGPFLRKQERDHSFDKTKFNNVFVKNLSESTTKEDLLKIFGEYGNITSAVVMIGMDGKSRCFGFINFENPDAASRAVQELNGKKINDKEWYVGRAQKKSEREMELKRRFEQILKDAADKYQGLNLYLKNLDDSIGDDQLRELFSNFGKITSCKVMRDQNGLSKGSGFVAFSTREEASQALTEMNGKMISGKPLYVAFAQRKEDRKAMLQAQFSQMRPAVPMTPTLAPRLPMYPPMAPQQLFYGQAPPAMIPPQPGFGFQQQLVPGMRPGGPHMPNYFVPVVQHQQGQQGPRPGIRRGAGAQGQQPVPPFQQQIVPRGRMYRYPTGRNMPEAPAMPGVAGGMMQAYDMGGFPVRDAALSPAAQIGTLTSALANANPEQQRTILGENLYPLVEQLEPNQAAKVTGMLLEMDQTEVLHLLESPDALKSKVAEAMDVLHNVAHQQNANTPTSQLAALSLTEGIIS

SEQ ID NO: 284331 - protein, 36 aa, Zea mays
  Clone ID: MRT4577_22412C.1.pep
FISVFLHHFSLLTILLRPAVLLSWGLLLQADILAHS

SEQ ID NO: 284332 - protein, 91 aa, Zea mays
  unsure (1)..(91): unsure at all Xaa locations
  Clone ID: MRT4577_22413C.1.pep
MTTKEVALKQGCEYENCLIAMDKPGGEGASKQQKIDWYIQTLAKGLGNHEEAKKKIYNIXSERYIMLGCQNDEETCNKVEVLPEALIVLTH

SEQ ID NO: 284333 - protein, 40 aa, Zea mays
  Clone ID: MRT4577_22414C.1.pep
SNHLLRSFCLQLVLLPTFRSLIITGHRIVLLGELCNSSSR

SEQ ID NO: 284334 - protein, 102 aa, Zea mays
  Clone ID: MRT4577_22415C.1.pep
IGSLEAGRGNSFALTRAETELLIRFACSGRNPCVLILDEYPVLRQRISSTILYHTKKDPPLGLLRRPGSLSLSFSPHDAYYRPECVLRSRIAFLTAITPTMT

SEQ ID NO: 284335 - protein, 57 aa, Zea mays
  Clone ID: MRT4577_22416C.1.pep
SRRKRKTTPPLANDVPRRPPPTMTVDPAMDHLDEHARAAMNVGVSFSMAPPHSERRG

SEQ ID NO: 284336 - protein, 114 aa, Zea mays
  Clone ID: MRT4577_22417C.1.pep
KAPTPHNQSPYKSPRTKPPPKKEKNIFFPTQTTGGQPEKPPGGDLKTWGGGIQVLFTKAGKPPPFQLRNRPGFGICKRGHNPNAKTGHADPPIKGQKKGESPPKKGHLSPFHPR

SEQ ID NO: 284337 - protein, 40 aa, Zea mays
  Clone ID: MRT4577_22418C.1.pep
FSCLPGLTFDSSTKPAPSSIRLISICCQPLFLRIRSRTRG

SEQ ID NO: 284338 - protein, 160 aa, Zea mays
  unsure (1)..(160): unsure at all Xaa locations
  Clone ID: MRT4577_22419C.1.pep
RPGKPQSNPRPKXPPDNRTGAAAAAALPSPAIGMGTREVYEEKLRSGAHLHRDPTINPGLGSPRCPRCLSLLNPTAGKRDWAITSVLHDATAVAGSGAGALLSAVHGFNTGIPFVQKHVKGPKWLQLLVGVPPLLIFSVCCFTYHTADRKSSFSRISPGI

SEQ ID NO: 284339 - protein, 133 aa, Zea mays
  Clone ID: MRT4577_2241C.1.pep
EDLHLFRLPSVTHGRTCSPLCLRRQQLRLYAPCPPPPASLPVLRGFALAWVGRARSFAAPVESVHSRAYRAAQRSTHSLCRLPRRVLRGSAPGFALERTELCLQPDTPSSTGSQEYRIISDLVSLLYVIFVPN

SEQ ID NO: 284340 - protein, 205 aa, Zea mays
  unsure (1)..(205): unsure at all Xaa locations
  Clone ID: MRT4577_22420C.1.pep
MRHNLSLQVEPAHMQPARKPQSNPRPKXSPDNRTGAAAAALPSPAIGMGTREVYEEKLRSGAHLHRDPTINPGLGSPRCPRCLSLLNPTAGKRDWAITSVLHDATAVAGSGAGALLSAVHGFNTGIPFVQKHVKGPKWLQLLVGVPPLLIFSGASAVFGAYALPRFVQLTVTSYYAASTGSQYAVSQITRQIERAHFPESAQESE

SEQ ID NO: 284341 - protein, 126 aa, Zea mays
  unsure (1)..(126): unsure at all Xaa locations
  Clone ID: MRT4577_22421C.1.pep
MPERGLFSHAYKKYSSLVEXRLMKHKFGXWVFNKPXVDAATLGLRDDYTIIKHPMDLGTIRRLVTRWLTMNPHELAEDVRITSHNGRTYNPTGPVVHFMVXTKVXIFDAQWIXIEADVNYLLLCSP

SEQ ID NO: 284342 - protein, 56 aa, Zea mays
  Clone ID: MRT4577_22422C.1.pep
HYTPLPMTLMRLQLKLVSNGTKLALYLRYIVAKCVIFILSFRTWNLTFIEKSIPMN

SEQ ID NO: 284343 - protein, 89 aa, Zea mays
  Clone ID: MRT4577_22423C.1.pep
EAFQRVVGDLCSTIASQESLPAPTRCDICTPSEILQAGIFLVLAPAPGRWRLFQIMAPNRRSRATSRDRLASSWHDFLYDPVPSCSNSR

SEQ ID NO: 284344 - protein, 114 aa, Zea mays
  Clone ID: MRT4577_22424C.1.pep
PGWWARLAANPGRGSTPRFPARSGWMSRGPPTNLRFPGNTKTWDSKSPSQGPATRGLWIPTTCWGPPPGRRGGPTFQAPFPWPGRPPGGPPPCSRLMLLVLFPPVGKRTGPLAP

SEQ ID NO: 284345 - protein, 55 aa, Zea mays
  Clone ID: MRT4577_22425C.1.pep
CPDPDLCSLVAGCAKLLHLVCTGFAVNATGMANQLQLGNRLPWANYSTKLIATHH

SEQ ID NO: 284346 - protein, 248 aa, Zea mays
  Clone ID: MRT4577_22426C.1.pep
MGATVPTNDQILVPETLLKKRKSQEKARAERSDAVEKKKAANKEKRQVIFKRAEKYVQEYRDAEREKIRLHRVAKSEDSAYVPAEANLIFVVRIKGINKMPPKPRKILQLLRLLQINNGVFVKVTKAITEMLKVVEPWIAYGYPNLKTVKELVYKRGYGKVNKQRTALTDNSIVEENLGKYGIVCVEDLIHEIYTVGPNFKQASNFLWPFKLSNPTGGFRPRKFKHFIEGGDLGNREHAINALVRQMN

SEQ ID NO: 284347 - protein, 33 aa, Zea mays
  Clone ID: MRT4577_22427C.1.pep
YLLLTMPRLCSLVQTRKHVNPQLIKSFNSCNYS

SEQ ID NO: 284348 - protein, 150 aa, Zea mays
  Clone ID: MRT4577_22428C.1.pep
FVADKAGVFGVGLHAPNEKLQETIVPSAKSYPLGALMDDCKSYFLETGRRVSFEYTLLAGINDEKEHAEELAELLRMCGGGYHVNLIPYNPIEGSEYKRPYRKVVQAFVDALEARKITVSVRQTRGLDANAACGQLRNEFQKNPLLAIEA

SEQ ID NO: 284349 - protein, 142 aa, Zea mays
  unsure (1)..(142): unsure at all Xaa locations
  Clone ID: MRT4577_22429C.1.pep
SGRRPRPRPRGGGWRVRRRTRRRRRRLRRRSXCTPRPCRPRRRPTGRLLRPHDSRAPSSRSRGSAPPPRGSRTPRRYPLPRGPPRTAAGPRPPPRSRRSRCSPRPRTSPPAAPGTSPHPLRPLERRRXGTPRPSTRRRRARV

SEQ ID NO: 284350 - protein, 87 aa, Zea mays
  unsure (1)..(87): unsure at all Xaa locations
  Clone ID: MRT4577_2242C.1.pep
QLQYSFILLFMVSSLYVFFSFFFFFFFFILFFYIFFFLFFFIFILFFFSIYLFFLFFLIFFFFLFFYXFYIIYYFYFFIIFYYYLFF

SEQ ID NO: 284351 - protein, 64 aa, Zea mays
  unsure (1)..(64): unsure at all Xaa locations
  Clone ID: MRT4577_22430C.1.pep
GATGAVAYGEDMATSKSHITHNQSRQWKRDGIKIHRSHRYESLDGMDPXFLRSMRFVKRHDKKG

SEQ ID NO: 284352 - protein, 63 aa, Zea mays
  Clone ID: MRT4577_22431C.1.pep
LLPQFYTSASANSSFPMMCLTIRCVYPRLWSSMSGSYRCHLLCAPLSLFVTSVHSLAILRSRS

SEQ ID NO: 284353 - protein, 109 aa, Zea mays
  unsure (1)..(109): unsure at all Xaa locations
  Clone ID: MRT4577_22432C.1.pep
LDSRHDKLVECMRKGERTVDVEDLTPPAHPLLSPGYKTETGAQHRXSAIENYMVHIHDCRHNQDHVNLIDDHHAXIKDILFNTRDNVLELIDSHLLPYYTTALSMELYL

SEQ ID NO: 284354 - protein, 125 aa, Zea mays
  Clone ID: MRT4577_22433C.1.pep
PTRPNQPLVVRKVVRWPGRHGQHGARCGLGQREAQPRRGAGVAARPRHERVCGGPALARRPPSPTARGVLPPPSARERTAPAARSRPGAVARPGAALTATVLAPLPVARESPDPADLARTQLSGT

SEQ ID NO: 284355 - protein, 79 aa, Zea mays
  Clone ID: MRT4577_22434C.1.pep
LFDKIAALHHAYFQGMLIQVNYLTIAIKLSSFLSSVYVAVDINLKIRYIIVFYLLLIFLSVGPLVLMLVSRFPLCEVKF

SEQ ID NO: 284356 - protein, 61 aa, Zea mays
  Clone ID: MRT4577_22435C.1.pep
LELHTCTPQTDRHGCTTHIYTHASVGLQLNLRRYPLTITHHQPEPQRTNQSYVWQTLKYPM

SEQ ID NO: 284357 - protein, 43 aa, Zea mays
  Clone ID: MRT4577_22436C.1.pep
LIYRGIPDGCLFRKPGGARYWVYLCKPCFVNLAPFIILKKKKN

SEQ ID NO: 284358 - protein, 101 aa, Zea mays
  Clone ID: MRT4577_22437C.1.pep
KNRVTNKGPKKKKANGGPLLKKNTSWIKNPGKKPPSKFGDTREGTWKNTNPATHKKIMGLGPRTNGTKKGPPQLGIKTHYFFKKTGENWRGTIFLTQRAGF

SEQ ID NO: 284359 - protein, 46 aa, Zea mays
  Clone ID: MRT4577_22438C.1.pep
GPPLKCCSTPSCYSLRERLSLHVYIICKPYLSSSQLPPSWHNLVQW

SEQ ID NO: 284360 - protein, 196 aa, Zea mays
  Clone ID: MRT4577_22439C.1.pep
MEFIDPWDSQSRARVVHSGANSTSFSSSTAKAPLSLRHAASCAAAAVALLAAAFYLLPTYQILSSLLIWIASSLLLAPFAPLSATGGDISVGRGRVVPAPEPAPEPTPEPTPAPRRGRRQNPVPTPTKPSDPGTPPVQSAASLHPLQKATTADGAVVDGGEREEDAGEWTDQELELLRRQMVKHPAGEPQRWEKIA

SEQ ID NO: 284361 - protein, 100 aa, Zea mays
  Clone ID: MRT4577_2243C.1.pep
FSRDPLLAGGPLNVGPRMKGFPLQRGPWVTLFCPPDLVSPAPVSPPWFAFAFSHFPGLLFVPGPLVMSPPFFFYLFFFRALFSVVEFFLGGFFPWESLQR

SEQ ID NO: 284362 - protein, 69 aa, Zea mays
  Clone ID: MRT4577_22440C.1.pep
FLPLFRPLFLNNKTKQKKKKKRGKIKKIPNKLLHNNNKLTNTNKIHTLLMSTKQFYLFKLSNLVISSRF

SEQ ID NO: 284363 - protein, 41 aa, Zea mays
  Clone ID: MRT4577_22441C.1.pep
LDCKYLYNADNNTGSSQAHTSPAWSYYKHKHHVAKTLPPGH

SEQ ID NO: 284364 - protein, 141 aa, Zea mays
  Clone ID: MRT4577_22442C.1.pep
TSPCRRTPSTSVGWRRRWTRRSCTPRSCPLVRSRTSRRRSISPRRSTAELFGRVLTVNYAFPERIKGGEQGWAAQPIWADADTWFERQQQEEEMQRLQAEHRAAMQAAEKLHREKLAAEREGEKEEDPMAAAEAQAVKQSS

SEQ ID NO: 284365 - protein, 102 aa, Zea mays
  Clone ID: MRT4577_22443C.1.pep
NQKNAIYLFHNCSLEDFYFNMAMIYTLNGSDLGVKATFPYLREKMLLPRFIHPTWGGAFSTRAIFLRYTHWVWVLVTCIGNTWALLKRNFIKNAYCFLLLKF

SEQ ID NO: 284366 - protein, 165 aa, Zea mays
  Clone ID: MRT4577_22444C.1.pep
MNQPVQKNTLYVGGLAEEVDEKILHAAFVPFGEVKDVKTPLDQSTQKHRSFGFVTFLEREDAAAAMDNMDGAELFGRVLTVNYAFPERIKGGEQGWAAQPIWADADTWFERQQQEEEMQRLQAEHRAAMQAAEKLHREKLAAEREGEKEEDPMAAAEAQAVKQSS

SEQ ID NO: 284367 - protein, 110 aa, Zea mays
  Clone ID: MRT4577_22445C.1.pep
HLNDSEYVLRKPVLFTEVGYLQHAEANSTVDGDILLKVVYDKLYDSAKKLQAGSGALIWQLMVEGTQMYHDDFSMVARDRPSTYKLMKEQSCRLQSLYGKEGDPTWKCSP

SEQ ID NO: 284368 - protein, 323 aa, Zea mays
  unsure (1)..(323): unsure at all Xaa locations
  Clone ID: MRT4577_22446C.1.pep
MEDDDDCPPLAIELPPRVPSPPEQSPSDAEPVGVTVITGYLGAGKSTLVDYILNEQHGISCSVILNEVGELERVVKTKDRMDHILLETTGLADPAPLVSVLWLDDQLESSIVLDSIITVIDXXXFRVQIDEHXXSSSFPEAFHQIAFADVVILNKIDLVEDSLEDLEKHIRDVNALVTVVRSVRCQVDLNEVFNRQAYGAKNSSHLQELLDYSKSVPPSRRHDNSISTLCIYEQDSVNLAKVESWLEDLLWEKKSIMDIYRCKGILYIHDSDQVHTLQAVREVYEVVPARKWSETESRMNKIVVIGRNLDINVLQDSFSGCKS

SEQ ID NO: 284369 - protein, 75 aa, Zea mays
  Clone ID: MRT4577_22447C.1.pep
RARLRANAFGGGAGPGEIGTTHTRACCGWLILALIAPMVATGGTCGMMKRKPGGRHIKPLPAPAATAAIYSRCGD

SEQ ID NO: 284370 - protein, 318 aa, Zea mays
  Clone ID: MRT4577_22448C.1.pep
MEDDDDCPPLAVELPPRVPSPPEQSPSDASPVGVTVITGYLGAGKSTLVNYILNEQHGKRIAVILNEFGEEIGVERAMINEGQGGALIEEWVELANGCVCCSVKHSLVQALEQLVQRKDRMDHILLETTGLADPAPLVSVLWLDDQLESSIVLDSIITVIDAKNFRVQIDEHKNSSSFPEAFHQIAFADVVILNKIDLVEDSLEDLEKHIRDVNALVTVVRSVRCQVDLNEVFNRQAYGAKVESWLEDLLWEKKSIMDIYRCKGILYIHDSDQVHTLQAVREVYEVVPARKWSETESRMNKIVVIGRNLDINVLQDSF

SEQ ID NO: 284371 - protein, 191 aa, Zea mays
  unsure (1)..(191): unsure at all Xaa locations
  Clone ID: MRT4577_22449C.1.pep
SGALIEXXVELAXXCVCCSVKHIWXQALDSLCRXKXRMDHILLETTGXADPAPLVSVLWLDDQLESSIVLDSIITVIDAKNFRVQIDEHKNSSSFPEAFHQIAFADVVILNKIDLVEDSLEEXLEKHIRDVNALVTVVRSVRCQVDLNEVFNRQAYGAKNSSHLQELLDYSKSVPPSRRHDNSISTLCIYE

SEQ ID NO: 284372 - protein, 69 aa, Zea mays
  Clone ID: MRT4577_2244C.1.pep
RRVRNLPPRRCTSLDRRRRREAQLLGGRLVHSPAVELQDDHRSAVPHGARTVCCCNCYGWPINTRILAL

SEQ ID NO: 284373 - protein, 126 aa, Zea mays
  Clone ID: MRT4577_22450C.1.pep
HTPREGQGTQGEGRHKTFTNNNKKGREATGAKPTRKRGKGPGHDKENTKRRLARKPPRGNKPRGMHQDHPVKKQTRPTKLGWKKTQPVKLRGGQTDHSTHTKGIKKNPNNNRITQKKKQPPQQVHA

SEQ ID NO: 284374 - protein, 185 aa, Zea mays
  unsure (1)..(185): unsure at all Xaa locations
  Clone ID: MRT4577_22451C.1.pep
ACLVADAHLLTLMDVARGLGVPTLALRTGSAACFRWFMAFPMLCDKGYLSSHESQEPDMLVTELPPYRVRDMPSASGATLGLMRDLISRAVTAVNASSGLIINTFDALETDELASLRRGLAVPVFDIGPLHVHSPAASSSLLRQDRGCLDWLDARGPASVLYVSFGSLASMSAADXVETAWASPT

SEQ ID NO: 284375 - protein, 79 aa, Zea mays
  Clone ID: MRT4577_22452C.1.pep
HDLVVAVYVMSNRGHDIVVHSLYKYIDDKMVGRYIDYLKYCRECLWFGKMFDHAFSMAMTFMVYTRLMRWVCVSLFFYM

SEQ ID NO: 284376 - protein, 109 aa, Zea mays
  Clone ID: MRT4577_22453C.1.pep
MEAALVERLEAAVARLEAVVAYGASLASAAARDLDAPEARMDPAIVAYDEFVAEAVGRLTAAAEKIGGKVLDATKVLAEAFAVDKDLLVQAKQLQKPASMADAHGFFKP

SEQ ID NO: 284377 - protein, 88 aa, Zea mays
  unsure (1)..(88): unsure at all Xaa locations
  Clone ID: MRT4577_22454C.1.pep
YSTFHSNLHTFNHNPTHNIYYPLTFHXPSLFTNYYNQXFLIPLLXLLSHHTHYFFLTNLSHYILNPVHIPYLSYNNPTLFQFFFTLII

SEQ ID NO: 284378 - protein, 115 aa, Zea mays
  Clone ID: MRT4577_22455C.1.pep
EMEAYPPCDAGMSFALVEFQRIPLWPPRAGWHVPTTATCSRVDIALFLGSNLYGRPRCPDDRACSRGDRGIRGPGCCGVGAKGLLKEAVAYISMSSEHLRLCPKGLHTLGLPHGW

SEQ ID NO: 284379 - protein, 68 aa, Zea mays
  Clone ID: MRT4577_22456C.1.pep
LARKAWRQFLLQLQQHPLRTKMITAACLGVIMRLLTHKLSGFQTIEKRKLQLKMLCGTDMGGPFGHFL

SEQ ID NO: 284380 - protein, 61 aa, Zea mays
  Clone ID: MRT4577_22457C.1.pep
LFQFSGQCALAPEWPSCKYELRTLCVFMVVVLKNPKKPLGPLLFTPKSPGVPTPVLPPHFS

SEQ ID NO: 284381 - protein, 72 aa, Zea mays
  unsure (1)..(72): unsure at all Xaa locations
  Clone ID: MRT4577_22458C.1.pep
RADVPLLVRRGHCGHMEVTGSRGARNMTLHCIAEDLRVPRERLGLIRNVYISKDYYSGEPGGFPFXEFVDPY

SEQ ID NO: 284382 - protein, 52 aa, Zea mays
  unsure (1)..(52): unsure at all Xaa locations
  Clone ID: MRT4577_22459C.1.pep
WYVISVLLTRIRPENVLGIDRKVPSTPPRFRISQSLFLPVVFLPTMLSSXPT

SEQ ID NO: 284383 - protein, 58 aa, Zea mays
  Clone ID: MRT4577_2245C.1.pep
VAPFFLFCFESKIFIIFFAFLFFFFFFFIFFFFFLFYFFFFFYLFPTRHADGVGRARD

SEQ ID NO: 284384 - protein, 116 aa, Zea mays
  unsure (1)..(116): unsure at all Xaa locations
  Clone ID: MRT4577_22460C.1.pep
GTPGAGRXARHAHSCGSYSGTQAPVTPPPTLLPPCVPKRLTPQCTSGWQRRHSAERDPVNWGAGGGGAGREPPGRWGSCMVAHARQAAAKIEAPTLRVGHVAAGGSGNDATGVTVK

SEQ ID NO: 284385 - protein, 107 aa, Zea mays
  Clone ID: MRT4577_22461C.1.pep
YLKMGTIFGCEGAPLLPLLFVLVNMGFNISLLNLLKISSAVISSLASTFSVPLSIYAFTLPLPYIGAASSLPPGFVAGAAVLTTGLLLYSLPQAQHYGNSFHNKNDD

SEQ ID NO: 284386 - protein, 97 aa, Zea mays
  Clone ID: MRT4577_22462C.1.pep
YSRAQAEQTSTTSRITRRQPRIGDPPAGLEEIKQSNAPSQMLPALESSPVTPMPAASNPLPTHGTVKSINIPTANHNKPAPSRRADKLFLTHGPLRR

SEQ ID NO: 284387 - protein, 64 aa, Zea mays
  Clone ID: MRT4577_22463C.1.pep
HAGGERRDCELARASLLRRGMGYLVLSPSPSPSPPHAFQYASSSSSSSSSGATSCRRRTRRGGA

SEQ ID NO: 284388 - protein, 153 aa, Zea mays
  Clone ID: MRT4577_22464C.1.pep
HVLKVGSVGAQQAAAAAVCRISSSAEMKRAVGEHGCVAPLVRMLEAKSNGAREVAAQALAALASCPANAREMKKDDKCVPSLVQLLDPSPANTAKKYAIACLLTLSGTKRCRKVMVSHGAIGYLKKLSDMDVAGAKKLHERLERGSLRSMFSR

SEQ ID NO: 284389 - protein, 111 aa, Zea mays
  unsure (1)..(111): unsure at all Xaa locations
  Clone ID: MRT4577_22465C.1.pep
MKFGWLLVCCLCAIXVRHSGSPVPVLNESGAKSTSRQAPAEQVQPVAAAPQAGEDDDDDDDDDDDDDVDLHLGDDDDDDDDDDDGTAADDDDDDDDDEDYFERFFDDILGA

SEQ ID NO: 284390 - protein, 72 aa, Zea mays
  Clone ID: MRT4577_22466C.1.pep
SSNSRDPNTLVAVRPPIKGSLGSEDIKQRVACKDMENNPSLGAVCTPFRAPQFCHHMVGVNFENMIFQKRSN

SEQ ID NO: 284391 - protein, 108 aa, Zea mays
  Clone ID: MRT4577_22467C.1.pep
SYQEMSDPLYYTMRFLDGLRFDIKSTVMIQRPKDLDTAYVLAQLQEEIVDGSRTKDYKKLDSTVASKSYARGPMPLPPPPKAATTSTKTTEFRTSEANKGTATSDRLS

SEQ ID NO: 284392 - protein, 52 aa, Zea mays
  unsure (1)..(52): unsure at all Xaa locations
  Clone ID: MRT4577_22468C.1.pep
HHSSAIVSALRPTCCDQPMRCLXKVRRCVHGTTGSTYMPRRSTMRYWFPWSN

SEQ ID NO: 284393 - protein, 95 aa, Zea mays
  Clone ID: MRT4577_22469C.1.pep
GAWELASSCRCLEEEPLRLFCFGRTLSAPLSVGFSAARCLVLASTCCCCCHAGVLAIPLQVPAHQGVPRFVVVTRSPLALVLPSTLPRLDVRRLF

SEQ ID NO: 284394 - protein, 33 aa, Zea mays
  Clone ID: MRT4577_2246C.1.pep
KQSILLRHPFSVLLLPPSEITKPVRAHPRYISS

SEQ ID NO: 284395 - protein, 56 aa, Zea mays
  Clone ID: MRT4577_22470C.1.pep
VCFSLYIACVLLFFFSLTSLENLVGHMYVWAIRIVGSVSGPYPWVKAGWPIKTTPV

SEQ ID NO: 284396 - protein, 118 aa, Zea mays
  Clone ID: MRT4577_22471C.1.pep
GESACPRAGGNFGAGQGWRGAPRTDLGEEATCQTTGGEGLRDCGAALLGAGLRGGSARRGTAGRGAGRERSALRQAAVLGVDGADCGLRARGGRVARDGRRLCSARDSRDVPLGVDGA

SEQ ID NO: 284397 - protein, 60 aa, Zea mays
  Clone ID: MRT4577_22472C.1.pep
YGIKFQLVYILELRGTPCKNPNLLDAQSIHAFLLHLNTTQVISPEKQNFEMCPRPTAIAS

SEQ ID NO: 284398 - protein, 41 aa, Zea mays
  unsure (1)..(41): unsure at all Xaa locations
  Clone ID: MRT4577_22473C.1.pep
VTPMPPNGCRPPLKRRLFXIPFYXRFSSSVWHRTKNRLTRT

SEQ ID NO: 284399 - protein, 48 aa, Zea mays
  Clone ID: MRT4577_22474C.1.pep
IKAVLDHQTPVAEDVPEQFQAAALSLSYTYSSDIGKDMPNTDDNPMSI

SEQ ID NO: 284400 - protein, 225 aa, Zea mays
  unsure (1)..(225): unsure at all Xaa locations
  Clone ID: MRT4577_22475C.1.pep
MISPDAARNVVGIIGNVISFGLFLSPVLTFWRICKARDVEEFKPDPYLATLLNCMLWVFYGIPVVHPNSILVVTINGVGLVIEAIYLTIFFLYSDGPKRRKAFGILAVEILFMVAVVLGVILGAHTHEKRSMIVGILCVIFGSMMYASPLTIMSRVIKTKSVEYMPFLLSLVSFLNGCCWTAYALIRFDLYVTIPNALGAFFGLIQLILYFCYYXSTPREKDVEL

SEQ ID NO: 284401 - protein, 148 aa, Zea mays
  unsure (1)..(148): unsure at all Xaa locations
  Clone ID: MRT4577_22476C.1.pep
LLTQGTRSPWPPHGPPTTCCARRPWPGSDWSRLPAGRACRSERSRQPARQSVAAHAELXSSALVISLSTGEGLFLGRLGLFNFQRENAAKHVPAQNGKTHFDAGDERAKEXAALLKSNDPVGFNLKNSLGWGLLGHISSYYILDNLSN

SEQ ID NO: 284402 - protein, 76 aa, Zea mays
  Clone ID: MRT4577_22477C.1.pep
MFPLLQRLIECHKKKKKKKKKKKKKKKKKKKKKKKKKKKKKKKKKKKKKKKKKKKKKKRGGPFLRNQILLPRVSKV

SEQ ID NO: 284403 - protein, 73 aa, Zea mays
  Clone ID: MRT4577_22478C.1.pep
ILPKMLKTLELTNQRRRRGSYSHLGRRREMASSPSGIPSHAEQDPDGSVLRTAAMTAFAPNLLMQMQTRAPTI

SEQ ID NO: 284404 - protein, 63 aa, Zea mays
  Clone ID: MRT4577_22479C.1.pep
SGMQPSNLVRSFGHPRPAWFLPHRNGAWWRMSSSRRRTRGSRPRRRLVHEVLRLLRVARPWCE

SEQ ID NO: 284405 - protein, 88 aa, Zea mays
  Clone ID: MRT4577_2247C.1.pep
MPTYSMAKGQLLLGLVASLGVLAFFFLGGYQDFWIGDLFGGGTPGGYPCKPPKDLTGDHFHYGGLGNPGTGLKPFKNFLGLGVVNTFP

SEQ ID NO: 284406 - protein, 84 aa, Zea mays
  Clone ID: MRT4577_22480C.1.pep
NVGTRAAILQCVLTLQTNAHAIIAGCLQSPYPSRAPVQCYEAAAATRAPCPGQRTHHRHPAVAGPAQTAWVSWTSCDECTSALA

SEQ ID NO: 284407 - protein, 53 aa, Zea mays
  Clone ID: MRT4577_22481C.1.pep
KTAGRRTRPPTPTRTSAIIIIEVCSKTGRVFSYGETSPRHYPQHCGLCHGLNY

SEQ ID NO: 284408 - protein, 87 aa, Zea mays
  Clone ID: MRT4577_22482C.1.pep
KKKLPHLKIPHNSSKTRKKLCSQTPPYPLTLQGKKRPIQRPFFNQPFPRWQIALAPTWVPPQANNTTHFHGPNGTLAQFPAYLPLLS

SEQ ID NO: 284409 - protein, 117 aa, Zea mays
  Clone ID: MRT4577_22483C.1.pep
STMHTLAIAALHLLQLLATIPTLSSQDTEAIPGCTSRCHNISIPYPFGIGDERCYLHEGFKLACKTEEQPPVLYMNSAGYRVVKIKLNPRVVYLDTRFHQLLGKSSYGESWNLSLDN

SEQ ID NO: 284410 - protein, 46 aa, Zea mays
  Clone ID: MRT4577_22484C.1.pep
ITIRSSKTLATLSTLSERVLTGNGSYRIEYERLLPFLLAPRHLFFF

SEQ ID NO: 284411 - protein, 34 aa, Zea mays
  unsure (1)..(34): unsure at all Xaa locations
  Clone ID: MRT4577_22485C.1.pep
NFKFNPFNCSSHSSTTIDIIIIYLALCGSLTIIX

SEQ ID NO: 284412 - protein, 56 aa, Zea mays
  Clone ID: MRT4577_22486C.1.pep
TGVGAIVLESRLIQVTSVEPALPAAGSERSFTTIALAFNSLGQRIFWPGVSIQNNM

SEQ ID NO: 284413 - protein, 150 aa, Zea mays
  Clone ID: MRT4577_22487C.1.pep
STKPLIKFEQIEKAFQKQHGIFQNAKVAGKKSVKNNRWYKEVGLGFKTPREAIEGHYIDKKCPFTGDVSIRGRILTGEVISTKMKRTIVIRREYLHFISKYNRYEKRHKNLAAHLSPCFIGVQQGDSVTVGQCRPLSKTVRFNVLNVQKK

SEQ ID NO: 284414 - protein, 58 aa, Zea mays
  Clone ID: MRT4577_22489C.1.pep
LLIANPKGTQHRESQKGKGRWSKEMLTDKTPPFASLGIRFCYMLMEHTKNKIKPRTSL

SEQ ID NO: 284415 - protein, 76 aa, Zea mays
  Clone ID: MRT4577_2248C.1.pep
VGFMVSAAIMASVTLVNCAAASFYVKVKPQKSMWVGLLKVVVVAVKNRDLVLPEADHGAQFHWLPGSTQTVPSNKI

SEQ ID NO: 284416 - protein, 80 aa, Zea mays
  Clone ID: MRT4577_22490C.1.pep
PFEPVHTDLGLMPKKGKASRLKMVFPSPSKSNVETTKIDGIQEGPKGLGTYVSQKKRGGGQGFPLEQPMMLASGRKKYLI

SEQ ID NO: 284417 - protein, 223 aa, Zea mays
  Clone ID: MRT4577_22491C.1.pep
MGKVPSSRAGSRHQQFRARAMTRVDDLQEVFSGLQSARKDSRPTDAAILEAQLQQMLREWRSELSAPSPASSLQGNARELSDPPSDTLRMLQLAAAEEEDDATSKMVEQQQQPPPPANQNQGHAQVCQDMKREPREEAVDVAVEKPQPLSQGVLLNGAATASAVFHDQELTVEDFLYDDDYKIDLSGSNLDVLNNLEGIVQLEYPQLNLPQELAPNVYIDMSY

SEQ ID NO: 284418 - protein, 113 aa, Zea mays
  Clone ID: MRT4577_22492C.1.pep
MLSTSSRRCPPRHRHRPPLPPSRPRTPRRRTTTSRRPPLLPPPPPPPSPARTARPHAAPPRGRRYPAIQPHGPGRPSSSSPRRRTAAARARARARKPPPRRRAPRPPQRTTGP

SEQ ID NO: 284419 - protein, 223 aa, Zea mays
  unsure (1)..(223): unsure at all Xaa locations
  Clone ID: MRT4577_22493C.1.pep
MAAVRSDRVHHHHRRSEASCPATSAAVAAARADDALRQRPRGLVQVRERDQGPLSTGHQHLHHHHHQLRRSAAFPPRRPGPGRRPPQRCESDLNIREHRSCSEVAGGTAAGCAAVCCCFPCVMVEVAVLATVRAPAALCRKAARVRKGRRRSASXRARPRRYTSSXDDTGVXRWMPAPPMRWRCXKPALQLEEKGELEKEVWARFYGTGFWRSPSQLDDNDDR

SEQ ID NO: 284420 - protein, 77 aa, Zea mays
  Clone ID: MRT4577_22494C.1.pep
VRTISDSASRRPRKAHEGARSCHYPWLNTTTSSSSSEQLKHDDRTRRVRRLQPVPQLQERLLDRNLLLRLEQLRRVH

SEQ ID NO: 284421 - protein, 367 aa, Zea mays
  unsure (1)..(367): unsure at all Xaa locations
  Clone ID: MRT4577_22495C.1.pep
GVSQPLLRLMLTTYTTVTRACEDALLSLPSIPGFAFAIARAYCHIIIAMPPESSPEISSVAAILGRLNQISMATVEGDHRGFGDLAMDVLGDALANRNLPVRKKALNLVTSLLTPRNVCDVLGLLNSELVVAASANLQIEYRQMLEKAIRECHSAHPGSILEFTLDPKYAVFTDCIRYTMDIMNSNPLLRVQLLKGLLRTLRHVRXTXVCAAAVWIISVFSESPVEVDDAIAALSCLFKDLLDRRKIEKQILGSEMEDEYVLPTEYYGVTTARGAQGERQQRPWLVEMDELLFVRIGLTRQADGSYDIASSSKQSSSSARHADRPPSLELTDNLAFLVHSGDSLLADFVQDMLSELVVKAQSCSESV

SEQ ID NO: 284422 - protein, 236 aa, Zea mays
  unsure (1)..(236): unsure at all Xaa locations
  Clone ID: MRT4577_22496C.1.pep
QHLDACLPGRIASQTPQADVPSLSRRIRRNQRRALLLCRPWRAHIPWPGSPAFLPRPARRCRSAPSFPARRPELQSSRPPALYFLLALLASFFLAALTLFLSLELAAVLFSCSHGCSPNHLPWPPRPCSPLCRRPALTRIPLSRGASKALLVHRAAFQLGLLCSCVSLSPARELSISLCTAASPLPGCGLLQLXGALCRACCFPGRGSRCSSPWPSLPSPVASQFLLVARPKSLRL

SEQ ID NO: 284423 - protein, 69 aa, Zea mays
  Clone ID: MRT4577_22497C.1.pep
GRSHALILMHRHVKLALHIALCLLFFRLCSNGPSRFIPESKVVLLLHQLVVRLYKANCGSKLQKDTRSP

SEQ ID NO: 284424 - protein, 97 aa, Zea mays
  Clone ID: MRT4577_22498C.1.pep
WKLQKLGFFFPENKIKTRNPFFFLHPGNGTTEPGGPRLFEGGRYGAGPRLKGTNIMLGPGGAFHFKRTHSGEKPWMDNRSNARACHGNFRRDSFKNR

SEQ ID NO: 284425 - protein, 75 aa, Zea mays
  Clone ID: MRT4577_22499C.1.pep
PFFNPYLKSASAGSRTHDLTNSTRGPFAIPCLRPKAISSNSLIWSLKTLFYTVHCTFAEWSLNMEMGMGKQLEIA

SEQ ID NO: 284426 - protein, 114 aa, Zea mays
  unsure (1)..(114): unsure at all Xaa locations
  Clone ID: MRT4577_2249C.1.pep
MVDDAVGGGPAVRCAGPAPASLSSSRKQHQQPDDAGCRCCDDHYHHDVIMLRRTMSGRAFPPPISAIGKGGRSWLCLQAHREGGRLVLRQMRLPSHDLLQPCQEDGXFTLLMHP

SEQ ID NO: 284427 - protein, 131 aa, Zea mays
  unsure (1)..(131): unsure at all Xaa locations
  Clone ID: MRT4577_224C.1.pep
MRECISIHIGQAGIXQDENACWELYCLEHGIQADGQMPGDKTIGGGDDAFNTFFSETGAGKHVPRAACDDLEPTVIDEVRTGTYRQLFHPEQLISGKEDAANNFARGHSTIGTEIVDLCLDRIMKLADNCT

SEQ ID NO: 284428 - protein, 120 aa, Zea mays
  unsure (1)..(120): unsure at all Xaa locations
  Clone ID: MRT4577_22500C.1.pep
RGGGQGGGAHGGGGRRGGKGDCESKTGPARPTGGGGXPGGIWAVGPARSRCPDGTPFGPVSKRPAVRGPPGGPPAPPRGRGGPHRGKGKTRPPPPPPVGVGPVHPPVSFVALPLKRGIPD

SEQ ID NO: 284429 - protein, 169 aa, Zea mays
  Clone ID: MRT4577_22501C.1.pep
PSFFVFFFFFFFFFFFFFFFFFVFFSFGTQPGAAGPGEEGKKGGGRRDPPGGGGGKHQQTGGEQTTRPNNAGRATRPPPHQKTKKRFPTTYTRTTRPAPAGGSRLPDQPARGAPWWLEGEGPPGKQRHHGRGNPGGALYNNNRHHSGAAPQPRRSHPSGYSNPSVGLHS

SEQ ID NO: 284430 - protein, 341 aa, Zea mays
  Clone ID: MRT4577_22502C.1.pep
MALSSLFITLPIPNVPSPKPRRMLTSRASSDAPAASASFDLRRYWTSLIADVESELDAAMPMQPPESIHYAMRYAVLPGAGKEGAAKRAPPVLCVAACELLGAPRAAALPAAAALEMLHAASLVHDDLPCFDAAPTRRGRPSTHAAYGTDMAVLAGDALFPLAYTHVISHTPSPDPVPHAVLLRVLAELARAVGSTGMAAGQFLDLAGATALGEAEVMQVLTKKFGEMAECSAACGAMLGGAGPDEEAALRRYGRTIGVLYELVDDIRSASGNGKMRSNASVLRSLGMDRALGIVEELKAQAKTEADRFSDKYGDRVLPLYSFVDYAVERGFELQDAAATL

SEQ ID NO: 284431 - protein, 41 aa, Zea mays
  Clone ID: MRT4577_22503C.1.pep
SSPSFHSQLWRSCDPCFSHNVISYQLWIQLLLYSKDVTFGP

SEQ ID NO: 284432 - protein, 92 aa, Zea mays
  unsure (1)..(92): unsure at all Xaa locations
  Clone ID: MRT4577_22504C.1.pep
HRAHPSSSPYLHSSSNQGGYHSERASKAPISRRHLNPAVTFDASRVGNITLSRALLYXTAHVVASTVTCFLLRFXRAGMATFTFRLTFTSLY

SEQ ID NO: 284433 - protein, 105 aa, Zea mays
  Clone ID: MRT4577_22505C.1.pep
CSRTVSIIGQCGSSCFHICRLLLPLSTHPSRSQLPPAPFPIDVLGQHLGSRPRPHSFLVSLRASLVSQSCSYIGASRSWLACSRQLFHSVSPEHIRSDGPFRPGA

SEQ ID NO: 284434 - protein, 366 aa, Zea mays
  unsure (1)..(366): unsure at all Xaa locations
  Clone ID: MRT4577_22506C.1.pep
MDSLAAACLCSRRRRARRLLLAAAAATTGYGLYRLYRYHRRRIVAALSLADAVSQVGSDLAEFLRSESDQVPRSLLQLSKLAASEPVSSAASSLSESLASGVLRAISHQRXTSTTAEXPQTPLQDRILDRLLSPEGAGFASAVVGSLARSLVLSSXTPAGRRPATARSRGGWLXCSATGKEASADLVRVFVSTAVAAYLDRTAAVRSNNHLLAGLSDPRHEAQVKDLAVSVCNGAIETFLRTSRQLAKEASSARIEVTSMERVVEDSDSNCVIHKVSSTLAAPSNRRFVLDVTGRVTAETVRSFLDFLAQRMSDGARKSIVIARDEVAERGLVAVKYLGAKSMAIFTISLALCMHILMGTRFLLPA

SEQ ID NO: 284435 - protein, 95 aa, Zea mays
  Clone ID: MRT4577_22507C.1.pep
FLSSVPGSPSAPSRVVLLGSGARVRRRGEQSVAGSVCGVWGCCLSVLAAFRSVALVRLMLSSSRPPPLSVVGFWPPLPSSSLPPWVISVLASGGL

SEQ ID NO: 284436 - protein, 76 aa, Zea mays
  Clone ID: MRT4577_22508C.1.pep
LLILEPTRLQSILPPTLFSSAALFGTVLIDYHLTARIQKLQHGFHTRHFHISRVHDGLLRQPFSVVLDAARACNQT

SEQ ID NO: 284437 - protein, 83 aa, Zea mays
  Clone ID: MRT4577_22509C.1.pep
MNGRSSSLPLAARAGLPATLLVVAAGAGPDSVAVSYLQVTDSVAACLPHALDSERAPSLRCWMQLRSLNQHAPAVGDRPATRL

SEQ ID NO: 284438 - protein, 75 aa, Zea mays
  Clone ID: MRT4577_2250C.1.pep
MDMADWGPEVVAVALLVLLSPGLLLQLPAKGGRYVEFAIFQTGGACILVHAIIFFALATEFLIAIGAHISTELVE

SEQ ID NO: 284439 - protein, 84 aa, Zea mays
  Clone ID: MRT4577_22510C.1.pep
PLLYQRVFFPWGPCFGPMGGGGLTRKCGVFFPGGFFVGSPLFFFNTGAGPRGGFVSPTGSPEGFGPSPLFYPHLYLRGPGGFFF

SEQ ID NO: 284440 - protein, 169 aa, Zea mays
  unsure (1)..(169): unsure at all Xaa locations
  Clone ID: MRT4577_22511C.1.pep
QARIQTNWRRATSVIPNAALSASTERTILYKTWXTQPGRKQGPRIARQTKRAKXLPRPTAGPRGAIVQCQTLRSNMPAAAGRGXTLEELKAGGLPKKLEPTIGFSGEHRRRNKSFPGLHANVQRLKTYNDKLVIFPMPAHTANAGNSTPAELATATQAQGDYMHITRGE

SEQ ID NO: 284441 - protein, 970 aa, Zea mays
  unsure (1)..(970): unsure at all Xaa locations
  Clone ID: MRT4577_22512C.1.pep
MTSNFVTTIKSLKLIEGCKAAQLYALSSVGAASTSGSADAGXGAAWASPSPRLLQRPSRXRSGSLYYPHTAPSTSGSFVPEPHLPCGLPVADALEPALDACLRPVDHVGALAASYRRVSAATSGSDDDLCDAYLEQHALFQSIGDAQLIRGALRAARVHADNPHRRAVLAAWLRYERREDELXSTAAARALHRDXPMLECPRAAVFASVSHSVDPASPCPCXAHRILSSSLHPTASGAARXLGAASEMSEEEEPETNDLWFIIGEEEVACERSCIAALSKPLNTLLYGGFAEAHRDRIDFSRDGITPRGMRAVSAYSRHGRVDDFPPDIISQLLAFANKFCCEGLKADCDNRLAAMVRGLDDARTLIDIGLEEASHLLVASCLQAFLRELPKSLTHLDIARLLCSPQGRERLDVSGNASFALYYFLSYVAMEQDMRSNTTVMLLERLNEFAEQPWQKQLALHQLGCVMLQRGEFEEAQEWYEAAVAEAHVYSLAGEARAKYKRGHKYAAYKLMNSVVGDYDEPAGWMYQERSLYCVGKEKLADLQAATELDPTMTFPYKYRACTLLEEDNAESAVAEISKVVGFKMATDCLELRAWFYLALEQCELAVQDVRAILTLDPTYMMFHGRMHGEQLIELLRGQVRQWDMADCWMQLYDRWSVVDDIGSLAVVQQMLAREPGNSSLRFRQSLLLLRLNCQKAAMRSLRCARNSSLHEHERLVYEGWILYDSGHREEALAKAQQSIGLQRSFEAFFLKAYALGDSSLDTDSSLSVVQLLEHANSCASDNLRKGQAYNNMGSTYVDCNMLDEAAECYGIALNIKHTRAHQGLARVHFLKNRKKAAFEEMTKLVQIATNSASAYEKRSEYGERDAARSDLDTATLLDPTRTYPYRYRAAVLMDEGKEEEAIAELSGAIAFKPDLQLLHLRAAFFDSMGDSESALRDCEAALCLDPTHGDTLELYSKASTKAGTETES

SEQ ID NO: 284442 - protein, 969 aa, Zea mays
  unsure (1)..(969): unsure at all Xaa locations
  Clone ID: MRT4577_22513C.1.pep
MTNNFLTTIKSLKLIEGCKAAQLYALSSVGAASTSGSGDAGGSSNGXSPSLLRRXKDHLDAVRXSLYYPHAAPSTSGAFVPEPHLPCGLPVADALEPALDACLRPVDHVGVLAASYRRVSAATAGGDDDLCDAYLEQHALFQSIGDARLIRRALRAARVHADNPHRRAVLAAWLRYERREDELXGAAAARALHRDXPLLECPRAAVFASVSHSHSVDPVCPCRRPPLPPVTPPPHRLRRNTSGAASEMSEEEEPETNDLWFIIGEEEVACERSCIAALSKPLNTLLYGGFAEAHRDRIDFSRDGITPRGMRAVSAYSRHGRVDDFPPDVISQLLAFANKFCCEGLKAACDNQLAAMVRGLDDARSLIDIGLEEASHLLVASCLQAFLRELPKSLTCPDIARLLCSPEGRERLDISGNASFALYHFLSYVAMEQDMRSNTTVMLLERLNEFAEQPWQKQLALHQLGCVMLQRGEFEEAQEWFEAAVGEGHVYSVAGEARAKYKRGHKYAAYKLMNSILGEYDEPAGWMYQERSLYCVGKEKLADLQAATELDPTMTFVRPRVRCALLEEDNAASAIAEISRVVGFKMATDCLELRAWFYLALEQCELAVQDVRAILTLDPTYMMFHGRMHGEQLIELLRGQVQQWDMADCWMQLYGRWSAVDDIGSLAVVQQMLSREPGNSSLRFRQSLLLLRLNCQKAAMRSLRYARNSTLHEHERLVYEGWILYDSGHRDEALAKAEQSIGLQRSFEAFFLKAYALGDSSLDTDSSLSVVQLLEHANSCASDNLRKGQAYNNMGSIYVDCNMLDEAAECYGIALNIKHTRAHQGLARVHYLKNRKKVAFEEMTKLVEIASNCASAYEKRSEYGEREAARSDLNMATLLDPTRTYPYRYRAAVLMDEGKEEEAIAELSGAIAFKPDLQLLHLRAAFFDSMGERESALRDCEAALCLDPTHADTLELYSKASTTKAEPQS

SEQ ID NO: 284443 - protein, 105 aa, Zea mays
  Clone ID: MRT4577_22514C.1.pep
LEKKTHRARVAPTRGSQARRRFPSLSSPLLPRRRRSWPPAWPSGRQGGWRRGSLLRVGDALRSRPAIHPSRGCVDLTGWLLRMRRRRLVPVQGQGTMVVWGGPGP

SEQ ID NO: 284444 - protein, 94 aa, Zea mays
  unsure (1)..(94): unsure at all Xaa locations
  Clone ID: MRT4577_22515C.1.pep
RRLFIRSNMLNAAWSLFKPLLKKMLEKRIAHDLLPYVTRGPVGAHYLAVXYHVRWGHLSTERIKACIIHAYIFVLFMLFHLCKCARPLSEIDFM

SEQ ID NO: 284445 - protein, 252 aa, Zea mays
  unsure (1)..(252): unsure at all Xaa locations
  Clone ID: MRT4577_22516C.1.pep
MAPSAVDSTHHSADGNRPGDIHRDYLDDRNAKAQDTLYTTSNGVPMPHPYETQRVGENGPLLLQDHHLIDLLSHFDRERIPERVVHAKGGGAHGIYRTTDALDDLCLADIFQQGHECPITVRFSTVGGESGTPDLARDPRGFSVKFRTAEGNWDMVANNTPVFFLRDPAKFPHFIHTQKRHPQTHLTHSDDSTVFWDYLSQNPESVHQVMILMXDRGIPHSWRKMHGYAGHTLKLVNKNGDWVYXQMHMKSK

SEQ ID NO: 284446 - protein, 94 aa, Zea mays
  Clone ID: MRT4577_22517C.1.pep
GVGKPFPFLGKLGRSIKKQKKGGAFAFFFFYPVFSLGQGKGPYPYKRFCFIKGSCLWVFFSRQGVFFFGTPKKFKKGGGLGENCFCKKKKILPP

SEQ ID NO: 284447 - protein, 83 aa, Zea mays
  unsure (1)..(83): unsure at all Xaa locations
  Clone ID: MRT4577_22518C.1.pep
HAFAHAYDHAFTDSYDIIDEELSVRGQRAYFLQELAHRSXTANAWMPMSKLTDFVSCANYHSLELHDTQENLTQCADDLGIPF

SEQ ID NO: 284448 - protein, 124 aa, Zea mays
  Clone ID: MRT4577_22519C.1.pep
MSVVGFDVGNDTLVAAAARQRGIDVLLNAESKRESPAAVAFSHNARLIGCHAASASSAHAPFSSVKRLLLGATGRNPDSSLLRDLPRLPFSVCHACGGGAVVHVDHMGAPDRALCDPSADAGRL

SEQ ID NO: 284449 - protein, 66 aa, Zea mays
  Clone ID: MRT4577_2251C.1.pep
LRVQTNYEETFGSRSITTPSHTILKSIGGLAYKSMRVSFKALFGLLFYIQFVNVGFKRLHVLAFSI

SEQ ID NO: 284450 - protein, 64 aa, Zea mays
  Clone ID: MRT4577_22520C.1.pep
GVGRSPPGFFKAVKQNPGQASKQPPSLSWQGQIKPQMSPKAFKKIKLRGKLLNIDLQELLGKGC

SEQ ID NO: 284451 - protein, 132 aa, Zea mays
  Clone ID: MRT4577_22521C.1.pep
PSPPPPLRREPPYAQSLRSLSFKRAAVAFPRRAPAASCTSSSARRPLLGSAGGLGAAATATSRLLNTQGERRPRSATRSRSCSDDTGHGSARARRLRLRARRPRRSYSVLQRPQPENAAASAHGAPLPAAAE

SEQ ID NO: 284452 - protein, 739 aa, Zea mays
  unsure (1)..(739): unsure at all Xaa locations
  Clone ID: MRT4577_22522C.1.pep
DDFVAAALAQANVTRTDHIMWTMGDDFNYQYAESWFRNMDKLIQHVNKDGRVHALYSTPSIYTDAKHASNESWPVKXDDYFPYADSTNAYWTGYFTSRPTFKRYVRVQSGYYLAARQIEFLVGGRSSLGLFISSLEDAMGIAQHHDAVSGTAKQHTTDDYAKRLALGAAKVEKGVNTALACLTSSNGTCGSSVVKFSQCSLLNISYCPSTEEAISSTKRLVVVVYNPLGWERSDFIRVPVNDQNLVVKGSDGNIVESQLVEVDNVTRNLRKFYVKAYLGITTHKAPKYWLLFQASVPPMGWNSYFISKSTGAGYNSTEHVSDVVSPSNSTIEVGPGHLKMSFSKASGQLNRIFNSISGVDLPVQQSFLWYRSSEGDASDSQASGAYIFRPDGNTPTTVSSSVPLKVIRGPLVDEVHQQFSSWIYQITRLYKNKEHAEVEYTIGPIPVDDDVGKEVITRLTANMVTNSTFYTDSNGRDFLKRVRNYREDWNLQVTQPVAGNYYPVNLGVYVADEKYELSVLVDRAVGASSIQDGQLEIMLHRRLLKDDGRGVGEPLDEVVCVDQDCQGLTARGNYYVNVEKLGHGAHWRRTYGQQVYSPFLLAFTHEDETSSKSYSVAKAGMMNANYSLPDNVAIVTLQNLDDGTTLLRLAHLFQAAEDPRYSKVAKVDLKKVFGKRTIKELTETSLSANQKKSDMKKLSWRVIGNTETGPAAVKGGPVDSRALVVELGPMEIRTFLLKF

SEQ ID NO: 284453 - protein, 99 aa, Zea mays
  unsure (1)..(99): unsure at all Xaa locations
  Clone ID: MRT4577_22523C.1.pep
MANRSKVWIALLLALTEALSARTEDEPATAAEGEAVLTLDVNRLNXDATTHSLIVAEFNTTSCGHCKKLATXYETAVKALITHDRTIALAKVDANEKKN

SEQ ID NO: 284454 - protein, 94 aa, Zea mays
  unsure (1)..(94): unsure at all Xaa locations
  Clone ID: MRT4577_22524C.1.pep
VLPTPPDVTSHGHXRCPHPGAETQVSANEMGLVQASLPQHXQCCPLLDDLKELHATVRLWTCISLTILXIHLDEPLNLNLILHNCGYRCPHDFT

SEQ ID NO: 284455 - protein, 184 aa, Zea mays
  Clone ID: MRT4577_22525C.1.pep
TPHRMARKAKPAAQGTAVVAAATGVQYWLLKTEPGEWSWSDQARAPGGVAPWDGVRNRQAMSSLRAMRPGDRCLFYHSGAGAASRRVVGVVEVARPWYEGEGEEAVAGGAVDVRAVGEFRNPVPLGVIKKAAGEVEGMKDFALLRQARLSVMPVPAKIWDWVCDAGGGLVQDGEGEDEEEEEEA

SEQ ID NO: 284456 - protein, 55 aa, Zea mays
  Clone ID: MRT4577_22526C.1.pep
LVSWTGLIIASSPNDQRQVHETICGGEEALNTLFLQTVAEKNGPQGDHLMAYGPN

SEQ ID NO: 284457 - protein, 140 aa, Zea mays
  Clone ID: MRT4577_22527C.1.pep
LKNRVLLLGFKYEGWPPKIFKALRDFSPYERIEATWTPRAPGLKKVLFPPTGGNGPRDRGFHRSLGHPGVAPAGAGPGGEFPPWGWSWTPPVLTFLNPGIIAWAKLSVLQQTGVFLGREFLGLGPLGPKKGPVLKIFSRG

SEQ ID NO: 284458 - protein, 100 aa, Zea mays
  unsure (1)..(100): unsure at all Xaa locations
  Clone ID: MRT4577_22528C.1.pep
KILIXKTTTDTQGQIHLHPATHQTFSLLFIILDRIDDHHVNHRVPNYTKLIANGSLNNCYFLQLGRITSNSKPTPLQQHAHISMHKVNDMKQLTCCYNIK

SEQ ID NO: 284459 - protein, 137 aa, Zea mays
  Clone ID: MRT4577_22529C.1.pep
MHTNSAIPERPEGRDNAKKRCRVMADTSSSSTAVEMLQKMHERGEKNDEKEDQLRQEMFQMERERLELQKLNWEKKWAIMESNAKLRQNEYELNQWNADLLVMSQDLDKLAPPLRAMYEQKQMEIMKRRGINTPSAS

SEQ ID NO: 284460 - protein, 71 aa, Zea mays
  Clone ID: MRT4577_2252C.1.pep
GMLIPAKTRLLQPQKQSIVAWQTTPVAISPRIQAIEGETELMHQEDSLTLTASLLGSSGRGKKQTPEAMRT

SEQ ID NO: 284461 - protein, 40 aa, Zea mays
  Clone ID: MRT4577_22530C.1.pep
GVGIVSCGAPATFLCSVRQSSLSSPPVSCWAPFSICARVG

SEQ ID NO: 284462 - protein, 51 aa, Zea mays
  Clone ID: MRT4577_22531C.1.pep
FAAGNGNHQISKRRSPLVIYFACSSGKLCLAEFLQWVSTPCCSCPWSLACY

SEQ ID NO: 284463 - protein, 81 aa, Zea mays
  Clone ID: MRT4577_22532C.1.pep
ILRGRVPLWPSPRFVVRRHPFRDKNAPRLFIKGCAPFLKKWVAGVDRAQKFFIIHSALLMVQFYHDEEELVGKNNFALQDH

SEQ ID NO: 284464 - protein, 51 aa, Zea mays
  Clone ID: MRT4577_22533C.1.pep
NPIVNTILTCFSSCFKYENFSQNNNCFSTCLNNIQSPYVSGQRQPHSYWSI

SEQ ID NO: 284465 - protein, 121 aa, Zea mays
  Clone ID: MRT4577_22534C.1.pep
ALKHEPPKCSGSDGLPDFSWQGVWAAYKKASAPGPAFDFEGRPESPADKGSPRASDSEWDAMFDSLLLGDQFAFFDPGGYKSLDSLLSADPVQSNPPPGGDQDMPLWSFDEGCLVEDTPSF

SEQ ID NO: 284466 - protein, 52 aa, Zea mays
  Clone ID: MRT4577_22535C.1.pep
IFRNFLTRDGVRVSVGAPITLCWILGGSSRVVSSEWCSVCFRMDPVILGVRA

SEQ ID NO: 284467 - protein, 176 aa, Zea mays
  unsure (1)..(176): unsure at all Xaa locations
  Clone ID: MRT4577_22536C.1.pep
KKKKKKKKKKKKKKKKKKKKKKKKKTRAEFNFGIPTIRNLNFLKMGRPFFKPNHLIIGKDGNPTKTIKGPKGFNNKFYNRNNINRILGPKASXISLKNSACRCFGNMVSKKKNFYPINNNCFFAKDPSGKDIKALEKNIKNLLSPSTPFFLNTRNNPYREGADFGREYPFSLRKGA

SEQ ID NO: 284468 - protein, 59 aa, Zea mays
  Clone ID: MRT4577_22537C.1.pep
DLFTHPSRTPRYPHAVKTIQPVCPTSATRRRVPCCPTTTPATRDARSHMPLRSEAPRRT

SEQ ID NO: 284469 - protein, 83 aa, Zea mays
  Clone ID: MRT4577_22538C.1.pep
ICGTLQCTRNSAPYKSKAAPTVGKTAASSPGKLLTFTKVCAATKAATIWSCMLVCHHKHPTGGRAATGGNFHIRTVPLMGREP

SEQ ID NO: 284470 - protein, 122 aa, Zea mays
  unsure (1)..(122): unsure at all Xaa locations
  Clone ID: MRT4577_22539C.1.pep
GRRAPCNVTTGIVXLEGGRGGXXXLIXLYXLTLKXIXXFPKYYFYXKAFXSFTNHXLXIFLXNNYFXLIXXLIXFLQFXELIXRPXDELKLIAKMIEWDPWGVPGDYXWEVIEDYTSIAKHV

SEQ ID NO: 284471 - protein, 54 aa, Zea mays
  unsure (1)..(54): unsure at all Xaa locations
  Clone ID: MRT4577_2253C.1.pep
CAGVYGKGAHPGXNGAXLVDQANGPSFNANGAHGSKYLVPALVIMHTLSCATVV

SEQ ID NO: 284472 - protein, 69 aa, Zea mays
  Clone ID: MRT4577_22540C.1.pep
DFRLVHGGSCGSPSRSFSPFRKPCSAPKWKEMTGSGIFAAGGEAEEDESANASATPIRTAPKNYQVLLM

SEQ ID NO: 284473 - protein, 138 aa, Zea mays
  Clone ID: MRT4577_22541C.1.pep
PPRVFFFFFFFFFFFFFFFFCLGKEDRPFNAILNAPGYLSSNPHSEPMFRRHEILDQPKTTSKQKVNSKKPRGRNLTSKTKGLTWRTRQGFPTVAPDRKDSHIGTGLGHKATGTGRPRGISCGTCVPSDPGKPTLSPM

SEQ ID NO: 284474 - protein, 82 aa, Zea mays
  Clone ID: MRT4577_22542C.1.pep
ILPPTETGTAPREILFHGHYMWDPGSKKRREIAFCARGFLLTPRLSTNKNTGCFYIFNTLCLQTGNDQWSISHLSTQGWGKA

SEQ ID NO: 284475 - protein, 123 aa, Zea mays
  Clone ID: MRT4577_22543C.1.pep
NRRPALPCSAAEELGAAPGPTNNCTTDRTVEQSQDEERRPLLVLRLMLARPSRRTSHVSPVAGARESRSDQRLETRWRRRRGSETGGGAELLGVERPERPDQGRHGRLRRTKQSAPDRWVLST

SEQ ID NO: 284476 - protein, 96 aa, Zea mays
  Clone ID: MRT4577_22544C.1.pep
GGERGSTTRPSPSPTPKPPQTQPRPHRVPSANGKGAPAATPKAPHSLPRAPSLPLLCPSVPCPFLTLTTVRLALTLSNKVKDLLLTNQKKINKTNT

SEQ ID NO: 284477 - protein, 198 aa, Zea mays
  Clone ID: MRT4577_22545C.1.pep
MSSLVRSFGSLYSQKLRSTTRLGSATAAPPRLQALVRSGFSGSSHGGDVRRPPARPSQHQSQDKERTPFFILARLAVGSILAAAAPMLHSRWASFLLIQSRAKSPVPRAAKLCTDAKFNSAPMPSGEVDMVKDTAEVVAEAVEDAATVAEKVSSEVAEQLPENGRLRTAVVLLEHASKEVAEEAHLAQNIIHKISQHK

SEQ ID NO: 284478 - protein, 154 aa, Zea mays
  Clone ID: MRT4577_22546C.1.pep
MLHSRWASFLLIQSRAKSPVPRAAKLCTDAKFNSAPMPSGEVDMVKDTAEVVAEAVEDAATVAEKVSSEVAEQLPENGRLRTAVVLLEHASKEVAEEAHLAQNIIHKWSPTLRDEVSSPEPATEKRVYFFISGTRLRLACLERPDSTMKQPKCA

SEQ ID NO: 284479 - protein, 104 aa, Zea mays
  unsure (1)..(104): unsure at all Xaa locations
  Clone ID: MRT4577_22547C.1.pep
HPTLSKKSQTYLNHTQPTKTHPSQPVKIDPPQIIHSKHILGDXXPPPPHKKAPXXPPHKXKPPLHQHHHLSKDLTIRTPTTXDXEAQGHGTXNTPRPPKQXPPR

SEQ ID NO: 284480 - protein, 98 aa, Zea mays
  Clone ID: MRT4577_22548C.1.pep
LTKVKLYLFQLLHAYWVLLPPGAKDELKLGTGSKHPPGRETGKPFKGGAKLVYGTKKTQGDYACELPKNPWKKPSTITRGTREHNPGGNTFPDFLKGD

SEQ ID NO: 284481 - protein, 79 aa, Zea mays
  unsure (1)..(79): unsure at all Xaa locations
  Clone ID: MRT4577_22549C.1.pep
PFLPYLQKLFPFNQLTLLNFSGPLQQRHQLLNPLVGATPLVPPFLQQQQLFPYTQFFLMNPVLXSHHPLVGGPPSPPSI

SEQ ID NO: 284482 - protein, 240 aa, Zea mays
  Clone ID: MRT4577_2254C.1.pep
MTGYRSRSPSRSYSPRRRYSRSPLRRKRYDDPRDRYRWAGAGGGGDRRGYGRPLAQSGLLIRNISLTARPEDIRATFEQFGPIKDVYLPRNFHTRELRGFGFVKFRYPEDAAVAKREMHHQVIGGREISIVYAEENRKTPQEMRMRTRTSGRYMDERYTRLSRSPRSRSHSYSPPPSPVRRDFRGRERPDSYSPQYSHSPRPRDSRHHRSDGRSPTPSLDDHKPKATPVNGGHGPAVASR

SEQ ID NO: 284483 - protein, 104 aa, Zea mays
  unsure (1)..(104): unsure at all Xaa locations
  Clone ID: MRT4577_22550C.1.pep
AXDKXXRAHTTGDGXXXGSTXDTXPKXGAEXNKANXXDXRAXPGXRDGGGXXAXQXXGDXKPXXPSEAERXKKXRGRXXXXQDEPEXXRGXRPXDDAXGXAXAR

SEQ ID NO: 284484 - protein, 56 aa, Zea mays
  unsure (1)..(56): unsure at all Xaa locations
  Clone ID: MRT4577_22551C.1.pep
SSPDASEFRVRSTVIDRLPSIARINLCTLRSNRHGVLSFQKDELARAYWPSMXPRS

SEQ ID NO: 284485 - protein, 47 aa, Zea mays
  Clone ID: MRT4577_22552C.1.pep
LAMFSMFGFFVQAIVTGKGPLENLADHLADPVNNNAWAFATNFVPGK

SEQ ID NO: 284486 - protein, 109 aa, Zea mays
  Clone ID: MRT4577_22553C.1.pep
IGVPPGFSQPEVVKTRAMNAGKLAPYKGKWGPGPPLRLAGLKNLKLKFFNPGESLIFKPARPLGPFFFFFFPPPFSFLNPKERVFRGLLFSQNWVNPVPPQTPTSFPLF

SEQ ID NO: 284487 - protein, 442 aa, Zea mays
  Clone ID: MRT4577_22554C.1.pep
MEPPASSPAPPNPNPVPDDRPLQQQVEEARAPEPEPERETSPTSLTTSIDPTPSGGEESESDDSSSVSSAPSSASAPAAAAPFPTAKDLLHISFNQDYGCFAAGTKSGFRIYNCDPFREIFRRDLAADGGGAGGGGIGVVEMLFRCNILALVGGGDNPHYPPNKVMIWDDHQSRCIGELSFRSPVRGVRLRRDRIIVVLENKIFVYNFADLKLVHQIETAPNPKGLCAVSQQPGSIVLVCPGAQKGQVRVEHYGARKTKFINAHTSRVSCFALSQDGRLIATASTKGTLVRIYNAAEGNLLQEVRRGADRAEIYSLAFSNNLQYLAVSSDKGTIHVFNLKINVGSTANDKPIPAPDPEVSHISPPLSFIKGVLPKYFHSEWSVAQFRLHEGEQYIVAFGHEKNTVSVVGMDGSFYRCQFDPVNGGEMLQLECYSFLKPSDQP

SEQ ID NO: 284488 - protein, 237 aa, Zea mays
  unsure (1)..(237): unsure at all Xaa locations
  Clone ID: MRT4577_22555C.1.pep
MYRAASGLGALKQHGADTQLLNIAVRSASTSVAQRSSGGFLGWLTGARSNALPPPDFALPGVTIPPPLADHVEPGKTKITTLSNGVKIASETSPGSACSVGVYVHCGSVYETPETLGATQLLKKLAFTTTRNRSQLRVVREIGAIGGSAKASANRELMSYSYGALKTYMPEMVEVLVDCVRNPALLDWEVKEEIMNLXAELAEASSNPEAFLLDALHSSGYSGALANPLIASEASIS

SEQ ID NO: 284489 - protein, 119 aa, Zea mays
  Clone ID: MRT4577_22556C.1.pep
FFQGGGPPPVRLGVFPRVVGSEGLAFPFFCPNCADIGPLLFFAGVGSHFAPDLLYFPPRFGSFLAPGFLPPGQLWGRSALRCLEKLFPLCRMGHIHCVALWASVPIMGSGVYVRGKCHK

SEQ ID NO: 284490 - protein, 73 aa, Zea mays
  Clone ID: MRT4577_22557C.1.pep
PTRATTRPPDMINEVDADGRGTIDCPEWLNLMDRNMNDTDSDEDLTEAFRVSDTDQNGFISADELRHVMTNLG

SEQ ID NO: 284491 - protein, 93 aa, Zea mays
  unsure (1)..(93): unsure at all Xaa locations
  Clone ID: MRT4577_22558C.1.pep
SPRLFPPGPGLRGAPPPGLPTASTRGPPPXFLGVSPRLPPPPXFSFFPPPGSKTKGAPPGPPARLTGFKWPTSPPPPDPPLFVPSPRPPPGAP

SEQ ID NO: 284492 - protein, 37 aa, Zea mays
  Clone ID: MRT4577_22559C.1.pep
NTTCMSNSTCLRTTAYCFIYGLVRRHLKHGDVHLLYL

SEQ ID NO: 284493 - protein, 71 aa, Zea mays
  Clone ID: MRT4577_2255C.1.pep
EYKKCMHHYSMFDRVSLFYFVALIFSTGRLFKPWCLRTQWRFPTFSFCLMSSFCWGSYLWLFLLFSHFEWV

SEQ ID NO: 284494 - protein, 84 aa, Zea mays
  Clone ID: MRT4577_22560C.1.pep
CASGYLLPKTWRSTPGSWTPGSACRWSPPSVLWPHAAVAVGVRVLSSRARVGTRAYTAELLVEIAPRSSQTARDADPLALQPWY

SEQ ID NO: 284495 - protein, 557 aa, Zea mays
  Clone ID: MRT4577_22561C.1.pep
AQWLALFFVATYGDGEPTDNAARFYKWFTEGNERGVWLNDFEYAVFGLGNRQYEHFNKVAKVVDEILTEQGGKRLVPVGLGDDDQCIEDDFNAWKEALWPELDRLLRDENDASPGPTYTAAIPEYRVEFIKPEEAAHLERNFSLANGHAVHDAQHPCQANVVVRQELHTPASDRSCTHLEFDIAATGLTYETGDHVGVYTENCPEVVEEAERLLGYSPDTFFTIHADKEDGTSLSGSSLAPPFPSPITVRNALARYADLLNSPKKASLVALASYASDPAEADRLRFLASAAGKDEYAQWVVASQRSLLEVMAEFPSAKPPLGVFFAAVAPRLQPRYYSISSSPSMAPTRIHVTCALVRETTPAGRVHKGVCSTWIKNAVPSEESKECSWAPIFVRQSNFKLPADPSVPIIMIGPGTGLAPFRGFLQERLAQKESGAELGRSVFFFGCRNSKMDFIYEGELNNFVEQGALSELVLAFSRQGLAKEYVQHKMAQKASEIWDMISQGAYIYVCGDAKGMARDVHRVLHTIVQEQGSLDSSKAESFVKNLQMEGRYLRDVW

SEQ ID NO: 284496 - protein, 91 aa, Zea mays
  Clone ID: MRT4577_22562C.1.pep
PKPKWRGSLKRGLLLWSKKSGPCGSLVGVVPLKLLSILLLESKCAYCSSCFQVNLVVVLRGRFLIPPWEKTIPLWDKKKCLLANWTASPSY

SEQ ID NO: 284497 - protein, 163 aa, Zea mays
  Clone ID: MRT4577_22563C.1.pep
MAVTTVSTSRKRKVGAASLTMRYREGESAHPLRSRPPGGCAGDGVDFGGSRTDRPLSAAASPPLPFSLCPLTCFLLLQPFCPRNVRPIYQPAGWAARPLVLVAAQPGWPFFFNKVKNTISDSRTFVSSFVKEPKEFGLVDKDLNVGLPGKKEKEALNVDGCEI

SEQ ID NO: 284498 - protein, 134 aa, Zea mays
  Clone ID: MRT4577_22564C.1.pep
PVRKQQQQQQQQASPARAPPAVVGKRQAKKKKKRAAEKTVAEAADGVGVAVEKESSDPRADFRDSMVQMVVEMGLCDWDGLRGMLRRLLALNAPRHHAAILTAFAEVCTQIAGAAAAAAPPTQPSPPASYQYRR

SEQ ID NO: 284499 - protein, 143 aa, Zea mays
  Clone ID: MRT4577_22565C.1.pep
QNRRRCRRWLDGHCSILEGDDSDGAVRACRSRAAPGGRRRWLIRRCSVLEGHDGGAEEQGRGRRAGSEYGRRVRTGQVLRHGDSAQLRRAGLRPAGGGCKARMEKAASLLFFLFAYFSFFPSLVGGASAAVHGMHVWLGKVIV

SEQ ID NO: 284500 - protein, 66 aa, Zea mays
  Clone ID: MRT4577_22566C.1.pep
KASGQSQAKTKHKQYEAHMNSQQEMMHAPTEDIHKATEDKEKQPEKQMQEERSKARRFDDDTGTMK

SEQ ID NO: 284501 - protein, 246 aa, Zea mays
  unsure (1)..(246): unsure at all Xaa locations
  Clone ID: MRT4577_22567C.1.pep
KRKGLRWLPRHPGPLNSTSSPASPHTPPHPRPPRAAKPPPXATERLRVLVRRGELDDALRIVDXSRASTRXSPAAVGPCAALIKKLCASGRTADARRVLAASGPDVMVYNAMVAGYCGAGQLDAARRLVADMPVEPDAYTYNTLIRGLCGRGRTSNALAVLEDMLRRGCLPDVVTYTILLEATCKRSXYKQAMKLLDEMHDKXCAPDIVTYNVVLNGICXERPXEDAMEFLKNFTSYGCEPNTVSY

SEQ ID NO: 284502 - protein, 54 aa, Zea mays
  Clone ID: MRT4577_22568C.1.pep
LYLNLDDHGVRFQALLLRRNLLHIQKTPKKLKTWTLNQLGMSKINFILTFYTKS

SEQ ID NO: 284503 - protein, 257 aa, Zea mays
  unsure (1)..(257): unsure at all Xaa locations
  Clone ID: MRT4577_22569C.1.pep
SSRPGDVLTPLTLSSPLRCLVARHRWPPHLRLLRCRPTCPPLSSPCPPLTPILPSPRHPSPQPPGPLNSTSSPASPHTPPHPRPPRAAKPPPXATERLRVLVRRGELDDALRIVDXSRASTRXSPAAVGPCAALIKKLCASGRTADARRVLAASGPDVMVYNAMVAGYCGAGQLDAARRLVADMPVEPDAYTYNTLIRGLCGRGRTSNALAVLEDMLRRGCLPDVVTYTILLEATCKRSGYKQAMKLPREMHDKGGA

SEQ ID NO: 284504 - protein, 149 aa, Zea mays
  Clone ID: MRT4577_2256C.1.pep
MWRLKVSEGGGPWLRTENGFLGRQVWEFDADAGTPEERAEVERLRQEFTRHRFQRKESQDLLLRMQYAKSSQRLSPSTPSMKLENSEEVTEEIILTSLRRALSQQSILQAHDGHWPGDYSGFLVIMPMFVSTLGFIRQRPIVFICLFCV

SEQ ID NO: 284505 - protein, 154 aa, Zea mays
  unsure (1)..(154): unsure at all Xaa locations
  Clone ID: MRT4577_22570C.1.pep
WDLEAGRELPRRPTPMAAAPPPAALPSHXPPLSSPCPPLTPILPSPRNSSPQPPGPXSTPPRPPXSPHTPPHPRPPHAAKPPPLPPRNVSAFSHAVANWTMLSASATHSRASTRPRQPRWGPAPRSSRSSARRAAQRTRAACWLRAGLMAWATT

SEQ ID NO: 284506 - protein, 144 aa, Zea mays
  unsure (1)..(144): unsure at all Xaa locations
  Clone ID: MRT4577_22571C.1.pep
MAGWGDGPALGIDLGSTFSCVGVWQHARAGIXLANDQGIRTTPSFVAFAVSERLIGGAVSTQVALNPLNAGSAALRLIGRRCSAASVQSDFSLSPFVVFPGPGGEPMIVVLRGAEVRQLAAGLALLCACRGRAGGRWSLPGRLC

SEQ ID NO: 284507 - protein, 143 aa, Zea mays
  unsure (1)..(143): unsure at all Xaa locations
  Clone ID: MRT4577_22572C.1.pep
FMCLFMCLGVLRIYHHPPFCCYLLVSLCYLILVFLSDSLFFLLYVSISAIEVSHQSTSEARNMYRYPSALRIRFALTKQHVAAWLVSSQSPASVTVLERETVTGAESGTGTGGMHYYNVXSTIIVLTTTSSYFYSYSCGVVSH

SEQ ID NO: 284508 - protein, 62 aa, Zea mays
  Clone ID: MRT4577_22573C.1.pep
GNILVFFACINTTLFFYIMYGTMGDLEGLPHYDSIMIKCGSDNLIRVYICEERNLNWFKNIV

SEQ ID NO: 284509 - protein, 83 aa, Zea mays
  unsure (1)..(83): unsure at all Xaa locations
  Clone ID: MRT4577_22574C.1.pep
MSEMAELSELXPTSSDLQMDVMPGEGALPQMEVGSGSRELSLRPSRSGAQQLEEEGPMEEEDAQPMAAPEGKRRLANGPNAGE

SEQ ID NO: 284510 - protein, 105 aa, Zea mays
  unsure (1)..(105): unsure at all Xaa locations
  Clone ID: MRT4577_22575C.1.pep
SKPCGGGLQRWAGSWLAPRCDAGPATAGAQNCVCSIITRSMLQSMLRHRGYRGCQGAFYTYEAFIEAASKLLGFSTTIDEHTHXRXLAAFFGQTYHETTCGWATA

SEQ ID NO: 284511 - protein, 145 aa, Zea mays
  Clone ID: MRT4577_22576C.1.pep
AQKSWKFAQAPFKTLMRRGFIMGRAGSLVPFLRMGIPFLAWGKPLNAFGFVGKVFDPFRAPGGETMAPKWLFKPPNLAPMGLGKWKLKPWGLFPTNPPDGGFSRAPPRGVKNPGGGPPLIKGPFPFDLFFQVGKLNPGAFFPNPP

SEQ ID NO: 284512 - protein, 378 aa, Zea mays
  unsure (1)..(378): unsure at all Xaa locations
  Clone ID: MRT4577_22577C.1.pep
SRGRSAAQCAPSRNSADHQSVRVRAPPLPLYPWRSPAGASGSPWXVLLASLCRGQAAVRELKVGYYAETCPEAEDIVRETMARARAREARSVASVMRLQFHDCFVNGCDGSVLMDATPTMPGEKDALSNINSLRSFEVVDEIKDALEERCPGVVSCADIVIMAARDAVVLTGGPNWEVRLGREDSMTASQEDADNIMPSPRANASALIRLFAGLNLSVTDLVALSGSHSIGEARCFSIVFRLYNQSGSGRPDPHMDTAYRRSLDALCPKGGDEEVTGGLDATPRVFDNQYFEDLVALRGFLNSDQTLFSDNTRTRRVVERLSKDQDAFFRAFIEGMIKMGELQNPRKGEIRRNCRVANNSPWQPRTGMASGQSTSELR

SEQ ID NO: 284513 - protein, 48 aa, Zea mays
  Clone ID: MRT4577_22578C.1.pep
GAAIVYGLKLTGLPTVRRHLLLAERISAGILVHVDHTAALVQIAHQHS

SEQ ID NO: 284514 - protein, 85 aa, Zea mays
  Clone ID: MRT4577_22579C.1.pep
FCRLIIILRLLTWSTLHLFPKHPKAYKFSPQGEAGLLMTQMEKRGGTRGTQTLTTSVLTRFLLGKTKETNRPCLFKIARPRFGFL

SEQ ID NO: 284515 - protein, 122 aa, Zea mays
  Clone ID: MRT4577_2257C.1.pep
VCGHLGLELESDHLTCGACCPEGVESASTEGNNYPGAPCPCPISIKATHFDPNMQLCNALRRWLNFNILFPSGILAKIIIKLLTDSTTLSLTIMPFTCSTLEAMVLSLWLLISKHYGCLLVF

SEQ ID NO: 284516 - protein, 176 aa, Zea mays
  unsure (1)..(176): unsure at all Xaa locations
  Clone ID: MRT4577_22580C.1.pep
XXPGSGSHGHSIPAHSTCAGAAHRHSKSQGRNGVYYARRAQLLFRRTDDVWARGGFGTAHVVRRAAEPHQGERRGGPHELKGRGEPPPPPWSPRPTTASRCARPGSNRTSTPAPASSTSAGRASSPGLTEPPGGRHPRPIVLACVPYVCLWLTXCAGXSYLAIVRARTQLLYELRQ

SEQ ID NO: 284517 - protein, 55 aa, Zea mays
  Clone ID: MRT4577_22581C.1.pep
FFFFFFFFFFFFFFFFFFFFFFFWKKRILKNILGTQVQKQQHAHTLKKKQRHAWK

SEQ ID NO: 284518 - protein, 55 aa, Zea mays
  Clone ID: MRT4577_22582C.1.pep
MSCAVLTRAAPHHLHRHGLLGGHGFVVRETRVEEDINTCTGEFHERRESFLARAN

SEQ ID NO: 284519 - protein, 88 aa, Zea mays
  Clone ID: MRT4577_22583C.1.pep
LLIFWFAQTTDMEPYMFSIAHNSKPHNVKNLSIFETDKYTTSYFLYPYSKSCPLKLMLHQPIVILHTKSTHLAQKPSKIPIVHNSFYV

SEQ ID NO: 284520 - protein, 97 aa, Zea mays
  Clone ID: MRT4577_22584C.1.pep
EYEEKEQVANKGEPLALPLDAGEYCVPRGNRRRFRVRQPILQYRWDMMHRLGEPQARMREENMERIGEEVRQLMEKLREKQLSHSLRAVSTDPPHHD

SEQ ID NO: 284521 - protein, 108 aa, Zea mays
  unsure (1)..(108): unsure at all Xaa locations
  Clone ID: MRT4577_22585C.1.pep
MAPNNXKAPPPSSXPHSPEPPNTKNKKREHGKDXEKVNIALLTDQATYDKMLSEVPKYEHITPSILSERLTINASLDPRLIKXLMWPGLVRACSGHSPPQIYTRRNYT

SEQ ID NO: 284522 - protein, 43 aa, Zea mays
  Clone ID: MRT4577_22586C.1.pep
TCSIYLQNDHVIVTSIFLRHGYEKYRILVLYSKKKKKGESRDL

SEQ ID NO: 284523 - protein, 101 aa, Zea mays
  Clone ID: MRT4577_22587C.1.pep
KIIILSYTGKTEAPYHNQSDHKYPPHLSLCDPDRSIRPSISRHVQDDHHALRSRVSISDRPERQSAHAPGLAPVSAPEPPTAGATAGAMLPRRASSSSSFL

SEQ ID NO: 284524 - protein, 87 aa, Zea mays
  Clone ID: MRT4577_22588C.1.pep
QLVVMIIIAACWEKLFSDHNTPHTTRRHHKESRLCRLRRRPTNNSCALTTGCSAGKTAVPPAVMKNPTPREKRLAYYSPPWWFFFSP

SEQ ID NO: 284525 - protein, 57 aa, Zea mays
  Clone ID: MRT4577_22589C.1.pep
RKLGIRLEVITLGNFIKRGGWHHVAGICMDSLGDFVTYKCYDLMVTCGEPVLRALRY

SEQ ID NO: 284526 - protein, 78 aa, Zea mays
  Clone ID: MRT4577_2258C.1.pep
LIFFFFIFTIFGFFLTKQGFQHKYYTQQRQKTNPHPGKTTKFSADIHTALKNNHVITTTLKPPYRAFFKGYLSQNQPF

SEQ ID NO: 284527 - protein, 153 aa, Zea mays
  Clone ID: MRT4577_22590C.1.pep
PPVKRSGRPALSGCPHRHTTLAWAPTAHRHRRGGTASRAHHDTYVSPRSIVKVPCPHTLRWPWPCRLQPADIHPLPAPLTVHIPGHGRSWRADDAASRCGRYRLERLLNDCIVVPRLQRALHHDHAMALGHLARRTVTSTWSAARANSHIPHR

SEQ ID NO: 284528 - protein, 97 aa, Zea mays
  Clone ID: MRT4577_22591C.1.pep
ASEFCCCRQTCSKIEEGVDKITTSVEASSAPMHTSVPSIAEAMKMLKECGVEEKIALMHTSTLLIMKSEVRELLNSFETLEGRLDWLKREHEMKQLP

SEQ ID NO: 284529 - protein, 62 aa, Zea mays
  Clone ID: MRT4577_22592C.1.pep
WQMPGTHTNKLHAIQDFAEGRRQVIKHGVRHQNQLRAIGGKPGGPLAEAGINNHPDLWPAAA

SEQ ID NO: 284530 - protein, 125 aa, Zea mays
  unsure (1)..(125): unsure at all Xaa locations
  Clone ID: MRT4577_22593C.1.pep
QGTTGSESGAGGGEXAAKDDTDPPPAPENDAAEQGTRAQDRAASAENSATQRXQDRAGATESGNKHQTDAPATEADAARGGERARGRDRADGGXNESRENRTNGTPGGHNNQHSTKRQARRRKEA

SEQ ID NO: 284531 - protein, 47 aa, Zea mays
  Clone ID: MRT4577_22594C.1.pep
KVAALRLLGVRTGGRRRSAPRPGRPQLASREGELLCGGGPGIWLGIL

SEQ ID NO: 284532 - protein, 127 aa, Zea mays
  Clone ID: MRT4577_22595C.1.pep
MAPAVKVYGWAVSPFVARPLLCLEEAGVEYELVPMSREAGDHRQPDFLARNPFGQVPVLEDGDLTLFESRAIARHVLRKHKPELLGCGSPEAQAMVDVWLEVEAHQYNPAAGAIVVQCIILPLLGGA

SEQ ID NO: 284533 - protein, 108 aa, Zea mays
  unsure (1)..(108): unsure at all Xaa locations
  Clone ID: MRT4577_22596C.1.pep
GQKPPLPPSPVIKLSFCGGKWGCGSNCSLGKGCNGFGMSPHVETPPPNRVKTTVLSGPTPKARAGGFXXAAPKGGGWGCNPCKWGPNWGCSFCNCKLNGPARRWRPKV

SEQ ID NO: 284534 - protein, 114 aa, Zea mays
  unsure (1)..(114): unsure at all Xaa locations
  Clone ID: MRT4577_22597C.1.pep
SASPPKDTTGVSSSSRSEAKCLASNYEILLSGHTWTLPKAHAWHTQAQYFTNQSSXXRHQDGLLLHKGRTWFSLNGLTHRLRVEVDSRTHGWWLPSPSHHKHFVLRLAHAAAXP

SEQ ID NO: 284535 - protein, 83 aa, Zea mays
  unsure (1)..(83): unsure at all Xaa locations
  Clone ID: MRT4577_22598C.1.pep
GAXYFFLKPLLLSHINKLKAQILXKNRCKEKHHXLIXNHTFXRKNPTIRHSNSIYHLIIKGSRTKXILSQMSNISTHSSLITY

SEQ ID NO: 284536 - protein, 77 aa, Zea mays
  Clone ID: MRT4577_22599C.1.pep
REKGNCFSGATNFVGGNLFLSSTSLLRFNRTAFSFLAAPGKFFCLNANCVALSERVQESLLWFTRRVAHDMQPQRCC

SEQ ID NO: 284537 - protein, 57 aa, Zea mays
  Clone ID: MRT4577_2259C.1.pep
SAFSILHHLLSHCQILNLLAVPHLQECQLRLQLLSIPSSSSAYNVLTHIYLYIYIPI

SEQ ID NO: 284538 - protein, 134 aa, Zea mays
  Clone ID: MRT4577_225C.1.pep
RAAARAGTCKKKKKKKKKKKKKKKKKKKKKKKKKKPKKKKKKKKKKALGRGPPFWGDFLGFSFTLGGGLAFFLGGPFALLGGGFKFLWRCFYTFGVGKPLGFPILFVLENFPFWPVGFLAKGPAPFAFPKFCPP

SEQ ID NO: 284539 - protein, 124 aa, Zea mays
  Clone ID: MRT4577_22600C.1.pep
MHNNDFYAKEKLLKSMRDCDPSSLRHWILWQRKFQAPLQHYTALMDLQDYSENGTVTVVYRVILKGTDGEAYRDATGTTQFHEGRREDAVAAAEEAAFSKACAWFGFGLYLYHQDESHYDDHFH

SEQ ID NO: 284540 - protein, 99 aa, Zea mays
  Clone ID: MRT4577_22601C.1.pep
CPYPLVVSTGITPLFWHFLQYKRLAGQIATSAAAKTFQKLHPKHDPQEKPALLKADVDMTLALVIKKRASEGPFRMEHTTRNFLHACTKPIVNIMFHEF

SEQ ID NO: 284541 - protein, 344 aa, Zea mays
  unsure (1)..(344): unsure at all Xaa locations
  Clone ID: MRT4577_22602C.1.pep
MTRSCRNWHAMAGFCTPAATAAAHAALTPLTSSRKHIAMCLSPRXAAAAAXGGGQRARLASTGAAPQVRALAPTTAAEEAAGPSPAPLNVEYLAAEFAGHGVSFEPVGVSCAVKMSLRNGSVAHVLLPSGLVTSYKPAMWHGTVTEVLHTNVAEVPGGRAVIRGGVFVDLRCDGCDGVWSPSASGAWSLRDVRGSPATSIEVELASAAPGNAAAARCVVTLHPEALATELTVTNNASAASSPPMALTCSVPSHLRVSTPDATYALGLQGSDYRSVEPALSEFSIIPPCCGLAPNGSPKPWQTKLGMILRRQQDGPGHTDCNDSIGRRIVVRRSRLLLPFHVGLG

SEQ ID NO: 284542 - protein, 120 aa, Zea mays
  Clone ID: MRT4577_22603C.1.pep
IAPNNWTGNLRCAANSRGTTGTRKIPLLAKLRGRAKLYTKSWRRTGGPCPGGGAASSRGPPMWPPNPWPIWKPSPQTWHRGVVAGGGAFFAGAGAGIPSPRPCRPALKGLGRGPPNAWNK

SEQ ID NO: 284543 - protein, 82 aa, Zea mays
  Clone ID: MRT4577_22604C.1.pep
GVRVDGLRPVMRTFSVWMSMTSTGDRWAEQHLSTDPSSSTNVDAAHQHLTRHGRVSCDHLHQHTLTHCTHANRIVRLIKSAC

SEQ ID NO: 284544 - protein, 63 aa, Zea mays
  Clone ID: MRT4577_22605C.1.pep
LTKILDNIEISRLLQSCHIFFSFLGVSFFTSIFLGVVVLGGDWISICPSPSSIASRLLLEPNC

SEQ ID NO: 284545 - protein, 58 aa, Zea mays
  Clone ID: MRT4577_22606C.1.pep
LSMLAQLSNTVSVNGSTTSQCTVPPPPLFSPVVFGPSLFPMTLKGIVVYLESYLTSLN

SEQ ID NO: 284546 - protein, 187 aa, Zea mays
  Clone ID: MRT4577_22607C.1.pep
MEIIHQQVQRKKEKMVRLADLQRKIDEATKEATPWPPSYKPPPLPMYDGHSDPKQFLMSYEATISSYGGNTTVMAKSFIMAVRNVAQTWYSSLRPGTITSWQKLKNMLVTSFQGFQTKPVTAQALFQCMQDHEEYLQAYVRRFLRLRAQAPTVPNEIVIEAMIKDLRLGPTAQYFARKPPQTLEKLL

SEQ ID NO: 284547 - protein, 71 aa, Zea mays
  unsure (1)..(71): unsure at all Xaa locations
  Clone ID: MRT4577_22608C.1.pep
FRRVTXQFMGMFRRKAVLHWYTGEGRNEMEFTEAESNMNDLVFKYQQCQDATAHVEGYXYEDEEEPQEDEA

SEQ ID NO: 284548 - protein, 61 aa, Zea mays
  unsure (1)..(61): unsure at all Xaa locations
  Clone ID: MRT4577_22609C.1.pep
PRVXKKKKKKKKKKKKKKKKKKKKKKKKKKKKKKKGRAGFKVTKFSYRVLGNEFNFFLVSP

SEQ ID NO: 284549 - protein, 94 aa, Zea mays
  unsure (1)..(94): unsure at all Xaa locations
  Clone ID: MRT4577_2260C.1.pep
WYQKRTELLIGDLAFQRFGRHVARDFRTDSRLQRPVXLALQEADEEYLGGRSHDSNLSVVRANGGSILGXDMHLGKRIPGAEGLSVTSGIGTKT

SEQ ID NO: 284550 - protein, 66 aa, Zea mays
  Clone ID: MRT4577_22610C.1.pep
SRECFISKTGFWGQLAFEVFILKRGNFVVVGRLFCEPAQPGICYENFWSVRKLTPQVAPCWFSLKK

SEQ ID NO: 284551 - protein, 85 aa, Zea mays
  Clone ID: MRT4577_22611C.1.pep
TNAIQLFSKSNIFTIDMHCKLTVPDAIYTFRTASLNIPTVYSPLEWGSHSFMLYVACEVAVPACYVHVESRTWVITLIQSLHANS

SEQ ID NO: 284552 - protein, 68 aa, Zea mays
  Clone ID: MRT4577_22612C.1.pep
RSVRPASREILRASTHRLVIGAAPLVPIYQLWPGAPRARRTGLSPLGYKAELSVECTIVPFSDRSGGV

SEQ ID NO: 284553 - protein, 57 aa, Zea mays
  Clone ID: MRT4577_22613C.1.pep
PSCWLLRARGTLHAEVAAPRCGFRSPSPADTATQQKGRGGRSRTATTCTTTELHDAP

SEQ ID NO: 284554 - protein, 63 aa, Zea mays
  Clone ID: MRT4577_22614C.1.pep
LKNSLIRCTTLIATPLSTIMPGNKASFKGARPATTPAKVAHKSQVPVFELCIFFFYCNATSRL

SEQ ID NO: 284555 - protein, 39 aa, Zea mays
  Clone ID: MRT4577_22615C.1.pep
YYSRFMFHYGRKKKNGSKELTLVFISSYFRNKFTFFKQR

SEQ ID NO: 284556 - protein, 107 aa, Zea mays
  unsure (1)..(107): unsure at all Xaa locations
  Clone ID: MRT4577_22616C.1.pep
MASTACFVIVSKNDYPNLRGRKLDLHPKSLKSVDRFNDLVVSVYVTAGHTRFMLLHDSRSEDGIKSFFQEXHELYTKIFLNPLYLPGSRITSSHFDTKIRALARKYL

SEQ ID NO: 284557 - protein, 112 aa, Zea mays
  Clone ID: MRT4577_22617C.1.pep
MASTACFVIVSKNDIPIYEAEVGSAPKKEDLSYHHQFILHAALDVVQDLAWTTNAIFMLLHDSRSEDGIKSFFQEVHELYTKIFLNPLYLPGSRITSSHFDTKIRALARKYL

SEQ ID NO: 284558 - protein, 136 aa, Zea mays
  Clone ID: MRT4577_22618C.1.pep
MASTACFVIVSKNDIPIYEAEVGSAPKKEDLSYHHQFILHAALDVVQDLAWTTNNAMSLKSVDRFNDLVVSVYVTAGHTRFMLLHDSRSEDGIKSFFQEVHEIYIKIFLNPLYLPGSRITSSHFDTKIRALARKYL

SEQ ID NO: 284559 - protein, 129 aa, Zea mays
  Clone ID: MRT4577_22619C.1.pep
MIINRYYVRVLVLTCSCSLVFVCLPCRFLQAPPEDRAQHPIQPILVITKVRPGMKLYAMPSHPETTNPRIVLPRGESLLVGEGNKHDQLDPRHHLPQKKSVRLDRVEARRPKNLAKIFGTAGCLSCAMA

SEQ ID NO: 284560 - protein, 73 aa, Zea mays
  unsure (1)..(73): unsure at all Xaa locations
  Clone ID: MRT4577_2261C.1.pep
SGQFIILATQGVWDVLSNEEPVHIMPGMLDRXKRAKRLVKCSVRGWRRKRRDITVDECSAICLFFQPPPRLYT

SEQ ID NO: 284561 - protein, 63 aa, Zea mays
  Clone ID: MRT4577_22620C.1.pep
MARARQGEGDTDVLLHDVDRRVEKAFAEEFLCERFRVGGTGRLWHFKYPASFTAWGGRHGDRR

SEQ ID NO: 284562 - protein, 189 aa, Zea mays
  Clone ID: MRT4577_22621C.1.pep
MSLKSVDRFNDLVVSDYDSAGHIWPSLARCHFGPFASDDNPPVIRGKIFYVLIGMASTACFVIVSKNDIPIYEAEVGSAPKKEDSSYHHQFILHAALDVVQDLAWTTNAMSLKSVDRFNDLVVSVYVTAVLTRFMLLHDSRSEDGIKSFFQEVHEIYIKIFLNPLYLPGSRITSSHFDTKIRALARKYL

SEQ ID NO: 284563 - protein, 113 aa, Zea mays
  Clone ID: MRT4577_22622C.1.pep
MASTACFVIVSKNDIPIYEAEVGSAPKKEDLSYHHQFILHAALDVVQDLAWTTNNAIFMLLHDSRSEDGIKSFFQEVHEIYIKIFLNPLYLPGSRITSSHFDTKIRALARKYL

SEQ ID NO: 284564 - protein, 136 aa, Zea mays
  Clone ID: MRT4577_22623C.1.pep
MASTACFVIIVSKNDIPIYEAEVGSAPKKEDLSYHHQFILHAALDVVQDLAWTTNAMSLKSVDRFNDLVVSVYVTAGHTRFMLLHDSRSEDGIKSFFQEVHELYIKIFLNPLYLPGSRITSSHFDTKVRALARKYL

SEQ ID NO: 284565 - protein, 36 aa, Zea mays
  unsure (1)..(36): unsure at all Xaa locations
  Clone ID: MRT4577_22624C.1.pep
SRIGSMFLDVGYXLSELPLSCCEVFRSCRSAWSPQG

SEQ ID NO: 284566 - protein, 71 aa, Zea mays
  Clone ID: MRT4577_22625C.1.pep
NNIPVSFGWLLEMDGVHRCIEKSSFLSSLRCVHMVSKAMKKFSSVKFLAWKQVNMSKPCVLVHHALSTPYA

SEQ ID NO: 284567 - protein, 40 aa, Zea mays
  Clone ID: MRT4577_22626C.1.pep
HILCMLYVAHIKEVNLSRSVLSYNGIVIIIRQGAQVYVNM

SEQ ID NO: 284568 - protein, 124 aa, Zea mays
  Clone ID: MRT4577_22627C.1.pep
SGRPGRVFLILPDHRQHVYTRSFPIAHPTWSLRPPPSTLPPRLLLPRWRARLHLHCIKRFSCCCPSYRRARDPRPRRISVSSRESGSTPPNTTRSETSSPICEVASSRMTQVLISATSMLHASL

SEQ ID NO: 284569 - protein, 67 aa, Zea mays
  Clone ID: MRT4577_22628C.1.pep
TVAVPRYLRSLVPSGVPLYECSRPINICGLCVMNRGCGFVGLMDLLCPLCVVPTTLLQQYGSSPYNV

SEQ ID NO: 284570 - protein, 101 aa, Zea mays
  Clone ID: MRT4577_22629C.1.pep
EGRPPPSKKRRAENKPRGGALSSAILPLSGQKHILSPPFREQLFSCSAPGFLESPYVDLHPPKWARKRVQCVSSECFGNKKKKDKNNHTQNIKTNTWKVTT

SEQ ID NO: 284571 - protein, 50 aa, Zea mays
  Clone ID: MRT4577_2262C.1.pep
MEAEKKGPAVSNNGASAINVVRSVRLIMGNKQLMWFSGYGFGFSTTLTGV

SEQ ID NO: 284572 - protein, 80 aa, Zea mays
  Clone ID: MRT4577_22630C.1.pep
VHCHLQRLVSLYRSVFDAFPLFVDLTTALTPMASAVSSAAAAGISLFHGFRTFLKKPLEITGPCASTEYRNALPGALDYR

SEQ ID NO: 284573 - protein, 7 aa, Zea mays
  Clone ID: MRT4577_22631C.1.pep
VTWKENE

SEQ ID NO: 284574 - protein, 111 aa, Zea mays
  Clone ID: MRT4577_22632C.1.pep
ASLLSPRRSRIRCRSALFFPFLVTCSFTISVLFFHHEALCLMRYAPFYGTILDVGFWVMTRELLAFCSWCASCSLASSVPVEWEMLSNSFSARRASEGAVQAHVSTLCADV

SEQ ID NO: 284575 - protein, 71 aa, Zea mays
  Clone ID: MRT4577_22633C.1.pep
AGPFRPPAPWAIRPTLAKPLEHNKGYGPGQDLWRIHPGSNRLKLLTTGSILGSPENLCNRRASAVWLCFVL

SEQ ID NO: 284576 - protein, 99 aa, Zea mays
  unsure (1)..(99): unsure at all Xaa locations
  Clone ID: MRT4577_22634C.1.pep
DGMLGIPGGSXGECHALSALRYAAGLGENLQVQGLPFGARAEHDAMEMKPAATDRLLSLDWYSETSRAPESAISSLGALGLWSGMLGGAHQHHGSSAAI

SEQ ID NO: 284577 - protein, 247 aa, Zea mays
  unsure (1)..(247): unsure at all Xaa locations
  Clone ID: MRT4577_22635C.1.pep
MQIFVKTLTGKTITLEVESSDTIDNVKAKIQDKEGIPPDQQRLIFAGKQLEDGRTLADYNIQKESTLHLVLRLRGGMQIFVKTLTGKTITLEVESSDTIDNVKAKIQDKEGIPPDQQRLIFAGKQLEDGRTLADYNIQKESTLHLVLRLRGGMQIFVKTLTGKTITLEVESSDTIDNVKAKIQDKEGIPPDQQRLIFAGKQLEDGRTLADYNIQKESTXHLVLRLRGGMQIFVKTLTGKTITLESLL

SEQ ID NO: 284578 - protein, 116 aa, Zea mays
  Clone ID: MRT4577_22636C.1.pep
TNKKTRPRKGRPPPRENLNPPPPKPTPKKGIIQRGGGGGHPPGGGGSTPEKAAQPGLGGKQTGHSGKNLGKKGLTLPQAKRLSTRGGAPGTPKGPPQGNRGKTLKKAGREKGGPPP

SEQ ID NO: 284579 - protein, 142 aa, Zea mays
  unsure (1)..(142): unsure at all Xaa locations
  Clone ID: MRT4577_22637C.1.pep
TGRDTHTWQQKGPQTNKRGQTQRAPGKPQGRTNRNGTGRAGNARGPEKKGGRNPTGTETRGRAKGRPQEQKPTTPPXKPRPPTKSGPPERNPPKSQTGPTGGTQPGHTGPAPPAQPPPPKRRDPPNRPKNETGGAPRGNLTP

SEQ ID NO: 284580 - protein, 150 aa, Zea mays
  unsure (1)..(150): unsure at all Xaa locations
  Clone ID: MRT4577_22638C.1.pep
DKLPRWKANLLSRAGRLVLVKAVLSSVPIYLMLALELPKWGFKAIDKRRGFLWKGQGDANGGNCLVSWESVQRPLQYGGLGILNLEMLGWALRVXVRWLWLQKNDPKYTVMXALHVQVHCNANTLFDVVVVSVVGSGEFVKFWTNRWLLG

SEQ ID NO: 284581 - protein, 48 aa, Zea mays
  Clone ID: MRT4577_22639C.1.pep
IKTKRRAQELHNLIGQLTTYHRAETQGSGKGMLLSAYPKTRQIPYPCG

SEQ ID NO: 284582 - protein, 84 aa, Zea mays
  Clone ID: MRT4577_2263C.1.pep
GFVPLPMKFFIQKKIDLANKKLVILRGDASIRYVLASTFIRSVNSIFLLAHCLCLAPLCSALPLCTLLLLPFFLLLFTYLFLLL

SEQ ID NO: 284583 - protein, 94 aa, Zea mays
  Clone ID: MRT4577_22640C.1.pep
QGLPRYLDLGPPSSIFFLGAPGNGSWGCAPGYFLPGPLPGVFLSWPHGEVTLLVLQAGLLIPENISRRLFCSPLLGGPMVAPQKNNHEKKEKKM

SEQ ID NO: 284584 - protein, 202 aa, Zea mays
  Clone ID: MRT4577_22641C.1.pep
RHHHPALSAGRASPSEALPTSKSSPTLLPWTPPAMVLLLGLDAGLTTVRICIILSVDHLYVAPVSPGRLYSSSHGHLTSTASASSSSRRSQPWPPIPVPLARFVFFGHGTQQFTASLFSAFPYSPYVVVRVRRLTKCPSGVPCHGQPYWRPRVFDALRSPSATPSTLGEVSFSLYRFIDRCQFANVNCVYVSMLLRRKIRGI

SEQ ID NO: 284585 - protein, 66 aa, Zea mays
  Clone ID: MRT4577_22642C.1.pep
DRHDNQYTFEWLRILRVRSVSRYSPSMPGRITFYQSAVMGIRPGAEFRTALEEAKRMNVDVIRTTE

SEQ ID NO: 284586 - protein, 197 aa, Zea mays
  Clone ID: MRT4577_22643C.1.pep
MDEADDDARTFKVGFTAAGEKQFRELVREKLRGFRRGLDDTLLDYVTIMLQNGKRKDQASMELRVFLGDDSAVFVSWLWEHLSLNMHLYVQAQEQTQEVKDDEAPKEVSGKDKSSDMSPRSKCQTHSEHPIESSAATTRKRDKREWKGIGREGNEKFPLRNVLTDILHGEEKKSQKSNEIRYPSSKQQNGRKRDRDD

SEQ ID NO: 284587 - protein, 110 aa, Zea mays
  Clone ID: MRT4577_22644C.1.pep
FGPRLCFPPRSLRRASSSRFWCLCLVPARPSLSSVCSFCFSLCFAFLLCLLWRSVSWSRPWPSAPALRSSSVAGLRPRPLAPRPALRAPGCPVGGGPWSLLPRWVGLGGF

SEQ ID NO: 284588 - protein, 71 aa, Zea mays
  Clone ID: MRT4577_22645C.1.pep
SIPRLTRRRGWHKDRRPSLGVDLNGNGTRTQNVTSYLQKRNVPINYTHLGVSIQRRRCRPLGRSTTPHADR

SEQ ID NO: 284589 - protein, 75 aa, Zea mays
  Clone ID: MRT4577_22646C.1.pep
CPGCLFVKRHQWPRSITDTARTFVSPDKVWFGPQAILCRWLRCCDREWSSVAQARLSRKYRYRTSEVAMSIGSCT

SEQ ID NO: 284590 - protein, 74 aa, Zea mays
  Clone ID: MRT4577_22647C.1.pep
KEKKRTPDFITTLQNCRSCIGHWLEHSRAACTFMLWNVCSVHFMALLLSRIVLLPSVHLSDTINKVIGFTCAPH

SEQ ID NO: 284591 - protein, 43 aa, Zea mays
  Clone ID: MRT4577_22648C.1.pep
RPWGRGLSFAILYGFFFSKPKLYYRPCRTLLDIPHMVKSRGVT

SEQ ID NO: 284592 - protein, 698 aa, Zea mays
  unsure (1)..(698): unsure at all Xaa locations
  Clone ID: MRT4577_22649C.1.pep
MSSDPSPHFPSPVAPPGAAEADPHHLPQPAEPHEVMHRTRAVDFLGRRTPIVYQNDNGPCPLLAICNVLLLKNVISLNPDAGEVSQQKLLSLVAERLIDPNIAGQDKDEEYVCNREQNIADAIDLLPRLATGIDVNVMFRKIDDFEFTRERAIFDLLDIPLYHGWIVEPQDTETVTAIGSKTYNALASELTECTSDKPTEKNKYQYWEPVDFATATTAALRISAPSVTRXRSIDEXSLKLINSNHLKPRTRFNLXNRTRVRTLDKPKRADVQNSIXLTDASCSKYTASIKAETTERRSSVSRGXRKKRNTAITLRAIMSQLDQSHMLLLMAAKXPDESKEXDNKGTKRQLKKXLHIPSQFTETTPYPYHKTLNKSDHQPAVPTLVEDDKETCKEQFDVQIHGQSNDTEVACDSTVTTCEAVPDHATTELDVKSDSLDNSQSLPSSIQECEPIYQGEEHILGTTNMVYENQEPVYEGEVVLAEQADKIGESSSSGDDKATEHQWELIDNFLRTTANQLTVYGLFCLQEGLNESELCVFFRNNHFNTMFKYNGSLYLLATDQGFISQTDLVWQRLDEVNGDGVFLTSNFTPFNAETPRNDSWNEQQAMTSTADYLAQFDNSTSGNSDLELAIALQQQEFERQPQRFQAPPQQQQQQQQQPPPHTQYQTQSGRPGLVVGPRRSNAPPPSRSESKKERCIVM

SEQ ID NO: 284593 - protein, 208 aa, Zea mays
  unsure (1)..(208): unsure at all Xaa locations
  Clone ID: MRT4577_2264C.1.pep
PSLLIYSSSRTSSSIDRWCLCSPHQRRRSCRRPPPRTSSRRGSPSSAASSPLPXYRGHQQEAEAGRQQRRRRRPWRGRGRDRAQXSTPRRCPLSGNAASTSSRGRSTTTTRGRRSGRARTPGATGSRTTAPKKARRRRRRTPRIARRRGXPGXTSRSSRAACSPPTGRRRRGPSSSPRRRRRRPRTTTTATAAAGRWWLACACGATCW

SEQ ID NO: 284594 - protein, 172 aa, Zea mays
  unsure (1)..(172): unsure at all Xaa locations
  Clone ID: MRT4577_22650C.1.pep
MSSDPSPHLPSPVAPPGAAEADPHHLPQPAEPHEVMHRTRAVDFLGRRTPIVYQNDNGPCPLLAICELSPSSPSFDSVPSRVRRVPSGFLRCXSPVRLCAGNVLLLKNVISLNPDAGEVSQQKLLSLVAERLIDPNIAGQVRLYLLQDWGFVFGRSMRDGLVLCSSSLPAGI

SEQ ID NO: 284595 - protein, 56 aa, Zea mays
  Clone ID: MRT4577_22651C.1.pep
AVVTTQSTFFFFFFFFFFFFFFFFFFKKSKLLHSIKFITCLNNFYNTSGITFLINY

SEQ ID NO: 284596 - protein, 353 aa, Zea mays
  Clone ID: MRT4577_22652C.1.pep
PEDNGIKNLDRPIQVSETTPYPSHESFASSDHQPAIPTLVEGDKETCKEQFDVQIHGQSNDTEVACDSSVTTCEAVPDHATTELDVKSDSLDNSQSLPSSIQECEPIYQGEEHILGTTNMVYENQEPVYEGEVVLAEQADKIGESSSSGDDKATEHQWELIDNFLLTTANQLTVYGLFCLQEGLNESELCVFFRNNHFNTMFKYNGSLYLLATDQGFISQTDLVWQRLDEVNGDGVFLTSNFTPFNAETPRNDSWNEQQAMTSTADYLAQFDNSTSGNSDLELAIALQQQEFERQPQRFQAPPQQQQQQQQQPPPHTQYHTQSGRPGLVVGPRMSNVPPPSRSESKKERCIVM

SEQ ID NO: 284597 - protein, 32 aa, Zea mays
  Clone ID: MRT4577_22653C.1.pep
SSGWFQFIRVSVRDYFLCELNIFTCSLNKKCA

SEQ ID NO: 284598 - protein, 66 aa, Zea mays
  unsure (1)..(66): unsure at all Xaa locations
  Clone ID: MRT4577_22654C.1.pep
TAAPRSPIVRGARYGIVEGGLDDDHVHVDHHDHHGYYRHLPRXIRNSHXHPPSHAHRHKYDHDHHH

SEQ ID NO: 284599 - protein, 117 aa, Zea mays
  Clone ID: MRT4577_22655C.1.pep
SVDDDTEGDEFNDQDALGHAEWRKLKYGPPENLDKLEIMFEHIAMNGSTSCTPGQNIDIEGPDVEGVEAAIEDSPVSVGSMKRGLCTTSVRSTKKRTRSPIVRTMKECGSLCMKPMV

SEQ ID NO: 284600 - protein, 59 aa, Zea mays
  Clone ID: MRT4577_22656C.1.pep
YTHPNITGGAIYIFSPTIHPLNHTTQPTTSHSNNKENLRYSLITTLTAYLILKFYITNT

SEQ ID NO: 284601 - protein, 64 aa, Zea mays
  Clone ID: MRT4577_22657C.1.pep
MKTDCPKQNKGERMADKGKSIDEKTASEQYAIGSGLLTWLHNNQLIEIHNPLVEVDLSEHKGKG

SEQ ID NO: 284602 - protein, 113 aa, Zea mays
  Clone ID: MRT4577_22658C.1.pep
FPGGPPGPPTGPGRGGFNHLPFASPPQFFPFNHLGALNFPVFFQQQQLFPFTQLGGLSPVPFFTHPQLFPFFQPVGPNAGPLLQLHQFLPFNHLVFSTPPVFSPPPPLGGAPF

SEQ ID NO: 284603 - protein, 87 aa, Zea mays
  Clone ID: MRT4577_22659C.1.pep
RFCLTVRQPTGTHTLHEGELGWPPKITGKQTATELGSHRLEGKSISHHGLLLAGRTCLHIQGLYSWHPCALTEVQLGDILNTGSTLM

SEQ ID NO: 284604 - protein, 180 aa, Zea mays
  unsure (1)..(180): unsure at all Xaa locations
  Clone ID: MRT4577_2265C.1.pep
MVSLQPSSAAPLLPEAATANKLPPWLSLVGSVVASSTSAAATSKKRKRDGSGGGGGDDDDRGEVVDGIELNFDAAPLPPEWQRCLDIKSGQIHYYNTRTQKRTCKDPRGHDGQPDYRAERGQEEEEDSRDCAPPAXLDLELNPDVEPRRVLAAXGRRRRGPTAAPRGRXRDDDDSSSSSK

SEQ ID NO: 284605 - protein, 178 aa, Zea mays
  unsure (1)..(178): unsure at all Xaa locations
  Clone ID: MRT4577_22660C.1.pep
XFXXFSWVFFFFFFVQETEANPEPVQFKKNKTKEKKQALPWGRVGKEKKKRKGTWPGPGGGGGKLNSRKGKETDRRGWIGLRRHPNPRPSPPQAGAGPRASQTKTQTHPIRRGGGGGTPNPTLKKRNKTDATGRRDGKIKVEVESNQMKWTRPPAGTTRTKPIQARERPGQHKITNQT

SEQ ID NO: 284606 - protein, 127 aa, Zea mays
  Clone ID: MRT4577_22661C.1.pep
PAPASRLPGMGKAAPSPTPLSPGVGRFFFAGGPMGFPFGKRPFGPCHFFWVGSPFGLPGFSPFCSRLVFFVALGPVSFSPGGRFCPWFRPVWALAGVPLFPPPVSLVSPLPGPARARLPQDPAPGVL

SEQ ID NO: 284607 - protein, 36 aa, Zea mays
  Clone ID: MRT4577_22662C.1.pep
DTALSAPLRRLPSSMSWVTCALNNTLENLRLKIEPQ

SEQ ID NO: 284608 - protein, 94 aa, Zea mays
  unsure (1)..(94): unsure at all Xaa locations
  Clone ID: MRT4577_22663C.1.pep
CFVFVCVXIYVVIDKDFYYVVGGLLTPPYMCFGWGVFTGVRIWRLAYVRIVCRSVCSRLDEQEGRRWRLDVGVDLLPRLTQRGVLGDIRRHLCR

SEQ ID NO: 284609 - protein, 37 aa, Zea mays
  unsure (1)..(37): unsure at all Xaa locations
  Clone ID: MRT4577_22664C.1.pep
YLGLTAAAEDSCXHRKESFAVGNIGFRNEFIVKFTGP

SEQ ID NO: 284610 - protein, 97 aa, Zea mays
  Clone ID: MRT4577_22665C.1.pep
RDYGEAAGAFWVLERSVVSRSLRMFEGGSVNGLCPLRLHVRLELGLRLDAGLELVCRQEVGFYAGIEAEGEGLVGLADPPLHDAAGHRKMICASPLY

SEQ ID NO: 284611 - protein, 106 aa, Zea mays
  Clone ID: MRT4577_22666C.1.pep
IWYPFFPCCQYHCCYWMFELSMSYFIGFMYKHPCQHCSVKEHCTSKSAQTCNCNGMNSHVLFHAAPSSVSFCVALCNLFVFSLVTLLSFALYFESMCVFSLFEHVV

SEQ ID NO: 284612 - protein, 401 aa, Zea mays
  Clone ID: MRT4577_22667C.1.pep
MGWRRGGGADGVARRWVLLLCVGSFCLGLLFTDRMWSLPEADEVAVLPNLRREEEAERKTGDCNVGKVQGKHDYNDMLRVSDAHHNSQTLDKAIANLETELSAARTLQDSFLNGSPVQEDYKASESTGRRKYLMVIGINTAFSSRKRRDSIRNTWMPTGEIRKKLEEERGIIVRFVIGHSAISGGIVDRAIQAEDKKHGDFMRLDHVEGYLELSGKTRTYFATAVALWDANFYVKVDDDVHVNIATLGNILSKHISKPRVYIGCMKSGPVLSDKDVRYYEPEHWKFGEVGNKYFRHATGQLYAISKDLAAYISLNKHVLHKYINEDVSLGAWLIGLDVEHIDDRRLCCGTPPDCEWKAQAGNTCAASFDWKCSGICNSVQNIWGVHKKCSEDEKALLTVSF

SEQ ID NO: 284613 - protein, 953 aa, Zea mays
  Clone ID: MRT4577_22668C.1.pep
MAAPAPATGATRLHTPFLLLPSPPRPHPPLRLRFLLPSPPPLRLRRRFPLLAAAAVSAGGGGGGEEAAGRKAEKARQLQKRVVVGVAIGVSAGGIVVAGGWVFAAAVAAAVLAGSREYFELVRSTASGGGSPPPRYVSRACSAICALMPILTLYYGRMDVTVAFSAFVIAIALLLQRGNPRFAQLTSSVFGLFYCGYLPSFWVKLRSGLAAPALNTSIAYRWPILLGGQAHWTVGLVATLMAISSIIAADTSAFLCGRAFGRTPLTNISPKKTLEGALAGLAGCVLTTVLLSTALRWPRSLLSATAYGILIFLGSLFGDLVESLIKRDAGVKDSGSLIPGHGGILDRVDSYVFTGALCYSFVRVALPSYGGMWDEIGEAEEDRRGMLQALEEECLNVYRAKLEKVRQHRAQLKREIADSVAEVAAICATIGEPPSTVHTACSSLQVNANQCTRARIQSSAAVMMSTVTADRDQGTGSLKEELGLIAPELAEMRRRRDERRRQFADVAQRVNKIQQEMDLQLGGGGGQGQPHAHVAVDGSDLTTTKLDELRAYLRRLQQEKESRTKKVAELMATLHSSSLVLGMDPRETNSVVHGGVQTQASGISDSAISGLAGGIERLREIKRSRMEKLQDLLGSMLELWNLMDTPAEEQRRFQGVACNIAASEDEITEPGALSMAFIRNVEAEVMRLENLKECRMRELVVKKHEELKEIRRRARLPEDDTTVMVFDAMDSDAERAMILERLELQISKAKDLEFSRKDVLEKMDRWQAALEEESWLEEYSRNENRYNTGKGTHLVLKRAEKARSLVGKMPAMAEALVAKVVAWEKERGARFEYDGEVLLDLLEDYGNARKEKEQERKRQRDQRRLVQGAAAADRDVSSPVARPPPKAIKNVTRSLSIGRNAAAAAAAGGGGSPRKAAPASSRPGTPSFLKSPLSARRGGGDEGAQILSPDSFE

SEQ ID NO: 284614 - protein, 47 aa, Zea mays
  Clone ID: MRT4577_22669C.1.pep
PVTPSPGLGGFSRRFKKKKKKKKKKKKKKKKKKKKKKKKKKKKKGGR

SEQ ID NO: 284615 - protein, 122 aa, Zea mays
  Clone ID: MRT4577_2266C.1.pep
SWGTPGWRGTSSPACGTARTRQPPSPCCYCCCCRRPRVVVVDLPRLDVEAALPLRGQRRGVEIELDPVHDLATVVVVAAAAVPLPLLAGGRGTGGRGDDAADEGEPRRELVRGGGLRQERRR

SEQ ID NO: 284616 - protein, 66 aa, Zea mays
  Clone ID: MRT4577_22670C.1.pep
QPSPYPVVRIKKPNCECGANESSIVATTLQSHDAQQVFQCLLHTTACGFLRTPRRTPANYCFDSTP

SEQ ID NO: 284617 - protein, 79 aa, Zea mays
  Clone ID: MRT4577_22671C.1.pep
MTEAAVITRYWCHGCEKVIEEAMGEEIKCPFCGGGFIEEMAGEDSEGLQLEREWGTPPGDSEDDDDESSTPVIPPKPAG

SEQ ID NO: 284618 - protein, 75 aa, Zea mays
  Clone ID: MRT4577_22673C.1.pep
AGRFGQSFASRAVYICLRPRTFSVDASQTTRSGMPLPRLDAPRLNPKRRTPSARHYLTRHSDGCRCALNSLSSHI

SEQ ID NO: 284619 - protein, 86 aa, Zea mays
  Clone ID: MRT4577_22674C.1.pep
VLTTLRRRRHRGRLPRASRRQRRPRLWATVPPPTTTLPVVAVVACSLESFHTVNQMETLMNYDESISRCVYIACDPCRSSLGALAL

SEQ ID NO: 284620 - protein, 120 aa, Zea mays
  unsure (1)..(120): unsure at all Xaa locations
  Clone ID: MRT4577_22675C.1.pep
SNMGIIKTPPPPWGKDTPGPYPRVLTGGGEHYRIFESGKKGGHLGLGKALKGTNFLPVNLGGPLGSKRAEETFFPPPPPFWKGARGLKKFLKNGRALGFWLRXKKARLQKFGRVLAEFWP

SEQ ID NO: 284621 - protein, 416 aa, Zea mays
  Clone ID: MRT4577_22676C.1.pep
MMKARRQKRKATSPTLQEEELDQEIRDMKIIHQQVQRKKEKMARLADLQRKIDEATEEVHHLAQDEQDRRPQHREHRQEGLFNEDGWYDDFNHDTFTFDDDSPLAAELQAIPWPESYKPPQLPMYDGHSYPKQFLMSYEATISSYGGNATFMAKSFVMAVRNKLKDMLVTSFQGFQTKPVIAQALFQCTQDHEEYLQAYVRRFLRLRAQAPTVPNEIVIEAMIKGLRPGPTAQYFARKPPQTLEKLLQKMDEYIRADNDFRQRREEAYRFSEMTRGFGGRIHPRHVRSIHNSSQNDDKGSQLQRPQYTSQSSGQQQSFFRPPAPRGRGPRGFGGRYGDQPKKIYCLFCGEDKGHTTRMCQITILKQKEIAEAEARQNQPKQVLHTASCHSPYILEYMGNHHVASVALASHSQASWP

SEQ ID NO: 284622 - protein, 67 aa, Zea mays
  Clone ID: MRT4577_22677C.1.pep
RLLSAVLVAELVNVEVVVPRSGDIAGHPHLILRDQDRLYRRAEVGTVALHGGDHRRRRRSQLGDLQE

SEQ ID NO: 284623 - protein, 155 aa, Zea mays
  unsure (1)..(155): unsure at all Xaa locations
  Clone ID: MRT4577_22678C.1.pep
APSPAALSPAASSPCVCSSPDLPAQLAPQAPTFVARELGVHLLARPCSRSELSLTTSHGAGHSSELPDRRALLSVLRTGRFFPTARPRLPLCSLSDAHLPWPAWGSCSRACSFPTSPMAIGPAPAFPSRVPPFLSGLCAARPXQAPSSAPSFSTS

SEQ ID NO: 284624 - protein, 57 aa, Zea mays
  Clone ID: MRT4577_22679C.1.pep
KKPFPGGNKYLGAPKYWFKEGPAPVFKKKKKKKKKKKKKKKKKKKKKKKKKKKKKNS

SEQ ID NO: 284625 - protein, 451 aa, Zea mays
  unsure (1)..(451): unsure at all Xaa locations
  Clone ID: MRT4577_2267C.1.pep
MAESSAAAVTAAEVGAPASLPPLVAEEADAAAMEEAAAVAKRWPGWPGDSVFRLVVPVLKVGSIIGRKGELIKRLVEETKARVRILEGPVGATERIVLVSGKEDPGLELPPAMDALMRVFKRVTGITDGAAEGTQAAATPDVCAARLLVPGAQAINLIGKQGATIKAIQESTSATIRVISVDEHERPFYVTDDERIVEIQGDTEKVLKALQAVSNHLRKFLVDHSVLPLFEKTNTTVSQDRNGDGWSDMSRPSIGSAQVNQLPSVLDDYILQVKRDPLYLERESLVDHNIHRSRVSLYGRDRRHYRLXGANNAYIRANSHAVVTIQESLGSPDDITVEIKATIAYIRANSGAVVTIQESLGSPDDITVEIKGTSSQVQAAQQLIQDSLAAHREPVRSSYVGAGLDSLYRSSYSQYGSSTYPSSSLPSYSSIDDVSRYPSSGLGGYGSSYRY

SEQ ID NO: 284626 - protein, 52 aa, Zea mays
  Clone ID: MRT4577_22680C.1.pep
AEGRQGIHGAGKTPGVTVLSNPPGFNASDACETIDLRNYTVHSLCCPKMGNF

SEQ ID NO: 284627 - protein, 39 aa, Zea mays
  Clone ID: MRT4577_22681C.1.pep
LQRRWQSNKGFPAEPPAGILRFGQIRNSLVKVFGNLTKL

SEQ ID NO: 284628 - protein, 371 aa, Zea mays
  Clone ID: MRT4577_22682C.1.pep
SSRQLSKEKKQREIDEGITIDKLHRLNQKNVSAWNMKRLMKIVRFGTLTTMDEQIQQATGEGDESATQIRSEYEAQLAAKKIFHNVAKPGSKYIYLADMMRFMRQEEAIKAMHLFEGAQEHCRVSKRSLKNWVVNAFRERKALALTLNDTKTAVNKLNQMCNVVVGLIVSALWLLILGIATTHFFVFISSQLLVAVFVFGNTGRVGFEAIVFLFVMHPFDVGDRCEIEGVQLVVEEMNLMTTVFLRSDNMKIYYPNSVLATKPIMNFYRSPDMGEAIDFSIHVATPAEKLALMKERILRYIDNKKEHWYPGAMVVLRDVDDTNKLKVSIWLRHTLNFQDMGTRFVRRELVLQEMIKVLKDLEVEYRMLPLD

SEQ ID NO: 284629 - protein, 82 aa, Zea mays
  Clone ID: MRT4577_22683C.1.pep
TLHGLRGLWVDKAYEGKRLHFNAMSFPNLRQLAISDAPQLNSVVIERSALQSLVQLTLVDCPELKALPDGIEHLRTLEKLYL

SEQ ID NO: 284630 - protein, 78 aa, Zea mays
  Clone ID: MRT4577_22684C.1.pep
LPRGKIPPIGWGGGTPGRDATKKIRSGATLGHLKTALAKGGPPLIPPKKAEPPKFLEKSGFQSVPKTGGPDFPWPPGE

SEQ ID NO: 284631 - protein, 84 aa, Zea mays
  Clone ID: MRT4577_22685C.1.pep
MARTPAAATTSRAISRCSGSPTGTGTTTRTCCTAPASLSTTAARSPPACMNRYITNEVSGSDKEILTSCGTVSCCSNCYDPLRT

SEQ ID NO: 284632 - protein, 242 aa, Zea mays
  Clone ID: MRT4577_22686C.1.pep
MGLTSTRWMAAQPPPPPEMERPAASGALIYAMVARGTVAVAEHTSYTGNFRDIAAQCLHKLPAGNNRFTYTCDAHTFNFLVSDGYAYCVVATESAGRQIPMAFLEMIKEEFNRRYSGGEAGTATANSLTRDFGPRLRDQMQYCTDHPEEVSKLSRVKAQVDQVKSIMMENIDKAFDRGQQIDGLVTRTEQLHDEAVDFRRQGVQLRRRMWYQNMKVKLIVLGVVVALILIIVLSICHGGCSK

SEQ ID NO: 284633 - protein, 50 aa, Zea mays
  Clone ID: MRT4577_22687C.1.pep
WQLRSVSSSCTSAVNDVLSGLALELFLYGRSVYSYLVSRAYGMPMLHVIH

SEQ ID NO: 284634 - protein, 68 aa, Zea mays
  Clone ID: MRT4577_22688C.1.pep
NASGRLHPSDVRRIDYSPCPEHTRTTAAAGLYGGFKGKLGVSDSPALQLNRIRITLSSSNVKTLGIVC

SEQ ID NO: 284635 - protein, 130 aa, Zea mays
  Clone ID: MRT4577_22689C.1.pep
MGKSKKGGSSSHHSGDKRKREPTPPSEDFGDSEYSEEEFSFESEGSPVHASPTASSDDSDDSQGIAAEVWTYIRAVERSGLKGSDELEVSLDEENSSDSSEGNDDDGGDGDGDGGKGDDKGSGSSGKASG

SEQ ID NO: 284636 - protein, 237 aa, Zea mays
  Clone ID: MRT4577_2268C.1.pep
MVSLQPSSAAPLLPEAATANKLPPWLSLVGSVVASSTGTAATSKKRKRDGSGGGGDEDDRGEVVDGIELNFDAAPLPPEWQRCLDIKSGQIHYYNTRTQKRTCKDPRGHDGQPDYRAEEGQEEEEDSANYCAPPGLDLELNLTFEPRRVLAAHGKTTKRAKQQPADNAEEAEDDDDSDSSSSSREMVAGVCVRCHMLVMMCRASPACPNCKFLHPPSRATPPPPPLKLGLQLLCCRD

SEQ ID NO: 284637 - protein, 39 aa, Zea mays
  Clone ID: MRT4577_22690C.1.pep
AQAIKGMHIRKATRYLSDVTLQRQCVPFRRYNGGVGRCA

SEQ ID NO: 284638 - protein, 211 aa, Zea mays
  Clone ID: MRT4577_22691C.1.pep
MSSSSLMRRVFPSSKPPDGGYPPSFRLIVGGTQLRGSWYLSAIVRLQGFSSHSPVAPLRWWSPKTVTASSWVGRSKPGCDLGPTLSFKDVHHPRWGGGRAEPALYLPRGFVGHPFPRRSRERALTGPAGGPDFDNAGPVDGGRRHLQRVGLVGLAPGGPSCRGAAAAPCAREDHPRCRALLGRRSCSGVVLPLHRDGALTWRSVPHSPRRI

SEQ ID NO: 284639 - protein, 42 aa, Zea mays
  Clone ID: MRT4577_22692C.1.pep
VRLQDGPESGRPRVRKNIYKKVVDHASSIRPIIRKPWPQQFF

SEQ ID NO: 284640 - protein, 72 aa, Zea mays
  Clone ID: MRT4577_22693C.1.pep
MAEPAGAGAGAEATPLLPGLPDDISVWEILVRLPPKCVLRCRAVCPAWCRATSVRGFLLPLPAFSGFPSPPS

SEQ ID NO: 284641 - protein, 288 aa, Zea mays
  Clone ID: MRT4577_22694C.1.pep
MSSRSLMRHVFPPSKPPDGGNPPSFRLIIGGTQLRGSWYLLAIVRLQGFSSANPAAPPRRRSPKMMTTSSWVGRSKPGCDLGPTLSFKDLHHPRWGGGRAEPALYLPRGFVGHPLPRRSRERALTGPAGGPDFDNVGLVDGGRRHLQRVGVVGLAPGGPSCRSAAAAPCAREDHPRCRTLLGRRSCSGVVLPLHRDGALTRRDVCAGESCFSRKVMSEVSVSWRRGSPSARSALPLTRTFTRPWGPITDSVEKARRIASAEGLPNVKTCSIRGVTLSERELLSAEGDE

SEQ ID NO: 284642 - protein, 97 aa, Zea mays
  unsure (1)..(97): unsure at all Xaa locations
  Clone ID: MRT4577_22695C.1.pep
KFFFFFFFFFFFFFFFFXGRTRKISRSLKIRFGQPLFHRGPPPVVGGGGDLKKRFFFSFGAPPPKSPELLLGPPPPSFFAPPQTFVQKAAPGSFFSP

SEQ ID NO: 284643 - protein, 127 aa, Zea mays
  Clone ID: MRT4577_22696C.1.pep
LARVSLHKGPLQYNAGPNHRTRAAHQQGRPQGKSGPLSKTHTTSQAHTKSKPQAEQKKRGNPKKGGSSHKPGHTQKPNRPRQTRKAHHTKKGANRRGKALPNSGTLTLPSRPTRRGGRSAFAKGGKP

SEQ ID NO: 284644 - protein, 109 aa, Zea mays
  unsure (1)..(109): unsure at all Xaa locations
  Clone ID: MRT4577_22697C.1.pep
KTWHPMIFFSHRLTFLRNSSAVLIFWSTFVPILCTPPLLSLVIARRCLVVGTTRCFSPLAMATCSSRRTRDHAQLPSLLPPLRRNPWSPSTRAPLPSLFQFSSMTXLRA

SEQ ID NO: 284645 - protein, 80 aa, Zea mays
  unsure (1)..(80): unsure at all Xaa locations
  Clone ID: MRT4577_22698C.1.pep
MPMAMLNNVASAGGLPGATTTNSRENASAPYGEILDSNVINDRDTVTSRSFSIVTFASHNSMLDAIXNMNSTELDGRNIT

SEQ ID NO: 284646 - protein, 441 aa, Zea mays
  Clone ID: MRT4577_2269C.1.pep
MAEPSAAAVTAAEVGEESDAAAMEEVAAAAKRWPGWPGDSVFRLVVPVLKVGSIIGRKGELIKRLVEGTKARVRILEGPVGATERIVLVSGKEDPGLELSPAMDALMRVFKRVIGITDGAAEGTQAAATPGVCAARLLVPGAQAINLIGKQGATIKAIQESTGATIRVISVDEHERPFYVTDDERIVEIQGDTEKVLKALQAVSNHLRKFLVDHSVLPLFEKTNTAVSQDHNVGWSDMSHPSIGSAQVNQPPSVVDDYILQVKRDPLYLEREPLVDHNIHRSGVSLYGRDPALSTLRPSAVHGAGSLLTQITQTMQIPLTYAEDIIGVKGANIAYIRANSGAVVTIQESLGSPDDITVEIKGTSSQVQAAQQLIQDSLAAHREPVRSSYVGAGLDSVYRSSYSQYGSSIYPSSSLPSYSSIDDVSRYPSSGLGGYGSSYRY

SEQ ID NO: 284647 - protein, 109 aa, Zea mays
  Clone ID: MRT4577_226C.1.pep
LRNKYNNIVMIEKKKKKKKKKRGENKKKGGYNLKNKKKGPASFRRSHAFFTVPANCPSLFWRFPILFPWLPFFTSPSLPTLSSPILMALQYIPFSPRSPFRKCPPLFAS

SEQ ID NO: 284648 - protein, 355 aa, Zea mays
  Clone ID: MRT4577_22700C.1.pep
PRVRGRVGFAEIQAATQNFDEKAIIGVGGFGNVYRVREIDDGTKVAVKRGSAESEQGINEFNTEIQMLSKLRHRHLVSLIGYCDENQEMILVYEYMHNGVFRDHIYGSEGKAPLPWKQRLEICIGAARGLHYLHTGTAQGIIHRDVKTTNILLDDNFVAKVSDFGLSKDGPGMNQLHVSTAVKGSFGYLDPEYFRCQQLTDKSDVYSFGVVLLEALCARPPIDPQLPREQVSLAEWGMQWKRKGLIEKIMDPKLAGTVNPESLAKFAETAEKCLAEFGSDRISMGDVLWNLEYALQLQDANPPEGARQGGDGDDQDGAAAAGGGGAVVPAGGAVPDASTAAAGELFQQLADMQGR

SEQ ID NO: 284649 - protein, 109 aa, Zea mays
  Clone ID: MRT4577_22701C.1.pep
MARNLSVTLFILTAYVAATAAPTVCAVKSPASTTTTRKHEAAKEETDAPAKAPAAAATEGPAAGAPMTWPDGGPEFVKMVIKNPFFKSAPPSGSEDGLPIDPTPEGSMN

SEQ ID NO: 284650 - protein, 47 aa, Zea mays
  unsure (1)..(47): unsure at all Xaa locations
  Clone ID: MRT4577_22702C.1.pep
AANIFSNAEVAADEPWYSIKHEYTLLXTDTNWCLGWHIGGYAGPQGP

SEQ ID NO: 284651 - protein, 85 aa, Zea mays
  Clone ID: MRT4577_22703C.1.pep
VMPAGIVAGGYLPYPIRTRSIAIPTHAVPATLGPRKPRAFAQTSNGHYQLGTGRPTKEQHRPRPRLGTKHPHHLNAPTWVTSPRN

SEQ ID NO: 284652 - protein, 156 aa, Zea mays
  unsure (1)..(156): unsure at all Xaa locations
  Clone ID: MRT4577_22704C.1.pep
MDKDEVEEDLCQATMGISRDSMHKRRATGGKHKDWRKKRKYDLGRQPGYTKLSSNNTVRRVRVRGGNVKRMALRLDTGNYSWXSECVTRXPCILYVDYNVSNNEDXVRHKTLVKTDIVHPDAVPXFNEGYLTHXYGVDIXMNKKTPAANNDNGEVH

SEQ ID NO: 284653 - protein, 86 aa, Zea mays
  Clone ID: MRT4577_22705C.1.pep
QPAINTTTITSAQQIQAKGEQIEQPDIAMEPMRKMLTRQVLAAVRLQAAARGLLICRRMREMRDLQLIQSAPLCSPFVFSCEKPSM

SEQ ID NO: 284654 - protein, 200 aa, Zea mays
  Clone ID: MRT4577_22706C.1.pep
PAGTCLFSPRASLSHQQAAPPLHHHSPDHRLSPSSSSSPAHRPSLLRCRAFMQEAADGNDDPTEADVRKRRKGPLYKLKAAIQGLAGSRSAAAEVYGGEYQFQRAVENLCEPRFPNPLTRAHRCGFLCCFHPRALFFFMEPWQEAATGDLAGIWCLAAHISPNGRWSGLETTFLAAESICNVEVQSGHRCQLAPELLPIP

SEQ ID NO: 284655 - protein, 59 aa, Zea mays
  Clone ID: MRT4577_22707C.1.pep
FRSVLYHSHLLHRTVLPVVKRVESAHHSCPAVFSHSDFNIDVPPDGYACYTLHQTAVTL

SEQ ID NO: 284656 - protein, 128 aa, Zea mays
  Clone ID: MRT4577_22708C.1.pep
WGVATVARRRANTIKSATESLSAARALALLLMARSSLRRKTACFSAAGVNKALPTSSGSINTSITMGGACGNGNLYYTRDNTNTMELITAVFNDGASWAQCYRSACDYEEEPGFCILGTAMTITHTNQ

SEQ ID NO: 284657 - protein, 36 aa, Zea mays
  Clone ID: MRT4577_22709C.1.pep
RHGFCDYPNDRAGVVTDGGSRELVTEGRAVQKVVER

SEQ ID NO: 284658 - protein, 87 aa, Zea mays
  Clone ID: MRT4577_2270C.1.pep
PGTCRGLNKKPQIPPDEKCLLKVLKQVGITPLFIYFFCLGPKKVCNQPLCQKEKPYRAGNFQKTGVFFFLEKNNFVPFPKGDPFQRP

SEQ ID NO: 284659 - protein, 62 aa, Zea mays
  Clone ID: MRT4577_22710C.1.pep
FGWTPEFYLVQGLPNSYNLDFGRGTFRKELGFPTSHMILPKKPAPVLCTSRASCTYVRLKKR

SEQ ID NO: 284660 - protein, 203 aa, Zea mays
  unsure (1)..(203): unsure at all Xaa locations
  Clone ID: MRT4577_22711C.1.pep
PDFYNWNIVDVRYCDGGSFAGDGEGEDRNGTKLFYRGLRIWEAVVDELMAKGMDTAEQALLVGCSAGGLAALLHCDSFRARYPPEIPVKYLSDAGFFLDVYGPRHPLAGCYVFXLKRPLGSSIYLNXYQVSFCHRKDFSGERFIRSIFSGVVHLQAXKLMCEKFCPRTALQRGNRQSAWFPPELIKSISTPTFIRKLGYDSYQ

SEQ ID NO: 284661 - protein, 110 aa, Zea mays
  Clone ID: MRT4577_22712C.1.pep
LKAQFPCAFEKKKKKKKKKKKKKKKKKKKKKKKKRKKKKKKKKQSGIMTGGGGAGSIYKRTMMRGRPTPKRRDGGNRIVFEQRRTYRIALRLFGKRIKAGCSLLKERPGC

SEQ ID NO: 284662 - protein, 124 aa, Zea mays
  Clone ID: MRT4577_22713C.1.pep
IAKLKGSEELWEVAKLHNCESSYPSDLFDVKFPLCSVDLREWCAANTRRPDLLEMIPDSFFNLVEKCLAVNPRCRLSSEDALMHEFFAPCRDNFRKLRMLRRSAGSDAACSSSHQDTTLGARQS

SEQ ID NO: 284663 - protein, 130 aa, Zea mays
  Clone ID: MRT4577_22714C.1.pep
CRSSSGITGICSTAGERHPKKASSFARLWRSSNGDGGRKTGSELLNGRLSSSRMPDAALSPDLKNGEACQVSPGVGEWSPDLLNPHVVRAMKGRVEWPQGTQKRSLKSKLVNARTNGRKVQLHQALGQMI

SEQ ID NO: 284664 - protein, 231 aa, Zea mays
  Clone ID: MRT4577_22715C.1.pep
MDLETENRLASLLIEEARRLQLEADREGVHAYLRKPNVRHRPNSRFLTATVRGVQQANRVVEVNEMWRAREKELELESKMKSRSSRSKDHGDFRGEKRKSDRNHSSSSRFEQEGTTYDTSYSDQEDGLSDDEIERFLYSRAKRGRGAVGSRMDEPGPYLDSLSHHQDNGPSPDIRVEEKWERRVQGPEKPPFWGCKSPDGHWHLGTLDGRASSSEPQSKKKRKVSWIKKIR

SEQ ID NO: 284665 - protein, 257 aa, Zea mays
  Clone ID: MRT4577_22716C.1.pep
MDLETENRLASLLLEEARRLQLEANREGVQAYLRKPNVRHRPNSRFLTATVRGVQQANRVVEVNEMWRAREKELELESKMKGRSSRSKDHGDFRGEKRKSERNHSSSSRIEQEGTTYDTSYSDQEDGLRDDEIERFLYSRAKRGRGAVGSRMDEPGPYLDSLSHHQDNGPSPDIRVEEKWERRVQGPEKPPFWGCKSLDGHWRLGTLDGRPSSSEPQSKKEKKSKLDKKDKIEKRKEKGKKKSKHRHHRHRRSSRSE

SEQ ID NO: 284666 - protein, 68 aa, Zea mays
  Clone ID: MRT4577_22717C.1.pep
MNSFFSCDFDSTPKSDSAWSGHFFLLLSFMVVVCPLSLFFFASGFCGFFFIFDVPSPPSCVMLITNDY

SEQ ID NO: 284667 - protein, 68 aa, Zea mays
  unsure (1)..(68): unsure at all Xaa locations
  Clone ID: MRT4577_22718C.1.pep
LEAGRELCAVWPLSYCSSSSRHYSPFSSQPWRQRTKRMLLRRRRWKRKRTGGRREARQPKPXGQEIPN

SEQ ID NO: 284668 - protein, 99 aa, Zea mays
  unsure (1)..(99): unsure at all Xaa locations
  Clone ID: MRT4577_22719C.1.pep
DNGAPETPNAGATGSXKXTEKAXSPXTAXXSNQXPXKPPENPSKAKDXPGQDXTNGXDEGKGXXQXGPEGXXRDXKRTXGQXXNXSXXEQTAXXTXXGA

SEQ ID NO: 284669 - protein, 218 aa, Zea mays
  Clone ID: MRT4577_2271C.1.pep
LASRAARPKPCSLASSHIAAAGRDRRSIDGVSAALISGAAPAGGRHREQAPAVALTRRQRRRLLHGYRRPPARSGSGNGSGCGGDDDDRGEVVDGIELNFDAAPLPPEWQRCLDIKSGQIYYYNTRTQKRTCKDPRGHGLQSDYRAEEGQEEEEAEDDDSSSSSREMVAGVCVRCHMLVMMCRASPACPNCKFLHPPSRAAPPPPPLKLGLQLLCCRD

SEQ ID NO: 284670 - protein, 41 aa, Zea mays
  Clone ID: MRT4577_22720C.1.pep
PKQFIKDAVAAPYSIHAKRTHLCSSPKNDLVCVSMCRKPCP

SEQ ID NO: 284671 - protein, 104 aa, Zea mays
  Clone ID: MRT4577_22721C.1.pep
GGTCYRFSPGTPSAPGLAESTCSSKASTTLDAPILPANNTIVARGVFIPLCHWAFCRSAILVDPTSLSLAHLPLCRKPDPLHANAFRNILRAQMTLSCDSMQGD

SEQ ID NO: 284672 - protein, 100 aa, Zea mays
  unsure (1)..(100): unsure at all Xaa locations
  Clone ID: MRT4577_22722C.1.pep
LLLLEKGLLFMQHIPAVPSLLCNPLDDNVVTRSSRGEYHPPPPNGVIHPPHTDVSTTXLLHVSRRIMMHHHNSCSSSSLLPSSQRRPDTPREKEEARVDI

SEQ ID NO: 284673 - protein, 42 aa, Zea mays
  Clone ID: MRT4577_22723C.1.pep
KKKKKKKKKKKKKKKKKKKKKKKKKKKKKKKKKKKKKKSKRN

SEQ ID NO: 284674 - protein, 77 aa, Zea mays
  Clone ID: MRT4577_22724C.1.pep
TCSYYATTRFIKKKKKKQKKKKKKKKKKKKKKKKKKKKKKKKKKKKKKKKKKKTPGGAREKISPKRGLFCPPKGGLF

SEQ ID NO: 284675 - protein, 254 aa, Zea mays
  Clone ID: MRT4577_22725C.1.pep
TSSFLSLLPSSPVPQKAPCLDRPVENVLGIKEWLIGSIPSRASLIKFQIPICARNSSLKMVARRNPSIIEEGSRSEEIQVELERPRRSQTGHGRGQARGDVGGSSSQQPQIVHAAREEPVPQPPLHPSSSRAAAAAASRPMSRGKRSKKRGVRALIRGLNGIYAICRESYVQIAELKRKNDEYNENFRRFMLESDNFRRYVGRVPLRPAPPYNPPPPMPDTLDQWVQQTYGVPFDEDISDDEEEISDDEDESFW

SEQ ID NO: 284676 - protein, 144 aa, Zea mays
  Clone ID: MRT4577_22726C.1.pep
ARKLSQREEAASSATSGGSSSGPATKRIRASNGGPMPPAKAGRLATNACASSFPGPATFTQSPSHAPHANTSSPSHASHAATASPSHTSYATPPPYPVGFNVGITMPYSTPPMSYPPAPYGGYGSGMAAYANGMAPAFHQAYYR

SEQ ID NO: 284677 - protein, 259 aa, Zea mays
  Clone ID: MRT4577_22727C.1.pep
LDAVNFAYEAGLQEKFPPVPLLKSYLEDSKKTSTAASDNSSTSSSGQSGSNANKKEQSALRAVIKCVEDRNLEAEFPLEGLRKQLEELEKAKTEKKKAASSATSGGSSSGPATKRIRASNGGPMPPAKAGRLATNACASSFPGPTTFTQSPSHAPHANTSSPSHASHAATASPSHTSYATPPPYPVGHGLYCSRSPPVIRGEPYAYPPAEEVVGFNVGITMPYSTPPMSYPPAPYGGYGSGMAAYANGMAPAFHQAYYR

SEQ ID NO: 284678 - protein, 59 aa, Zea mays
  Clone ID: MRT4577_22728C.1.pep
FRSRWWPLFSVWSVLCCCVFFEAKQSYFKIKINICFFRIFGGNQRYTLLFQYVIIILQE

SEQ ID NO: 284679 - protein, 102 aa, Zea mays
  Clone ID: MRT4577_22729C.1.pep
MRATPTPQPPMSSQRPGRHQRRASQSVFVLPENLASLDVDAAADAGAKAGGPEGAGAGAEQQARPPAGRHHRRAMSVAAAVASRELELIKEDLGSYNYKVGA

SEQ ID NO: 284680 - protein, 39 aa, Zea mays
  unsure (1)..(39): unsure at all Xaa locations
  Clone ID: MRT4577_2272C.1.pep
KPGNGGKNGEKKAKGTGRRGPRGGEGPGGXPPPRGEKRA

SEQ ID NO: 284681 - protein, 78 aa, Zea mays
  unsure (1)..(78): unsure at all Xaa locations
  Clone ID: MRT4577_22730C.1.pep
RGLKKQNFFKTLRQISHNILTLTAXXKKRKEKETLLTGRGLNPFKTTQSKAFCFFFFPQVNSWTGFLNGEKGFLFHRV

SEQ ID NO: 284682 - protein, 187 aa, Zea mays
  unsure (1)..(187): unsure at all Xaa locations
  Clone ID: MRT4577_22731C.1.pep
RVAVAWXFPRRAXARXPXALVSSALGLNNLQPSRXTVRRFEWYVDSAGEFLRFVELGCCAPRCRVPSAADAFVQNLAAGRKLQHVVELGDRCTFFLLWLPFFISDPPAEERGVEVVLFFIQKDGLAPQNSFNFSITLQLSESTDVLRVAVECLDLYTPLFGSRVETVRNMLTRLPAQDLSCSWAPFL

SEQ ID NO: 284683 - protein, 57 aa, Zea mays
  Clone ID: MRT4577_22732C.1.pep
PLEQGAPFYSFSPCSCSTQGKIATRFVRKVRLIHIIAYVFAHTIGAVNENKTTGPRT

SEQ ID NO: 284684 - protein, 259 aa, Zea mays
  Clone ID: MRT4577_22733C.1.pep
PLMLRRSCSWPPCNTCDLFLCSFCSTRTFSAYSEEAPIMTPRVPRILLYILRRDVRLSDNPVFYAASLQTSRPSSKSSSSSDRRHRDDSLTSEHGRTHFTHLLPVFVFPANQIEVSGFLSSPSDKCPYPEARSREARVWRTGPHRAKFIADGVWNLKDKLAGLNCGSGLEMRVGKIPEVVSDIMDWYDKDENEGVISGVWITDDDATEEKNDVAGLKKITEQRGVDFKVWVDEKYYVGRPGSTILRRHLQTGQCLHTYR

SEQ ID NO: 284685 - protein, 140 aa, Zea mays
  Clone ID: MRT4577_22734C.1.pep
MAMQVVRNLDLERYAGRWYEIACFPSRFQPKTGTNTRATYTLNPDGTVKVVNETWADGRRGHIEGTAWRADPASDEAKLKILCRQPHMDESVYKELVERAKEEGYDVSKLRKTAHPDPPPESEQSPRDGGMWWVKSIFGK

SEQ ID NO: 284686 - protein, 44 aa, Zea mays
  Clone ID: MRT4577_22735C.1.pep
CRLSTSWMMNVNLSESAPDISPRSSLMMLFKDWYRGRRSVRRTR

SEQ ID NO: 284687 - protein, 181 aa, Zea mays
  Clone ID: MRT4577_22736C.1.pep
MAMQVVRNLDLERYAGRWYEIACFPSRFQPKTGTNTRATYTLNPDGTVKVVNETWADGRRGHIEGTAWRADPASDEAKLKVRFYVPPFLPLIPVTGDYWVLHIDADYQYALVGQPSRNYLWILCRQPHMDESVYKELVERAKEEGYDVSKLRKTAHPDPPPESEQSPRDGGMWWVKSIFGK

SEQ ID NO: 284688 - protein, 106 aa, Zea mays
  unsure (1)..(106): unsure at all Xaa locations
  Clone ID: MRT4577_22737C.1.pep
RREEGSCHHIFFSDLFSPGSSHEADDYAGGATISCYYDFPRNNEHALLIALAHQPVSITIEACAKNFQLYSDRVFYGPXLTQLDHWVPAVPYGTAAKAHYYIIVNN

SEQ ID NO: 284689 - protein, 46 aa, Zea mays
  Clone ID: MRT4577_22738C.1.pep
KKNQSFTIKYWAQKTRIKIQAGSKTCPQPAVKKKWGPDPLLTADRN

SEQ ID NO: 284690 - protein, 67 aa, Zea mays
  Clone ID: MRT4577_22739C.1.pep
VSWTDSTPITLDDCHYLDGPMIVGLLKVLVILVNSDHSCVGFLCLFSWEILKSNSSQILACWSSTLV

SEQ ID NO: 284691 - protein, 115 aa, Zea mays
  Clone ID: MRT4577_2273C.1.pep
QGFKENCLSALFNHSNRVSKRALYLSAFMGRAISLLMNGANVKGYTVWAFLDLCEMLAGYYLRYGLYHVDFQDPEMWLTPKHFALGYSKVFVNESDIIKNVVCDTDDARSVAAEQ

SEQ ID NO: 284692 - protein, 211 aa, Zea mays
  unsure (1)..(211): unsure at all Xaa locations
  Clone ID: MRT4577_22740C.1.pep
MAMQVVRNLDLERYAGRWYEIACFPSRFQPKTGTNTRATYTLNPDGTVKVVNETWADGRRGHIEGTAWRADPASDEAKLKVRFYVPPFLPLIPVTGDYWVLHIDADYQYALVGQPSRNYLWXCEFLSGLRPSIPRRIVPVCLPIPLCLCVQILCRQPHMDESVYKELVERAKEEGYDVSKLRKTAHPDPPPESEQSPRDGGMWWVKSIFGK

SEQ ID NO: 284693 - protein, 203 aa, Zea mays
  Clone ID: MRT4577_22741C.1.pep
MAAVSAAPRPSMPPRLALRAHLFSSASPLPMRALPLLRSRFRSLTTAYAVKQDTALWTPAPVTGKGFPLDRINPPDVAQTVLIFAAGTGISAIRSLIEFGFAVKERADVRLYYGDTSLKSMSYQERLSNWESTGIKIIPVLSQPDDSWKGERGYVQDAFFRNKNIVNPSSTGAILCGPNEMQEELTLSLVADGVSRDKILTNY

SEQ ID NO: 284694 - protein, 55 aa, Zea mays
  unsure (1)..(55): unsure at all Xaa locations
  Clone ID: MRT4577_22742C.1.pep
AATSMTIKVVDPPESKYSVWIGGSILASLSAFQQMWISKVEFHESXPPIVHRKCL

SEQ ID NO: 284695 - protein, 48 aa, Zea mays
  Clone ID: MRT4577_22743C.1.pep
GFRSKVKRAKFNHPVAVFSPCDRHACCLFRGKSTTLPILNGWSGTRLA

SEQ ID NO: 284696 - protein, 294 aa, Zea mays
  Clone ID: MRT4577_22744C.1.pep
MAAVSAAPRPSMPPRLALRAHLFSSASPLPMRALPLLRSRFRSLTTAYAVKQDTALWTPAPVSAISAATDDGSVSLIAVDLSDATDLVDSYTNPGQYLLIRVPGEELKPAYMVISSPPKAGPRFEFLVKSVPGATAGRLCALRDGDVVELGAVTGKGFPLDRINPPDVAQTVLIFAAGTGISAIRSLIEFGFAAKERADVRLYYGDTSLKSMSYQERLSNWESTGIKIIPVLSQPDDSWKGERGYVQDAFFRNKNIVNPSSTGAILCGPNEMQEELTLSLVADGVSRDKILTNY

SEQ ID NO: 284697 - protein, 81 aa, Zea mays
  Clone ID: MRT4577_22745C.1.pep
MEVRTMMYEDSKGILEVGMKRNIVGYIILCDTCHRVKAKHKIFAATVHDRRCATIDPSGDQGDVPLGRCANMDIRQIMKEM

SEQ ID NO: 284698 - protein, 105 aa, Zea mays
  Clone ID: MRT4577_22746C.1.pep
MGSAGATLVRFLLLASIVAGFAAHLAAGEKDCYDERDSVIRMCKWTIKKGSPYLTPDMPCRLEARKVDMPCICRVLTAADERIIRPEKLVRCSREAGVCLPGGSK

SEQ ID NO: 284699 - protein, 74 aa, Zea mays
  Clone ID: MRT4577_22747C.1.pep
WVRISCVLGVKNVLVLCDGVEVQVVPLLEVQVGEQHLLQLRFRHSAGHHATAVARRCPRGRSCCFSRRLSRVAA

SEQ ID NO: 284700 - protein, 121 aa, Zea mays
  unsure (1)..(121): unsure at all Xaa locations
  Clone ID: MRT4577_22748C.1.pep
EQSTSMIDXHQVATMLRHATGRSLWAWDEFPKVTLTEDGIVLLGGTITKFAIFSKPXRDLISTNTTYISIENHLPXRHKLXYNAMSVLNPDGLTTREDXLTFLYRLIPGQALLSFGLHCTQ

SEQ ID NO: 284701 - protein, 123 aa, Zea mays
  Clone ID: MRT4577_22749C.1.pep
GFPPFPKDPEPPRGFFFWGGASLGNSGPRVFSPGCSREKIFSFGGGVKSRGGPPLFYKETPPGGLFMGGALYRRRFFSPPRFFKVFYGGSSRPPLFWAPPPFVYGCPFCPGDPLSKKKFFPPP

SEQ ID NO: 284702 - protein, 349 aa, Zea mays
  Clone ID: MRT4577_2274C.1.pep
MAAPAADEAWCRKTVPRVMELVCRRLPQRDACALLAVSPWCYRALVANSRLWEVLDLREMKNAGNRLISALSLARYRHLKVLNLEFAQDIEDRYFVHLKEMSGISLENLEFLNLNACQKISDKGIEAVTSLCPNLQRLAIYWIVGLTDSSIGHITKNCKHLVHLNLSGCKNITDKGMQLIANNYQGLKRLNITRCVKLTDDGLNQVLLKCSSLESLNLYALSSFTDSVYREIGSLSNLTFLDLCGAQNLTDDGLACISRCGRLTYLNLTWCVRVTDAGILAIAQGCRALELLSLFGIVGVTDACLEALSKSCSSSLTTLDVNGCIGIKRRSRDDLLKLFPSLSCFKVHS

SEQ ID NO: 284703 - protein, 100 aa, Zea mays
  unsure (1)..(100): unsure at all Xaa locations
  Clone ID: MRT4577_22750C.1.pep
MATKILALLALLGLLMSATNGFIISQCSLASKAIISQVLPPSTLMGFEHSTGQAYRLQLALWGSVLQQPIGQLAQQFLAHVNLTTIXATEQQVCMMTPTG

SEQ ID NO: 284704 - protein, 89 aa, Zea mays
  unsure (1)..(89): unsure at all Xaa locations
  Clone ID: MRT4577_22751C.1.pep
TRYRXLLHCLLARHLSSSWSLGYTGPTSTLFNLTLNRAKLNYKTSNKKNEGSTCILLSQHVVLLQCTHICAIEEIAYMLDVSDVNNAYE

SEQ ID NO: 284705 - protein, 45 aa, Zea mays
  Clone ID: MRT4577_22752C.1.pep
NTAYIYIYIYNCADKCHTRKNVYKDFITLYIWDQLSTREGGNNLM

SEQ ID NO: 284706 - protein, 98 aa, Zea mays
  Clone ID: MRT4577_22753C.1.pep
VPSGFRPKKKKKKKKKKKKKKKKKKKKKKKKKKKKKKKKKKKKKNPLFGSPGGDRKIPGPKRGPPPNFGPGLFFKNPGKGGKAKKKKNFFLGKGGSQI

SEQ ID NO: 284707 - protein, 72 aa, Zea mays
  Clone ID: MRT4577_22754C.1.pep
MPPSFQSSVASLSGSDVSNMYSGGLEQHLRAPHFFTPLPPIMEDGDHGGPPTRISSSFKWAASDGCCELLKA

SEQ ID NO: 284708 - protein, 61 aa, Zea mays
  Clone ID: MRT4577_22755C.1.pep
RVGRHTTLLVLQGQHKLTETQAPIGSRSGSISRQSHCLLGLILMAMKLHDLLSCHRIGCRR

SEQ ID NO: 284709 - protein, 121 aa, Zea mays
  Clone ID: MRT4577_22756C.1.pep
MRCTLSDPLRRCLSSTGAGDPSLVSSAEHAYRLLRRHHSDPQRLSAALSESGLDAYSPNVLDAVLRRCGAACSLALHLFHWCSPWLPSTFPFSLALLAKFFYRAYFAPDTFLLAPITSELL

SEQ ID NO: 284710 - protein, 107 aa, Zea mays
  Clone ID: MRT4577_22757C.1.pep
TDTSNQGPEPRVRVAGAPTLVVPTDTQSASLNFGRPQRVVAWKCQDQCPLTSPHGLPRNKRRPPPPHNGRLQKGGAAASRSKEPASRAQTGPDRKRPPPPRSGANAT

SEQ ID NO: 284711 - protein, 110 aa, Zea mays
  unsure (1)..(110): unsure at all Xaa locations
  Clone ID: MRT4577_22758C.1.pep
KPGYFPSLRRLVFFTWVVNATIFLKCXQALIVSFFPQYLXNISLSXCENPVFKPFRLKQAIAEGNIPXWPLWGKQSPALFLVQXWVQTIREQQLKKLGLPGINQVVLANL

SEQ ID NO: 284712 - protein, 65 aa, Zea mays
  Clone ID: MRT4577_22759C.1.pep
HYLIYARVHGAMGVSLHRVARIITDGVAEGPPNRATKQGPSGHAHGATLQTGLERKQETVHGHKN

SEQ ID NO: 284713 - protein, 33 aa, Zea mays
  Clone ID: MRT4577_2275C.1.pep
LALNRAGGKAGNKGAEAALTSIEMASLFRHHLG

SEQ ID NO: 284714 - protein, 184 aa, Zea mays
  unsure (1)..(184): unsure at all Xaa locations
  Clone ID: MRT4577_22760C.1.pep
PRVRGRVGGRVGNTARASKSDTLVSNKMHALVEYETSQQAEKAVEKLNDERNWRKGLRVRTVLRRSPKSVTRLKRADLDHFVASDDDSPHSSSDSPTADXLHLPRQRRLTLTSITSSSKRSSRMGASTKAAGLEDELARRPSCTSRRRRAPSRLPRAWPAATSTRPAPARRRRPRSSAPAPAAG

SEQ ID NO: 284715 - protein, 51 aa, Zea mays
  Clone ID: MRT4577_22761C.1.pep
VRPRIVMFVSLVPNRRAAHFFVSSFHFHACCIQYSPLRRIKPVLSPNGGIV

SEQ ID NO: 284716 - protein, 129 aa, Zea mays
  unsure (1)..(129): unsure at all Xaa locations
  Clone ID: MRT4577_22762C.1.pep
MASRWVRXPEXYPLFAATGXVAGGLXRFQLLRNITGNPQVRANKAGRAAGVLENHEEGRRYAMHGLTSFVHDTTPEIMPAGNKVVTGPKRSTMIGILLLLLATGDFTLCWPLNTLGTSMTSKGTQSARG

SEQ ID NO: 284717 - protein, 93 aa, Zea mays
  unsure (1)..(93): unsure at all Xaa locations
  Clone ID: MRT4577_22763C.1.pep
GSRVSFGPLGEVVKPVSPAGFFPPPGFCLSPXAFAGLKVKPFXTVRLPLFSMFGFFVPPFVSGKGPLEGLFFHFFVFVFDRGWASASFFFPGS

SEQ ID NO: 284718 - protein, 42 aa, Zea mays
  Clone ID: MRT4577_22764C.1.pep
GVEAVLIAPYPIKNLHKGTHHQGAEGQHLQIYINPACGNGKS

SEQ ID NO: 284719 - protein, 119 aa, Zea mays
  unsure (1)..(119): unsure at all Xaa locations
  Clone ID: MRT4577_22765C.1.pep
MGGHGHPYSPAELELPGFVPQRLSQAQIVAPFAGTAVLAVLGAWLVSGRCGGGRLSRTDRCXWGWGLFTALTHLVFEPPFLFTPDFFSKENPNYFDDLFKEYSKGDSRYAARDTAIVAL

SEQ ID NO: 284720 - protein, 133 aa, Zea mays
  unsure (1)..(133): unsure at all Xaa locations
  Clone ID: MRT4577_22766C.1.pep
MGGHGHPYSPAELQLPGFVPQRLSQAQIVAPFAGTAVLAVLGAWLVSGXNVLNPAHRXTPHRSRSPRPVVIDCVACASXRCGGGGRLSRTDRLLMGWWLFTALTHLVFEPPFLFTPDFFSKENPNYFDDLCEY

SEQ ID NO: 284721 - protein, 192 aa, Zea mays
  Clone ID: MRT4577_22767C.1.pep
IYAALWSAGPHPSIRETSSLILPSAAHCGSLWPPILRTPPLYSIFSSSSAIFFRSASSSSPSPTLRSLSWFPARRSLSPYLSHTRSTSLLQLSGRASAVGRDSQRVGVRRRAPWGWTCTSLAGFSSSASSSMAAVCSPASSSLLPAACRARRRFSRSLVAEPGPCALLQPVVTLLLAVRAPLRPWQPRLLPS

SEQ ID NO: 284722 - protein, 102 aa, Zea mays
  Clone ID: MRT4577_22768C.1.pep
GGVGGRGGQGGGRVLGGAETRPSLEDVVLYSLREGQGSDAERGGGRGVSRVSTVVSAGPGPCDLHRLGVRARGGPLGGEVYTSAGASMGVSVGGRTEALRGL

SEQ ID NO: 284723 - protein, 138 aa, Zea mays
  Clone ID: MRT4577_22769C.1.pep
MLGIFDKFMSEEPETSSTYMRTELDLYLEEPTLPRTQELDIISWWQHAGIKYPTLRKIARDIMAIPVTTVASESVFSTGGRVISPHRSRLAPKTVEGLMCMQAWSRADMLGDQSCFINALTTCLEDEDEQMDEPNDAL

SEQ ID NO: 284724 - protein, 123 aa, Zea mays
  unsure (1)..(123): unsure at all Xaa locations
  Clone ID: MRT4577_2276C.1.pep
DHLGIERVGEMIRAEDRGTRLGDPQKCSGMLSRNQXMRGRRSVLLPXENKDWHSXGMIIVIQPTNHXCASCXTFITTGALEDGYTEETGKRISLSDQQFVECALAFYNLLCHGGLPSQAFEYI

SEQ ID NO: 284725 - protein, 110 aa, Zea mays
  Clone ID: MRT4577_22770C.1.pep
RECPPRGSRSRRRPSGACSAAAGAAPSPARAPCSNRLEGQSVRLGLVQPELPGTRTVPPGSAREVAPPQHKQDERMNIASSPMQVLGRRGPRIRPSCWLVGGCQLTQTRG

SEQ ID NO: 284726 - protein, 88 aa, Zea mays
  Clone ID: MRT4577_22771C.1.pep
GDEGVLHLKAFVTYELPCTPEIFLELNAQKQINRTHIRPALEPLGCLCTPRLMHEKSGGLFGFEPNRKGLRGTRDIVDRLRNIWWARG

SEQ ID NO: 284727 - protein, 90 aa, Zea mays
  Clone ID: MRT4577_22772C.1.pep
IIIAGAPVFHRACLYSCKNIQRTLLLYASLKQPKRQLEDRILFSAHRPFCGLIVLRTNNAYINLLPNPMTSSMKHSSELIHFDAMIDPYD

SEQ ID NO: 284728 - protein, 75 aa, Zea mays
  unsure (1)..(75): unsure at all Xaa locations
  Clone ID: MRT4577_22773C.1.pep
RRDPHIRSRKHFPRDSNXXHPGPQESLPGASPSYHLPLPILTPRNVGSPTPRTQTSSPILHPRGMLPLLRLLPKP

SEQ ID NO: 284729 - protein, 102 aa, Zea mays
  Clone ID: MRT4577_22774C.1.pep
FSPLGCRFLCWVGFSPCPPVGGPLFWFSPPVSVPLFLKIGDAGLVLLVPPRPLVVGPFFGSPPLGRFAVRALGPPVAVGVLLGVGKRVPSGARVSLASAPKN

SEQ ID NO: 284730 - protein, 79 aa, Zea mays
  unsure (1)..(79): unsure at all Xaa locations
  Clone ID: MRT4577_22777C.1.pep
QAQRRHPPRATNEEDQKDAAPQRVLTTEEQPXRRQEWXXSRKSXXXLPVPHPQGAXPLXLAXPEGPSXAPARPPXRKAQ

SEQ ID NO: 284731 - protein, 116 aa, Zea mays
  Clone ID: MRT4577_22778C.1.pep
MAGKLIANLIVMGSAIIGRAMLQAYRKALENANKTGVAHEAINNIRRASKTMTEQEARQILGVTEQSTWEEIAQRYDKLFERNATSGSFYLQSKVHRAKECLENVYQKNKQDGTPT

SEQ ID NO: 284732 - protein, 60 aa, Zea mays
  Clone ID: MRT4577_22779C.1.pep
LKSAAAPRGGATATACEALPSWLSRRQSALPLRCDGAPRWLVGGWFVISVERGVATQLRR

SEQ ID NO: 284733 - protein, 92 aa, Zea mays
  unsure (1)..(92): unsure at all Xaa locations
  Clone ID: MRT4577_2277C.1.pep
AALFFFFFFXXLXXXVXXXXXXXXGXXPAXAVVFFXXXVXRPRLSLSXVXXGAFWXRGPVPXXGLXFXXXXGXRXLGLLCSVXPLPPLVCPL

SEQ ID NO: 284734 - protein, 73 aa, Zea mays
  Clone ID: MRT4577_22780C.1.pep
TRRGNPKSVANVNEKDKDAVLRHRFCRYPDILFCCLYSFCFFMVLFFHFIVSPFFFFFFFLFNLFFFFFMFFF

SEQ ID NO: 284735 - protein, 46 aa, Zea mays
  Clone ID: MRT4577_22781C.1.pep
YSAPSQQLVHAKVYHMVALDPLGYSISGSRPHICPITQCAHRSFPT

SEQ ID NO: 284736 - protein, 257 aa, Zea mays
  unsure (1)..(257): unsure at all Xaa locations
  Clone ID: MRT4577_22782C.1.pep
MGGQKTAILSVYDKTGLLDLAKGLHECGVRLLASGGTAKMIRQANFPVEDVSAITKAPEMLGGRVKTLHPAVHGGILARDLDSDDSDLSANSIDEIDFVVYNLYPFSETVARINVTIPEAVEEIDIGGVTLLRAAAKNHARVTIISDPNDYHDLLTELKKNGEVSETSRQRYALKAFEQTSSYDTAISXFFRKKYAXDGVQYQTLRXRANPHQNPQLFSWQXEAPTFXVLCXSPGYXHLLDALNAWPLVQELTQALN

SEQ ID NO: 284737 - protein, 102 aa, Zea mays
  Clone ID: MRT4577_22783C.1.pep
GRVGDNNAVGYFVKQGFTKEITLDKERWQGYIKDYDGGILMECKIDPKLPYVDVATMIRRQRQAIDEKIRELSNCHIVYSGIDFQKVRFFPHGLYYIGVCFS

SEQ ID NO: 284738 - protein, 64 aa, Zea mays
  Clone ID: MRT4577_22784C.1.pep
KNDGPYRNLNREDQGPLLWQRPALHPEYALSTVFVRLKILPIDTLSADVHIHDRLLARLIEISI

SEQ ID NO: 284739 - protein, 99 aa, Zea mays
  Clone ID: MRT4577_22785C.1.pep
FPPATATSSPAADMRERWAATSAGCEAGRSPRASASMRRAMAAWLEPFSSASAARAATIIGVTRARPGSLPTIVGSDRLDSTVRRCCCRLPSAVVLDQG

SEQ ID NO: 284740 - protein, 63 aa, Zea mays
  Clone ID: MRT4577_22786C.1.pep
VDLENNIPASSLPGLHNGTLCAQLYLIIGHHPRRSNFSMIHQGHLFFNTGHGLPLFFLYRYPL

SEQ ID NO: 284741 - protein, 83 aa, Zea mays
  Clone ID: MRT4577_22787C.1.pep
TFPSHPLGVTWGNGGVLVNPPAPPRFFFVFPPLPHCGFWCIPSLWFLSPRVKKKKKKKKKKKKKKKKKKKKKKKKKKKKKKKK

SEQ ID NO: 284742 - protein, 64 aa, Zea mays
  Clone ID: MRT4577_22788C.1.pep
LKKFGSTFPRSYNFLPWGSGYLKGVNTWPTCKGKMATDTNLVKYSLKGKESGVCVCSFWMTPSG

SEQ ID NO: 284743 - protein, 58 aa, Zea mays
  Clone ID: MRT4577_22789C.1.pep
LKVRSVVMVLVLGSSSTPAEPMHQPACTADRWCVVTPVRFYSKTSPKEKKKKKRTLRP

SEQ ID NO: 284744 - protein, 160 aa, Zea mays
  Clone ID: MRT4577_2278C.1.pep
MSASSSSSLPVPADFPLDLIRCPFCGADLETNVARTGSKAGQRFYKCVRYDTAYVRRMTPYQIARAQQQAGVLQVQMQANPAGIVAPPANQAQVQANQGQNHPLATPETVLVNQIFRPIAAAASGSQALGATAFILAASNIMLTLLLLLFVVAIYFGGGN

SEQ ID NO: 284745 - protein, 84 aa, Zea mays
  Clone ID: MRT4577_22790C.1.pep
EKMVVCLTIGFVVQVDCLANLHDRFWPSLALFFYQLRIIALLAPVLSLEHLQQLLVFFTANISILGFSQKSKSSKKLYSTPITA

SEQ ID NO: 284746 - protein, 64 aa, Zea mays
  Clone ID: MRT4577_22791C.1.pep
VAWGVTFSCPPPAGHVRHYVHIIPATGKKKINRLMVKTSPQKNNIILTTHPQCQNPFSFFFSGK

SEQ ID NO: 284747 - protein, 44 aa, Zea mays
  Clone ID: MRT4577_22792C.1.pep
KDRQGFLYSQNHSRPVTGMFYSSHPEETKSQHQIMGNQTLLFPC

SEQ ID NO: 284748 - protein, 58 aa, Zea mays
  unsure (1)..(58): unsure at all Xaa locations
  Clone ID: MRT4577_22793C.1.pep
SVAYAFVAAFGSSSLGLGYSLVLSEXFLAPAIPSVSARAGGIFLPLVKSLCEACGSRA

SEQ ID NO: 284749 - protein, 85 aa, Zea mays
  unsure (1)..(85): unsure at all Xaa locations
  Clone ID: MRT4577_22794C.1.pep
MDDVEEGVGRPAAQLQYTTKRAASSPWGLGKATLLLAYQSFGVVYGELCISPVYVYKNTYSGKAAEHQEDQEXIPGVLARVFWSL

SEQ ID NO: 284750 - protein, 81 aa, Zea mays
  Clone ID: MRT4577_22795C.1.pep
ILGKPHVQNTPNPGGPPGFFTPRGIKNPPGFPILAFLKGKQRGFRQQNLLPPGVAKQGNKRPCPRGFVQAAKKAGGQGVSP

SEQ ID NO: 284751 - protein, 154 aa, Zea mays
  Clone ID: MRT4577_22796C.1.pep
PPLARVWGKRGQKSLPIQARQAPRGVEPQSQGRSPGLMGTPKRKKGPLKKKRGLCRGPPPQGCLKGWEGPLFGPPPPLVLGPVESGCPPPQGPLGGVLGPGNLGPPLGPGGGGKIKLGSMPNSRLGGSSPFPLGLMKTGGGFMREKWGKKLAVF

SEQ ID NO: 284752 - protein, 63 aa, Zea mays
  Clone ID: MRT4577_22797C.1.pep
PRVRARLRLDEGQPERVCLHGSDAGLQACLADDPVRSVVCPICAKTNMVMALGEIFTYAIDHC

SEQ ID NO: 284753 - protein, 98 aa, Zea mays
  Clone ID: MRT4577_22798C.1.pep
MAAAASGKAPSLVVAASMGAVEALKDQAGLCRWDYALRSLYHRAAAAPRIRALSAALSDSVSVPADAPPRASRPPPPPAPRDADRMRKAYHLVCWGPN

SEQ ID NO: 284754 - protein, 66 aa, Zea mays
  Clone ID: MRT4577_22799C.1.pep
PSTRILYSSVTSLSFQAHFVFNCLLVFTAVQPVLMLIVLLDMWMLSCYNRLELARCTTSQISCLDL

SEQ ID NO: 284755 - protein, 63 aa, Zea mays
  Clone ID: MRT4577_2279C.1.pep
PSFNKYTTPPKKKKKKKKKRKKRENNYKKKKLKYKSIKKKKIYNKNKKKGGAVLKVLTLAYTG

SEQ ID NO: 284756 - protein, 86 aa, Zea mays
  Clone ID: MRT4577_227C.1.pep
WDPRGRPGREYLTRFRLPITFCLSASDAVTEHLDLIYILQLSIHACDLYRQSGGCRRSSQEDDDWHVLYGGDHIDAVLHIDDSTTV

SEQ ID NO: 284757 - protein, 79 aa, Zea mays
  Clone ID: MRT4577_22800C.1.pep
GNGEHIFPAVVIVMSLCSGVLSGVSGRRNIRSSRYRGNLCPGPIELLTLPCAVPCSNELQPFSCAPYFRNHKTNLKTPN

SEQ ID NO: 284758 - protein, 91 aa, Zea mays
  Clone ID: MRT4577_22801C.1.pep
GFGSNILLPFFICHSLVQKNKLASDKYSMTRVVSCRRRCFVLPNQIQQIKYKNICRFTGILCRKGILSLWCSPSQMVCFVFDILYIGNIRE

SEQ ID NO: 284759 - protein, 29 aa, Zea mays
  Clone ID: MRT4577_22802C.1.pep
PLSLHGGCPVIRGNKWSSTKWMHIHEYKA

SEQ ID NO: 284760 - protein, 121 aa, Zea mays
  Clone ID: MRT4577_22803C.1.pep
SQTLLDDAYRSRSHRVRAGRFATASETETLAFQAEITQLLSLIINTFYSNKDIFLRELISNSSDALDKIRFESLTDNTKLDGQPELFTHIAPDKANNTPTIFDSALAMTKSYLVHPPCHHC

SEQ ID NO: 284761 - protein, 285 aa, Zea mays
  Clone ID: MRT4577_22804C.1.pep
ASPYAVALTALLLVSAALLALIAFGVFSLPVSAPNAAATTTAGGETESADTRPARPRARRDLGEGLGERGAQWTEVISWEPRAFVYHNFLSKEECEYLIGLAKPHMVKSTVVDSTTGKSKDSRVRTSSGMFLQRGRDKVIRVIEKRIADYTFIPVDHGEGLQVLHYEVGQKYEPHFDYFLDEFNTKNGGQRMATLLMYLSDVEEGGETIFPDANVNVSSLPWYNELSECAKRGLSVKPKMGDALLFWSMKPDATLDPLSLHGGCPVIRGNKWSSTKWMHIHEYKA

SEQ ID NO: 284762 - protein, 39 aa, Zea mays
  Clone ID: MRT4577_22805C.1.pep
RKEGKIAKGVGAREMVSVAVKMRVTTKPAEINAQIKGES

SEQ ID NO: 284763 - protein, 42 aa, Zea mays
  Clone ID: MRT4577_22806C.1.pep
DKAWQAHLCHHLSHSSTHNGSVWALASILRTCLVQTDSLSAI

SEQ ID NO: 284764 - protein, 81 aa, Zea mays
  Clone ID: MRT4577_22807C.1.pep
KQRAPTTHSRDCHMDSWHILTVLALGTLQRGGILCYLDQAIWMGNLFGRLRHRRVAHTTAHAVGITPPMMAHLVLVASLRH

SEQ ID NO: 284765 - protein, 145 aa, Zea mays
  unsure (1)..(145): unsure at all Xaa locations
  Clone ID: MRT4577_22808C.1.pep
PRLALWTWTARQHYATPYLAXLCXAVYEDLISMLDDEKRQIHRHIKPYNYIXNLKGXINITRMKTECLVNNLKRQXDTFIDTYNYMXPDTINGSNDDYKRNXMKLRLIILKGAIFQDPXLPSKGERXVSXYQLKRAIVXNSPPSA

SEQ ID NO: 284766 - protein, 108 aa, Zea mays
  unsure (1)..(108): unsure at all Xaa locations
  Clone ID: MRT4577_22809C.1.pep
MGRSPGCVKAHSFRGXKTKGQNMXLLETKHPHSEWCWLSLPXARDRLRFCMSGPLRWSNYLRPVLKRGNYTRRVDDLIERLLRPLTNRWEMIGGRLLVRSDNGPKKYW

SEQ ID NO: 284767 - protein, 61 aa, Zea mays
  Clone ID: MRT4577_2280C.1.pep
RRETSPCCHEIHLNHRPSHFIKVSVYSSGPGALSGGKDLMLAQISSLAMTSSSAKRSIIGR

SEQ ID NO: 284768 - protein, 56 aa, Zea mays
  Clone ID: MRT4577_22810C.1.pep
HLPNFNSLLDPLQNQCLNPSGLIDTPHLTRHPPNTLCPSPLHFLTYLPFHYFLFPH

SEQ ID NO: 284769 - protein, 33 aa, Zea mays
  Clone ID: MRT4577_22811C.1.pep
IDQTTLANHIVIYRLELMFKDTNELKPTPFPLP

SEQ ID NO: 284770 - protein, 45 aa, Zea mays
  Clone ID: MRT4577_22812C.1.pep
VDIMGSFAHIQRVFRIDARATGDEIGSDQVHSEICKWSQWIELKL

SEQ ID NO: 284771 - protein, 229 aa, Zea mays
  unsure (1)..(229): unsure at all Xaa locations
  Clone ID: MRT4577_22813C.1.pep
NNHSIHFECVTNFTXXKQTXFLQXAYVYXHTVLDIDLILIPRDGQKKKXGRYXXGNQSMKHXCXXSSSCCXXXPPPPPPXLXPPSXPPRADXAAVVVGAXKPXFSTAPTVLKKXRRLXPSTSVRGSSRLXMSTXDRFRVNLXRXXXRSSSSSRRRGRPAXXGDTHALPXPXAAXPGXRXXDRRRRTXSXTSRXXWPAPXRXRHXXXXAQETTHRSXRSXCQRRCRLKRT

SEQ ID NO: 284772 - protein, 136 aa, Zea mays
  unsure (1)..(136): unsure at all Xaa locations
  Clone ID: MRT4577_22814C.1.pep
GGRKTPGGQPGGXGGAKGEGAKNRRPGQGLQDGGGGPDQRNRKGPVGEPGRQPGGPGKKHRRGQGNQLGARKGGGGGGNRQRXGGGKQGDRRTRGPHGAKKDPGGKKPNGPRRQGGRKKGGAKKKKKRGGRPKRNQ

SEQ ID NO: 284773 - protein, 35 aa, Zea mays
  Clone ID: MRT4577_22815C.1.pep
LDIITSHSLIYRCFRTAILLLLSDPGLSNCSYGPT

SEQ ID NO: 284774 - protein, 124 aa, Zea mays
  unsure (1)..(124): unsure at all Xaa locations
  Clone ID: MRT4577_22816C.1.pep
FGSNSFMYKINGTANINAIRAAAEKGVKRFVYVSAADFGLVNYLLQGYYEGKRASEAELLSKFTYGGXLQNIKPLTRLPLIGPLLTPPVSAASVGKVAVRAATDPVFPPGIVDVYGIMRYSEQN

SEQ ID NO: 284775 - protein, 66 aa, Zea mays
  Clone ID: MRT4577_22817C.1.pep
INTTRLGGGFYLKILGWLCFVWFRKKILSARGWFFFIRSIIFFGRGEDYKRSDIVVLFVWEEGEKG

SEQ ID NO: 284776 - protein, 69 aa, Zea mays
  Clone ID: MRT4577_22818C.1.pep
RAGMPVSGEHNDADITGRWLSWLGRIENSAVLRLLLGLQVLAGEAPDQHVPVHPELRGHRRLQGPLVCV

SEQ ID NO: 284777 - protein, 59 aa, Zea mays
  Clone ID: MRT4577_22819C.1.pep
GRGVLLASVALNGYRITSVATQMIFNQTRASKLRRGKGEINHKERQHKIQMIYLPEFGF

SEQ ID NO: 284778 - protein, 105 aa, Zea mays
  Clone ID: MRT4577_2281C.1.pep
KEIRVGYIFWGLGPGSYTSTCFHTRLHTIDYVATLIWALKETHTYVRAHKTGGARYYFKTRTRSTRGGTTIREDKLAEKGGVFFGGGLLGVLGVLFFVVGVGEGE

SEQ ID NO: 284779 - protein, 284 aa, Zea mays
  Clone ID: MRT4577_22820C.1.pep
MRSSVARLIRSSSASPSRLSGNAFFGNATPSDQRHIEKPFKVKEAEPVNVTKPSPHKLLVLGGSGFVGSHVCKEALDKGLVVSSLNRSGKPSLNEPWADKVIWNQGNLLEPASLKDAMDNVSAVVSCVGGFGSNSFMYKINGTANINAIRAAAEKGVKRFVYVSAADFGLVNYLLQGYYEGKRASEAELLSKFTYGGVILRPGFIHGTRRVGSVKIPLGLVGSPMQMVLQNIKPLTRLPLIGPLLTPPVSAASVGKVAVRAATDPVFPPGIVDVYGIMRYSEQN

SEQ ID NO: 284780 - protein, 55 aa, Zea mays
  Clone ID: MRT4577_22821C.1.pep
FYCFFSPPSHIWFSPSSPHKLKVFCQDGRSRTPFPSRLGVWGFSNNKKECKKKKK

SEQ ID NO: 284781 - protein, 113 aa, Zea mays
  unsure (1)..(113): unsure at all Xaa locations
  Clone ID: MRT4577_22822C.1.pep
RRPIPLHPRLQSQMAIWCGGGRWLMKDTFASTSFLSQFGTWHHWYQLRMNIQFLKLDSSQAKLSNCGILFETIMDNNVSLSNSRNTWLMXPCMEARSMRKCTLGDMPPEAWPG

SEQ ID NO: 284782 - protein, 108 aa, Zea mays
  unsure (1)..(108): unsure at all Xaa locations
  Clone ID: MRT4577_22823C.1.pep
MPKILRYYLESESMAMVPHGAGGSSVSMSYPVLSPASYTAWAIKVESILDAQGLWEAVSPPDNGEVNAVKNKTARAQLXSAARAHRLPALPDDILMQVSTQKTAAEVW

SEQ ID NO: 284783 - protein, 117 aa, Zea mays
  Clone ID: MRT4577_22824C.1.pep
GTLSCSPQRHWVCCSDSARAPPHSPCMTARATGLATSVSPLTLPPFLNWRSRSSGGDDSYFTLKEGPAGTRTLDTNVPLKCPLCIRFATKAGRYRIAHDGILLDFKAGTTYKTTVNI

SEQ ID NO: 284784 - protein, 71 aa, Zea mays
  Clone ID: MRT4577_22825C.1.pep
NKTEDGLHRSPPHQVCSPPASSSSSPSPRLRRAASPPLIPRRTKTSASTTSRRGSFHRGRSPTRSTTPPAP

SEQ ID NO: 284785 - protein, 118 aa, Zea mays
  Clone ID: MRT4577_22826C.1.pep
EAAYMYLGRPWEPFGRVVFAETFMDRCIEPAGWHNWDKPDNEQTACFYEYRSQPCVFLFLVVPEHGCYLNLKRAMSLLVDHSFSLVLSSSSWLARLALIGILRRCSGPGSSSSGRERW

SEQ ID NO: 284786 - protein, 65 aa, Zea mays
  Clone ID: MRT4577_22827C.1.pep
WKEALEIDHTSWMRVFPLDTCPFCFAHGDSGERVVHSVSFSGLSCCGSLESSDCWDVFPGVTSWH

SEQ ID NO: 284787 - protein, 68 aa, Zea mays
  Clone ID: MRT4577_22828C.1.pep
LFCSSDVIGRSRPVLLNRSNGGQRSHCGERPADLERGRIRSMLEPTVQAETDGGTRPPSRGRDRDLHP

SEQ ID NO: 284788 - protein, 112 aa, Zea mays
  unsure (1)..(112): unsure at all Xaa locations
  Clone ID: MRT4577_22829C.1.pep
PVRLLCGLVCGFLFLAGFCYAPASALSSGVSPAGVRSLCVWALAPLPVSRXFGCPPAFRRVCSPCFGRLRWCCWLPLLGLFRCACCFLGPSGPLFLCGGVPVAPSRVCPPPL

SEQ ID NO: 284789 - protein, 40 aa, Zea mays
  Clone ID: MRT4577_2282C.1.pep
IVMLKSIRCRFVCPEQFGPICGLCESNIFDSAEGCRSHKL

SEQ ID NO: 284790 - protein, 140 aa, Zea mays
  unsure (1)..(140): unsure at all Xaa locations
  Clone ID: MRT4577_22830C.1.pep
MSTRGSGSLSPAAGASAAAPEVEGHWAPHGAVLTACVVGSNVLVILLVFGFFWRFFSGKGGPSTSHGADDDDEEDSLPVASPWASXAPGSRATAHGRRRWKNVVSSLPXVSVYSSAGAEXRRKARPECAVCIVELRDGDS

SEQ ID NO: 284791 - protein, 52 aa, Zea mays
  Clone ID: MRT4577_22831C.1.pep
SSGNNAEYAGSILQFYRVFGLMNDIVYHLLISHFFVWFMEWSELIHHYLIPS

SEQ ID NO: 284792 - protein, 104 aa, Zea mays
  unsure (1)..(104): unsure at all Xaa locations
  Clone ID: MRT4577_22833C.1.pep
MVAHRVHHYQXVEMRELPTSTDDHPMMYRMQLWATNEVHDMSDSCDFLIKIEKVQIGNGQMLDINENYERNQTTIEKYEIWMTXRAGLVHHIMYFELRMIYLTG

SEQ ID NO: 284793 - protein, 41 aa, Zea mays
  Clone ID: MRT4577_22834C.1.pep
QKPLFFVLSIKRANNVLKYTQWQMRIEKVKWQRQVTVVFIA

SEQ ID NO: 284794 - protein, 107 aa, Zea mays
  Clone ID: MRT4577_22835C.1.pep
MSAAFKAFLNSPVGPKTTHFWGPVSNWGIILAVRAPVDSIVRLILCRTCLLLLASSFAEIRENSSSTRENRSFRHISDLSRSQSQSQVIRVSVCVSISVALAELLVC

SEQ ID NO: 284795 - protein, 221 aa, Zea mays
  Clone ID: MRT4577_22836C.1.pep
MKTILASETMEIPEEVTVKVSAKMISVTGPRGTLTRNFKHLNLDFQLQEGGRRLKVDAWFGTRKTMAAIRTAISHVQNLITGVTKGFRYKMRFVYAHFPINASITAANRGIEIRNFLGEKKVRKVDMLDGVTILRSEKVKDEIVLDGNDIEVVSRSAALINQKCHVKNKDIRKFLDGIYVSDKGAIKEEYSAKNRPTRSRVSACRVSSSLCRCRDFELSLD

SEQ ID NO: 284796 - protein, 57 aa, Zea mays
  Clone ID: MRT4577_22837C.1.pep
DEHVCVLINKPNISPVVCHDKQPYVEFHLETFEIRIGIMSPHATSKYLQAAAAAADD

SEQ ID NO: 284797 - protein, 48 aa, Zea mays
  Clone ID: MRT4577_22838C.1.pep
GKGVFGTCLKKKKKKKKKKKKKKKKKKKKPKKKKKKKKKKLALPRRPL

SEQ ID NO: 284798 - protein, 134 aa, Zea mays
  unsure (1)..(134): unsure at all Xaa locations
  Clone ID: MRT4577_22839C.1.pep
RGELHDKNENNAVAPPDNPPPPQPLPXGPPNAETILKAITIPSPVPNTPPIPGGATPKPPNPXPPPHTPPPHPQHPTPPPPPPXPLPPHPPXPPPPLNPPPTSPPHPPPPPPFPPPPSPPPXPPPPPNPPPPPP

SEQ ID NO: 284799 - protein, 70 aa, Zea mays
  Clone ID: MRT4577_2283C.1.pep
NSRAVPSDFQSFYPLTQLPKERDLITYRLVELTSMSSPKLSSFPVKKTLLYYPISFPINLFTRSRISNHP

SEQ ID NO: 284800 - protein, 84 aa, Zea mays
  unsure (1)..(84): unsure at all Xaa locations
  Clone ID: MRT4577_22840C.1.pep
HVGRACHXPLKDLDGVYTNFTVAYKPADDEDALQLHPVQLHPLPKHATAGLQLDSPGVVPYTLLGHHLRGSFILHGLRGALLFI

SEQ ID NO: 284801 - protein, 73 aa, Zea mays
  Clone ID: MRT4577_22841C.1.pep
TKQHLSLFFLGGGHFLNQTTPKPFFFRWWTLCYGRVHPLLRGFILFLIHNIFGIRSPNGVKHKKNGEGFPLAP

SEQ ID NO: 284802 - protein, 58 aa, Zea mays
  Clone ID: MRT4577_22842C.1.pep
APELRTRCCSRLRPPDSSDLIRYGIQSGGESLSAMIWGGGGDYRPRVVKYLRPHPVLE

SEQ ID NO: 284803 - protein, 84 aa, Zea mays
  Clone ID: MRT4577_22843C.1.pep
GTFGLIYVLVYVLGYFCVSFFPLSLNLGHRVRCVVVCSCLLFGILFLCSLSSSDPIDSVRPIALLHGGSGSCFSFVLIVYVTYG

SEQ ID NO: 284804 - protein, 439 aa, Zea mays
  Clone ID: MRT4577_22844C.1.pep
MSWWLGLSSTSGSGSGWPPNRLVRHLPLPPPTQAKLNSLQLAPPSPYRERQRQASEGMERMLARLMRRRSSVPLSGLLHHGGAPAPLQAAGATGASPLIFSHQQQQQHTAASAVLPGLKIRDSASQLIGRTPMVYLNKVTEGCGARVAAKLEFLQPSFSVKDRPAISMLEDAEKRGLITPGKTTLIEPTSGNMGIGLAFMAALKGYELVLTMPSYTSLERRVTMRAFGANLVLTDPAKGMGGTVRKATELYERHPSAHMLQQFQNPANVKVHYDTTGPEIWEDTLGQVDIFVMGIGSGGTVTGVGKYLKEKNPNAKIYGVEPAEANVLNGGKPGPHLITGNGVGFKPDILDMDVMEKVLEVKGEDAVKMARELAVKEGLLVGISSGANTVAALELAKRPENKGKLIVTVLPSLGERYLSSALFDELRKEAQAMEPVAVD

SEQ ID NO: 284805 - protein, 102 aa, Zea mays
  Clone ID: MRT4577_22845C.1.pep
IFKLFQAWKKPPPFKVQVNGNPAPPPFGLSYQVLRKKITQRVQTGLLVSFQIKDFFRAKKTSPFFPPIFLGPKAWRRGLISFNPLFFGVAPLTHPLSCPKCF

SEQ ID NO: 284806 - protein, 541 aa, Zea mays
  Clone ID: MRT4577_22846C.1.pep
MEREMADAPAAAIPAAEPLAAVAEEGEGEAAAEAVGSTLTMEPVAAAKKFIENHYRSQMKNIQERKERRFKLERQLASSQVPKEQQIDLIKDLERKETEYMRLKRHKICVDDFELLTIIGRGAFGEVRLCREKTSGNIYAMKKLKKSDMVVRGQVEHVRAERNLLAEVASHCIVKLYYSFQDTEYLYLIMEYLPGGDIMTLLMREDTLTEHVARFYIAETILAIQSIHKHNYIHRDIKPDNLLLDKNGHMKLSDFGLCKPIDCSKLSTLNEDEPMGDDNMRESMDIDSSLSNTANGRRWRSQHEQLQHWQMNRRKLAFSTVGTPDYIAPEVLLKKGYGMECDWWSLGAIMYEMLVGYPPFYADDPITTCRKIVHWRNHLKFPEDAKLSNEARDLICRLLCDVDHRIGSAGADQIKAHPWFQGVAWDKLYEMEAAFKPQVNDELDTQNFMKFEELENPPAKTGSGPSRKMMLNSKDLSFVGYTYKNFDAVKAIKISDLQRNSSLTRPSIGSIFGPSGMDSPMEPNGRDTHMHTVSSGDPMIP

SEQ ID NO: 284807 - protein, 98 aa, Zea mays
  Clone ID: MRT4577_22847C.1.pep
GDTEHLGCWHVCRRRAAPARPRIDYSQRLSSLSYSPAASLSCDQCSPESSQGVGSSSAASSSLGARILLCQCPFCSSICVLVCPAEISIRMDCSGAVG

SEQ ID NO: 284808 - protein, 76 aa, Zea mays
  Clone ID: MRT4577_22848C.1.pep
LPRKFYGISPRAREIKRNPVTLGDRKKKNPIIRSNKKGQKGLKAIFEPPGAGPNGRIQAHGPLVVVYHTGHRGVAG

SEQ ID NO: 284809 - protein, 277 aa, Zea mays
  Clone ID: MRT4577_22849C.1.pep
KLSTLNEDEPMSDDNLRESMDIDSSLSDTANGRRWRSQHEQLQHWQMNRRKLAFSTVGTPDYIAPEVLLKKGYGMECDWWSLGAIMYEMLVGYPPFYADDPITTCRKIVHWRNHLKFPEDAKLSNEARDLISRLLCDVDHRIGSAGADQIKAHPWFRGVAWDKLYEMEAAFKPQVNDELDTQNFMKFEELENPPAKTGSGPSRKTMLNSKDLSFVGYTYKNFDAVKAIKISDLQRNSSLTRPSIGSIFGPPGMDSPMEPNGRGTHMHTVSSGDPMIP

SEQ ID NO: 284810 - protein, 146 aa, Zea mays
  unsure (1)..(146): unsure at all Xaa locations
  Clone ID: MRT4577_2284C.1.pep
ETAVAETGITEDLXSRKTRGDIDNLLLRMAEEEAAAVAVNMTTXEKGKEQIEDTLEEENFNFQDIPXQEWVDAEKEELKKYALSCGYKPGSLLFGGVNEGKLRCLRNRTEAKVVRTFSKSVGLPKIEADLCRYQRQHIAGSLFYAN

SEQ ID NO: 284811 - protein, 98 aa, Zea mays
  Clone ID: MRT4577_22850C.1.pep
GSSHASAHASAHASDIDATPHAGLSKAYVLYQIILISLHVYVCAAVGYVRIYICSRVSGSGLVTCMKRRNTMNKAFIDCVSSLHACNTINKSLIHLLC

SEQ ID NO: 284812 - protein, 98 aa, Zea mays
  unsure (1)..(98): unsure at all Xaa locations
  Clone ID: MRT4577_22851C.1.pep
SGGTXALAAWGGDCQLGGHPDRHHPAPAGGVPQVGGGPRVLDLPPPPPPGVQPRENFGPLGPPQEQLASHPFPPRSMFLYLGLFICLKPPCAVWGCLK

SEQ ID NO: 284813 - protein, 122 aa, Zea mays
  Clone ID: MRT4577_22852C.1.pep
RGAPLRQKKGQQIRGRGPFSRPKNLEGAKPAGGEGPKILKSRDFPPTILSGGGKIFFFQGKKAQLQICSLAPWKIGKKGGLFLSLSKGKRSPRVFRHFPGGGHLAPHPKIVVKPNAPQSPFF

SEQ ID NO: 284814 - protein, 60 aa, Zea mays
  Clone ID: MRT4577_22853C.1.pep
FHPHRPYPCSPTLQTLALSSIPLPNAYVASHNTTTPQILCHSSRPGKPPLHRPSLSRLLP

SEQ ID NO: 284815 - protein, 125 aa, Zea mays
  unsure (1)..(125): unsure at all Xaa locations
  Clone ID: MRT4577_22854C.1.pep
PTSNRGAAGAREQDXXXGDEXRAXXXTXKEXENGXXXEGEGKXXTQGXGEGDRGAXPTAEXXEXESXDDTAXKXXEXXDTXXRQEQXXXDKKAGGPNTKKHRKKQTAGPEPEKAXENKTXAEGAT

SEQ ID NO: 284816 - protein, 42 aa, Zea mays
  Clone ID: MRT4577_22855C.1.pep
LLQPLISRPLRSKNIEQQAATATALNFCLALRPPLLKLSPEL

SEQ ID NO: 284817 - protein, 121 aa, Zea mays
  unsure (1)..(121): unsure at all Xaa locations
  Clone ID: MRT4577_22856C.1.pep
RVRGRVGGRRADPGVWARCLRTCQLFLCACVFATVNARVAHILNFLDGSVRTFFNAVQAFVGVRDVFGAHLRVFRXPRASGRRLCSVRVLLRQDLVQVXLASYLPACPVRASCFFHVDLLP

SEQ ID NO: 284818 - protein, 42 aa, Zea mays
  Clone ID: MRT4577_22857C.1.pep
FGSSLHGLGALLPTVCAAPALAAEQDADGDNVTVYKPPIVSC

SEQ ID NO: 284819 - protein, 57 aa, Zea mays
  Clone ID: MRT4577_22858C.1.pep
YSQRVSAVLPDEFCTPLERCMRVFAQARWINLHVVHVSDEDDMDPVGVVEGVHDHRD

SEQ ID NO: 284820 - protein, 253 aa, Zea mays
  Clone ID: MRT4577_22859C.1.pep
ICVINTVDDVQPGPFQYTTRIRYPFGLTEKHNQGCDCTNGCSDSESCACAVKNGGEIPFDLSGAILNEKSVIFECGSSCKCPPSCRNRVSQHDTKIPLEVFRTTKTGWGVRSLWSIPAGSFICEYIGELQHQKAADKRRNNNYLFDVGLNYDDENVSSVLLSNVSGLNSSSSCSQAMEDVRFTIDASVYGNIGRFISHSCSPNLQAQNILWDHGDKRMPHIMFFAAETIPPLQELTYDYNNSEIDRVQGVNCE

SEQ ID NO: 284821 - protein, 81 aa, Zea mays
  unsure (1)..(81): unsure at all Xaa locations
  Clone ID: MRT4577_2285C.1.pep
AYSLPFQGLKAGNKKQGYVKIIERKGATSIEALFPGYSTQISCXFQYFPLITLEKSPNFXFLKKMVKNPFISERFQFEYCF

SEQ ID NO: 284822 - protein, 111 aa, Zea mays
  unsure (1)..(111): unsure at all Xaa locations
  Clone ID: MRT4577_22860C.1.pep
MGLAFGKLFSRLFAKKEMRILMVGLDAAGKTTILYKLKLGEIVTTIPTIGFNVETXVQDLPNAMNAAEIADKLGLHSLRQRHWYIQSTCATTGEGLYEGLDWLSSNIASKA

SEQ ID NO: 284823 - protein, 78 aa, Zea mays
  Clone ID: MRT4577_22861C.1.pep
MSSTGTIYIFCLMCNDVTVQRLLPYYTVGCSLDLFHFAQGLDFQYHATFYIRGKYLIRKKKKKKKKEKKEIKKRKKRK

SEQ ID NO: 284824 - protein, 140 aa, Zea mays
  unsure (1)..(140): unsure at all Xaa locations
  Clone ID: MRT4577_22862C.1.pep
THAFASLSLIINNLNSLHHFYQRSPLTGREEVPPPPPTPTIFSTASFQRFLPVSPHTSSQLLAVRARTAISIPSSSPPATRDNEVPSERLEPKXSKLXGVYWSLKERYSTRLNPHEKVKLDNEPMALFMDGYFRDLFKIP

SEQ ID NO: 284825 - protein, 79 aa, Zea mays
  Clone ID: MRT4577_22863C.1.pep
ALNSNISTHQTKNIYSAGRRHLTGCNCDSVLSFHDTPGAPSQFAVDIQGRPQAYMCVKTETVFQIKPIYLLKGNSISDR

SEQ ID NO: 284826 - protein, 50 aa, Zea mays
  Clone ID: MRT4577_22864C.1.pep
WGIGRLTMGFLWRRREARMARDPDRPSRLPIVWGDERARPGGPPNSAAEV

SEQ ID NO: 284827 - protein, 181 aa, Zea mays
  Clone ID: MRT4577_22865C.1.pep
MGLAFGKLFSRLFAKKEMRILMVGLDAAGKTTILYKLKLGEIVTTIPTIGFNVETVEYKNISFTVWDVGGQDKIRPLWRHYFQNTQGLIFVVDSNDRDRVVEARDELHRMLNEDELRDAVLLVFANKQDLPNAMNAAEITDKLGLHSLRQRHWYIQSTCATTGEGLYEGLDWLSSNIASKA

SEQ ID NO: 284828 - protein, 181 aa, Zea mays; identical to SEQ ID NO: 284827
  Clone ID: MRT4577_22866C.1.pep

SEQ ID NO: 284829 - protein, 181 aa, Zea mays; identical to SEQ ID NO: 284827
  Clone ID: MRT4577_22867C.1.pep

SEQ ID NO: 284830 - protein, 55 aa, Zea mays
  unsure (1)..(55): unsure at all Xaa locations
  Clone ID: MRT4577_22868C.1.pep
EIQVTELLDKLDFYVLPVLNIDGYXYTWTKSRFWRXTRSTHPGSSXLGTDPNRNF

SEQ ID NO: 284831 - protein, 165 aa, Zea mays
  unsure (1)..(165): unsure at all Xaa locations
  Clone ID: MRT4577_22869C.1.pep
PFCYEDLFFSQPPIPFYHIAFGGVLSTVGGLENLXAAKKFFASTIRLSGGRDSKALFGVCLGSSAIFPLPKARNKEPEGSALQSLSAKVLLINFNPPAPSNGAPSLSACYMWHEPRLVSCWLSPFGLSCFVRVVSLILCGLILVFFCGPGPPLVPWFLSKVLPKT

SEQ ID NO: 284832 - protein, 50 aa, Zea mays
  Clone ID: MRT4577_2286C.1.pep
FITFYIKLHKYEHYIKCSFPCGLQLCSWEVIRRKLFSLVYIYIYIYIYIC

SEQ ID NO: 284833 - protein, 117 aa, Zea mays
  Clone ID: MRT4577_22870C.1.pep
GREKTALWEQKNKFCTKGTGAPFLQTQLKKLAPGSGGPGKKGILGPIAPKAFKTGSGQPKFTKQHGPQQGKGQYAQQRPGGRFSGGKKGSGFLKTPKNQKKLLAGAHAHGSGAYIGI

SEQ ID NO: 284834 - protein, 228 aa, Zea mays
  unsure (1)..(228): unsure at all Xaa locations
  Clone ID: MRT4577_22871C.1.pep
MASNYTVRKVAAPNTLEHRVYVEKDGQPVSPFHDIPLYANQEQTILNMVVEIPRWTNAKLEISKEELLNPIKQDIKKGKLRYVRNCFPHKGYLWNYGAFPQTWEDPNTVHPETKAKGDNDPLDVCEIGELVGYPGQIKQVKXVLGVMALLDEEETDWKVIVIDVNDPLAXQLNDVEDVERHLPGLLRXTNEWFRIXQIPDGXXPENQFAFXGECKNKXYALDVVRECA

SEQ ID NO: 284835 - protein, 72 aa, Zea mays
  Clone ID: MRT4577_22872C.1.pep
THPGIHTPQILCIHTVLVGYEFQDVYFKDSVYTKYLQSMTFICVGYQCVYLYLKCIYCYKSILYYILFTLRL

SEQ ID NO: 284836 - protein, 73 aa, Zea mays
  unsure (1)..(73): unsure at all Xaa locations
  Clone ID: MRT4577_22873C.1.pep
PLGITAXPLPPXHTFXXMRLXKGCXTSRKFLPXGXGXDAIHEGPSNGWIEEXXTSIXANVPXPXXVFTGVXXL

SEQ ID NO: 284837 - protein, 103 aa, Zea mays
  Clone ID: MRT4577_22874C.1.pep
MEELAAVTRSLGLDPSDQELNDMMSEDGDGDEELKEAFEVLDKDQNGFISPVELRTVMTSLGEKMTDEEVEQMIREADTDGDGQVNYDEFVLMMKNAERKISG

SEQ ID NO: 284838 - protein, 154 aa, Zea mays
  Clone ID: MRT4577_22875C.1.pep
MDGLTVEQRLAFQEAFSLFDKNGDGCITMEELAAVTRSLGLDPSDQELNDMMSEVDTDGNGIIDFQEFLSLIARKMKDGDGDEELKEAFEVLDKDQNGFISPVELRTVMTSLGEKMTDEEVEQMIREADTDGDGQVNYDEFVLMMKNAERKISG

SEQ ID NO: 284839 - protein, 161 aa, Zea mays
  Clone ID: MRT4577_22876C.1.pep
SVTSAQPSGRHAADFFSLFGHFSSQPCMRVRGASYFFPCPVASGQQQLRAQFFLSQPHSTAVCAAFCSCDRSLCHPRSKKNIFFVTSVQKCEGYRARRTCLLRSSFSFVVRSHRRRHLVLIFLAHGISAVHFFRILRQKFEFFWRLPSAVSGSLTTLVRAS

SEQ ID NO: 284840 - protein, 154 aa, Zea mays
  Clone ID: MRT4577_22877C.1.pep
MDGLTDEQRLAFQEAFSLFDKNGDGCITMEELAAVTRSLGLDPSDQELNDMMSEVDTDGNGIIDFQEFLSLIARKMKDGDGDEELKEAFEVLDKDQNGFISPVELRTVMTSLGEKMTDEEVEQMIREADTDGDGQVNYDEFVLMMKNAERKISG

SEQ ID NO: 284841 - protein, 176 aa, Zea mays
  Clone ID: MRT4577_22878C.1.pep
MTVIDILTRVDAICQKYDKYDAEKLNGANVAGEDPFARLYGSVDAEISQCVEKAEAARQEKNRATVVALNAEIRRAKAKLLEEDLPKLQRLALKKVKGLTKEELATRSDLVAALPDRIQSIPDGSSSATKKNGGWGASGSRPGGGVKFDSTSDGNFDDEYFKGTEESNKFRQEYEM

SEQ ID NO: 284842 - protein, 153 aa, Zea mays
  unsure (1)..(153): unsure at all Xaa locations
  Clone ID: MRT4577_22879C.1.pep
VVLFVXHGXRCRSXNFWPXSPRCPGCVGLPEDVAITDRALRRRFAVLAVASTGECWSPGKEVDVARRVIRSWATKNGLKGLPVAALGASSGGYFVSRLAAKMSLAAVVIMIAEGAFASSAGALPAAYPSAWSEAATSFIRTGMEENATGMEET

SEQ ID NO: 284843 - protein, 84 aa, Zea mays
  Clone ID: MRT4577_2287C.1.pep
SSFFFFFFFFFFFFFFFFFFFLKNGTGFYILFGGFLPGLLLFLGQGVRICPTAKAEIALVSKRNLIKNNWGGKKKICSYIKLGL

SEQ ID NO: 284844 - protein, 131 aa, Zea mays
  Clone ID: MRT4577_22880C.1.pep
IPVQALGSGSGGSITDYLMRLMPGIASMNEMPIADRDPSFIGSCARLYRAVCYLLPTRCACVSRSSMPGLVICSLKSDRNLPRLSLHQKELLLLLVLYCRFSPLKKMIITEQSGDMCIDYAATILQLMLTI

SEQ ID NO: 284845 - protein, 137 aa, Zea mays
  Clone ID: MRT4577_22881C.1.pep
PNAKYRGVGQGGLRPRPSLSPPSSWTVWPSTMAATTCPCSSTATTWVASSRRSMYERTVDHAGHARNAHSTLADMSEGDIHTDTVRKPGSHTLHLLIENGRVEMHTVPLRENPAAEGNSQTHAGSAGYDHDYDPLHG

SEQ ID NO: 284846 - protein, 71 aa, Zea mays
  Clone ID: MRT4577_22882C.1.pep
MNLVLVVLAFIALISSVSCTQTRSCIFHQQQIHHHLHHPHQHHPQKHQHQLQPQHHHHQRHLQQHFHILPH

SEQ ID NO: 284847 - protein, 46 aa, Zea mays
  Clone ID: MRT4577_22883C.1.pep
LTDLLNLNMRDCTDRIMALFIWSGGSGIHPRSKARTAIGHITDPSQ

SEQ ID NO: 284848 - protein, 105 aa, Zea mays
  unsure (1)..(105): unsure at all Xaa locations
  Clone ID: MRT4577_22884C.1.pep
LTGTHLRRSTSFFWSLATIAAQVRQGPLGMKSHSSSAMSASRAPWRLIENTRRRTRFLIRPGQRTHMNGGRRGPLDWHHHTRCLALGRRSRSMXGAAEARWGQMV

SEQ ID NO: 284849 - protein, 172 aa, Zea mays
  Clone ID: MRT4577_22885C.1.pep
MTAPLLTLVLLLLTSSVAVACASADPKGDLKRIRVYMHETMSGPNATLLTSVQSPLGGSATFGQIGVLDNELRDGLHRGSSSPLGRFQGLFAMTGLANTPGLLSAVDVVFTGGKYQGSTLAMLGTIQDLRASVERTVVGGTGAFRMARGYSSMVYIPEASTANNDVYRIDLC

SEQ ID NO: 284850 - protein, 50 aa, Zea mays
  Clone ID: MRT4577_22886C.1.pep
KKNSRLDNDLNPLKNYCQIKSNVFAWGCYIKKKKKKKKKKKKKKKKKKKK

SEQ ID NO: 284851 - protein, 86 aa, Zea mays
  unsure (1)..(86): unsure at all Xaa locations
  Clone ID: MRT4577_22887C.1.pep
MAAKILSRVMLLALSAPVANTTIVPQYSQAAMSALVPPYLPSMTASVFENPALQPXQLQQAIVAGNLPFSPLVHSQSTSLSLVQSL

SEQ ID NO: 284852 - protein, 577 aa, Zea mays
  Clone ID: MRT4577_22888C.1.pep
MGAAPPSSWLIAFILFFGTLVALPQSSHGGGTTRHYTFNVTMKKVTRLCTTRAIPTVNGQFPGPKIVTREGDRVVVKVLNNVKDNVTIHWHGVRQLRTGWSDGPAYVTQCPIQTGQSFVYNFTITGQRGTLFWHAHVSWMRATLYGAIVILPKRGVPYPLPVKPYKDVPVIFGEWFNADPEAIVAQALQTGAGPNVSDAFTINGLPGPLYNCSSKDTFKLKVLPGKWYLLRLINAALNDELFFSIANHTLTVVDVDAAYVKPFHTDIVLITPGQTTNVLLRAEPDAGCPAATHLMLARPYGTGQPGTFDNTTVAAVLEYAPPGHIRSLPLFRPSLPALNDTAFAANYSARLRSLATPDYPANVPRAVDRSFFFAVGLGTNPCPVNQTCQGPNGTMFTASMNNVSFNMPTTALLQAHYGSVAGVYTPDFPVAPLEPFNYTGTPPNNTNVSHGTKVVVLDYNTSVEVVLQATSILGAESHPLHLHGFDFFVVGQGFGNYDSSKDPPKFNLVDPVQRNTVGVPAGGWVAIRFFADNPGVWFMHCHLEVHTSWGLKMAWVVNDGPLPEQKLMPPPADLPKC

SEQ ID NO: 284853 - protein, 44 aa, Zea mays
  Clone ID: MRT4577_22889C.1.pep
GYPRLASCPTPPPFPGHYSPLAVREPTDPSPTTPLPQNILDNTR

SEQ ID NO: 284854 - protein, 323 aa, Zea mays
  Clone ID: MRT4577_2288C.1.pep
MMQQMQQEQWNAAAAGLLRPTKSAPCSPIKPAAAAAMLRTHSDSFHVAHKVPVGDTPYVRAKRVQLVDKDPEKAIALFWSAINAGDRVDSALKDMAIVMKQQNRAEEAIEAIKSLRSRCSDQAQESLDNILLDLYKRCGRLDDQISLLKHKLQRIHQGHAFNGKRTKTARSQGRKFQVTLEQEATRLLGNLGWALMQKENYTEAEGAYRRALLIGPDNNKMCNLGICLMKQGRVLEAKDVLKQVRPAGVDGLRGADSHLKAYERAQEMLRDLETKLVGRPRADQLDTNWLYDALLLGSSSSIWQPQPCIDQLFAAVVARSQVT

SEQ ID NO: 284855 - protein, 88 aa, Zea mays
  Clone ID: MRT4577_22890C.1.pep
HKAGDCIWTVLKGRVYNIAPYMKFHPGGVDMLMKAAGKDCTALFSILLLLFLHCDTLSCCLWAHTGTPFLLLCKLVWPKGMIYKQRSL

SEQ ID NO: 284856 - protein, 81 aa, Zea mays
  unsure (1)..(81): unsure at all Xaa locations
  Clone ID: MRT4577_22891C.1.pep
AYIHISPKRSKWLGYNVEEREQHIKDMLKYIDDFGDSLAIRAETYYKRRPLLVNHAEIFYRNYRXLVERYDHLTDNLCRSI

SEQ ID NO: 284857 - protein, 117 aa, Zea mays
  Clone ID: MRT4577_22892C.1.pep
MTTRYKKKSPSLSVGDISKEIGARWKKVSDDVRKRYEQKAAVEKQKYEVRVAEYKKSGGGGASSSPAKGGKGAAKGGSKKAAPAKGGKKKPAAKSKSSDEDNDDDDDDDDEDEDDEE

SEQ ID NO: 284858 - protein, 40 aa, Zea mays
  Clone ID: MRT4577_22893C.1.pep
TFRNLSYKVYFIKLKKIKLRMFSIKKKKKKNILRGILNNI

SEQ ID NO: 284859 - protein, 157 aa, Zea mays
  unsure (1)..(157): unsure at all Xaa locations
  Clone ID: MRT4577_22894C.1.pep
VKAAISFIKPXSFCYTXACPNVIGDRQCGKKVTKSDSGNWLCDKCNQEFPECDYRYLLQLNIQDHTGTTSVTAFQDRGQEILGCSARELNIFKENKDPRYTDVLINCLYQNYLFRLKVKEEQYGDVRQVKNTVAKVERVDPLAESKFLLDSISRFIP

SEQ ID NO: 284860 - protein, 72 aa, Zea mays
  Clone ID: MRT4577_22895C.1.pep
SVSSAILRCQSWSGRCVSTCYRRSPCPVQSLQREASERPARNATGSYSSHDDDHVSSRGRLKYCGPHMPLTR

SEQ ID NO: 284861 - protein, 39 aa, Zea mays
  Clone ID: MRT4577_22896C.1.pep
TIGLNEKNGCSENKEKSLPKPIPLIPVSTSKSSCGALSP

SEQ ID NO: 284862 - protein, 88 aa, Zea mays
  Clone ID: MRT4577_22897C.1.pep
FGPPPVFPGKKILLLPNFGGSAPFFYSPPPFFGFSGVFFSPPVPYFECLNLFLALFFFSPVFGVPILPPCWVIPGGCPAPYGRDPFAV

SEQ ID NO: 284863 - protein, 77 aa, Zea mays
  Clone ID: MRT4577_22898C.1.pep
FDMGFGQPTPGAPRLPADYAGWMGDIKPLSDLRDTYKADTGFYVEETARVAHDHSWNHGKPLLLVLHGRNTDSGNFS

SEQ ID NO: 284864 - protein, 38 aa, Zea mays
  Clone ID: MRT4577_22899C.1.pep
AITETDLMLIQWAIIQLMHKNDEDLTSCYCTCGFSRLP

SEQ ID NO: 284865 - protein, 485 aa, Zea mays
  unsure (1)..(485): unsure at all Xaa locations
  Clone ID: MRT4577_2289C.1.pep
MMQQEPWNAAAAMGLLRPTKSAPCSPIKPPPATMLRTHFHVAHKVPVGDTPYVRAKRVQLVDKDPEKAIALFWSAINAGDRVDSALKDMAIVMKQQNRAEEAIEAIKSLRSRCSDQAQESLDNILLDLYKRCGRLDDQISLLKHKLQLINQGHAFNGKRTKTARSQGRKFQVTLEQEATRLLGNLGWALMQKENYTEAEGAYRRALLIGPDNNKMCNLGICLMKQARVLEAKDVLKQVRPAAVDGLRGADSHLKAYERAQEMLRDLETKLIGRPRADQLDTNWLFDALLLGSSSSIWQPQPCTDHLLPPPVPAPATAPRGHFADENAGVSKKLAVLQENMLNVDAQPFYSLRVSSLAAKSHNTLPQRQQQQKPAPVHDPLGNLKRTRSGNXGQGRSSGVQGAEHXDENSGRRKSLSAEDRWPELPDHSAFDEALVAAVLAPVLDDEPTATEVKLPASCGTSPAVKEKIGKRLRIFQDITQTVNSF

SEQ ID NO: 284866 - protein, 535 aa, Zea mays
  unsure (1)..(535): unsure at all Xaa locations
  Clone ID: MRT4577_228C.1.pep
MATCSRPLFVSDSAASASPSRASFRRLHTVAVVSIWEPLPHPPLRAAACRFARTKQCSRRSTECLASGPSVSRLTRPIRRMLSRYSSLMVTLHGNLSRCYKAMSALRPDGVSRHFMSAGGFERVVLGVVLVMSISGASYTAPSSSALTEENLLFLEAWRAVDRAYYDKSFNGQSWFRYRENALRNEPMNTREETYAAIKKMLSTLDDPFTRFLEPEKLKSLRSGTQGALTGVGLSIGYPMAINGSPSGVAVMTATPGGPAEKAGILPGDTILAIDNRSTEDMDIYDAAERLQGPEGSSVDLSIRSGTNTRHVVLKRQTVNLNPVRSRMCEIPGSKDSSKIGYIKLTTFNQNAAESVKEAIKTLRDNNVKSFVLDLRNNSGGLFPEGIQIAXIWMDEGVIVYXCDSQGVRDIYEADGADTIAASEPLVVLVNKGTASASEILAGALKDNKRAVVYGEPTYGKGKIQSVFGLSDGSGLAVTVARYETPAHTDIDKVGVIPDRPLPASFPTDEDAFCSCLRDSTAACNLNAAQLFAKS

SEQ ID NO: 284867 - protein, 118 aa, Zea mays
  unsure (1)..(118): unsure at all Xaa locations
  Clone ID: MRT4577_22900C.1.pep
FWDTSPIPLHGGYALLLVGTLEWNRYRQNLQVHKQGVALDRSMDLSRCTDXGELKAELDMMFEFEGELVSANQNWQIVYTDNEGDMMLVGDDPWENLMWLCMMYFIFWHTMHKNKCLL

SEQ ID NO: 284868 - protein, 59 aa, Zea mays
  Clone ID: MRT4577_22901C.1.pep
KFPSSTTCILQSLNPLWFDAYLNFLKLQLQLQSLIFQRHPFILQLHFLQLPVLFLAELQ

SEQ ID NO: 284869 - protein, 98 aa, Zea mays
  unsure (1)..(98): unsure at all Xaa locations
  Clone ID: MRT4577_22902C.1.pep
YPRARRDSLVGSARFLIGXDHRLLSPPGGSPSMFAVGVRRPSGRVHGLLNVAASLVAVPPSPAACHALRLSPAVSLIGGGGGPTPSRVLRVLNRAHRI

SEQ ID NO: 284870 - protein, 63 aa, Zea mays
  unsure (1)..(63): unsure at all Xaa locations
  Clone ID: MRT4577_22903C.1.pep
MVKTKIFFLSPPPPQMSYEKEKKNKKXNKMKKKKKKKKKKKKKKKKKKKKKKKKKKKKKKTQH

SEQ ID NO: 284871 - protein, 289 aa, Zea mays
  unsure (1)..(289): unsure at all Xaa locations
  Clone ID: MRT4577_22904C.1.pep
ARITSSRCGNDDDVLTLFANLNMQQKXKLNELIGDIHDKDELLDTQEDFLIKENKKHVKVKNAYAQEIEKCENLTSELSTCHDTISNLRNXNAKLIAKVEKLDISDDSIVNLRNDNDNLITKIDKLNASLTSLKIENEKLIAKAKELNICNDVISNIKNENVMLHAKIDELNVCKPSTXSTIEHVTICTRCRNXNIDDIHDHLALIKHQNDHIAQLSAKINEHDLENEKFKFARSMLYSGRRSGIKDGIGFQKVDNVKLNAPKRLSNFVKGKVQKAXDNEGYILYPAGY

SEQ ID NO: 284872 - protein, 67 aa, Zea mays
  Clone ID: MRT4577_22905C.1.pep
LTSVWPSLSVPLAHPDLLGEVGVGAQPSNPRMIVSLLPSLSLATETVVSSRYNSCLQIIRPDSAPGA

SEQ ID NO: 284873 - protein, 111 aa, Zea mays
  unsure (1)..(111): unsure at all Xaa locations
  Clone ID: MRT4577_22906C.1.pep
SVGSCVIDGKNYXTFGSKNRIWVFDPIAMVWDRLKGLDDLPDKRDGSRMSNLGGNLAIMFNLEKGSTKICCTEIRLERREGGKIWGTVLWSNIVITLKEPSTIVRCLTVTV

SEQ ID NO: 284874 - protein, 139 aa, Zea mays
  Clone ID: MRT4577_22907C.1.pep
ISKKKKKKKKKKKKKKKKKKKKKKKKKKKKKKKTQKKKKKKKKNFCLPRGAFKRGNFCNFPSPGGPFDLPFRGPISPFRGGFKISWAGFLNRGAGKTLGVPHFNRLEEIPLFPIWVITKKPPPYPLSKHFPTLIGNCPP

SEQ ID NO: 284875 - protein, 79 aa, Zea mays
  Clone ID: MRT4577_22908C.1.pep
KGFHFFFQGGRVVYVITPRWFCLRHGGRFGLWGETGQFRVVFSVPKEGVGSLVLLNQRLVFLLNRICFFVRKPRGGVLQ

SEQ ID NO: 284876 - protein, 190 aa, Zea mays
  Clone ID: MRT4577_22909C.1.pep
QTINILEKSMCSTPICDHDMIRSRGAGRWYKIKVVLGSREDGDDVAAACMDELPVNARCFHAHACGQCPSFSLNRADVVPPRAQSDRCGPGPGIGSHSISLLDYDGIQTFQQARKFCDAKHRFNVVRTFLQTHHPMSNPKPDNGTHCCVISATVADIAPRSCFPTWRFHVFVPFLYSKSNIFCCSNHMYI

SEQ ID NO: 284877 - protein, 587 aa, Zea mays
  unsure (1)..(587): unsure at all Xaa locations
  Clone ID: MRT4577_2290C.1.pep
MMQQMQQEQWNAAAAGLLRPTKSAPCSPIKPAAAAAMLRTHSDSFHVAHKVPVGDTPYVRAKRVQXVYAFMRFLISSRGWVRFDLVWISSAAVQLVDKDPEKAIALFWSAINAGDRVDSALKDMAIVMKQQNRAEEAIEAIKSLRSRCSDQAQESLDNILLDLYKRCGRLDDQISLLKHKLQRIHQGHAFNGKRTKTARSQGRKFQVTLEQEATRLLVSALISHNFLLNKAXSNSNTWPLQASSFKFIHSTTQVLNLCSLVINLVVQGNLGWALMQKENYTEAEGAYRRALLIGPDNNKMCNLGICLMKQGRVLEAKDVLKQVRPAGVDGLRGADSHLKAYERAQEMLRDLETKLVGRPRADQLDTNWLYDALLLGSSSSIWQPQPCIDHLLPPXSGINPSPGXAPRDHFADENAGLSKKLAALQANMLNVDAQPFYSLRVPPLAAKPHNTLPQQKPHSTLPQQQQQKKKPAPVHDPLGNLKRTRSSNCMDKAGAVVDKAQSIDENSGRRKSLSAEDRWPELPDHSAFDEALVADILGPVFDDKPTAAGTNGHGKLPASCDTSPAAKEKISKRLRIFQDITKTVNNF

SEQ ID NO: 284878 - protein, 76 aa, Zea mays
  Clone ID: MRT4577_22910C.1.pep
KTTRTRPKPYCSRSAPAWTRSLSTTPLSTSTGGASEERQQARAIRALNPNGEELNTPAVLHMNINAHEASTALTEH

SEQ ID NO: 284879 - protein, 52 aa, Zea mays
  Clone ID: MRT4577_22911C.1.pep
IRARPKLVVVNRTWLLIVPLSEVSQRLMMYHSFKTRFVSCDLNHLICTTTAG

SEQ ID NO: 284880 - protein, 397 aa, Zea mays
  unsure (1)..(397): unsure at all Xaa locations
  Clone ID: MRT4577_22912C.1.pep
MAIRITVSYSGYVAQNLAASLGHRFSSASASGSRLLHDGAWRPFCIFTSTRQPEQHRSSGSDRHDGGDYNHPKPQAIAAGAHSLLLTRACLSSKSPPPSLAVGLLSVLAQRTGPTPGTTGSAASLSVSSPISLGFNPTSFLPFLQTARWLPCSDLATSSSSAPSSPPRSLAPSAPPKKALIGASAGSTGIATSSGAGAAMSRSNWLSRWVSSCSDDAKTAFAAVTVPLLYGSSLAEPKSIPSKSMYPTFXDVGDRILAEKVSYIFRDPEISDIVIFRAPPGLQVYGYSSGDVFIKRVVAKGGDYVEVRDGKLFVNGVVQDEDFVLEPHNYEMEPVLVPEGYVFVLGDNRNNSFDSHNWGPLPVRNIVGRSILRYWPPSKINDTIYEPDVSRLAVPSS

SEQ ID NO: 284881 - protein, 74 aa, Zea mays
  Clone ID: MRT4577_22913C.1.pep
NEIRKSSELVKKAYADESTSGNKDQDMILLPYREANVLVLIEKMEHLEQIVKVASNTIIEKDLILSKLQILIQY

SEQ ID NO: 284882 - protein, 61 aa, Zea mays
  unsure (1)..(61): unsure at all Xaa locations
  Clone ID: MRT4577_22914C.1.pep
KHGSKTADSRVAPIQESMGPTYAGRFNLGYIVATVYSQHCYDPPGDFFSGHRAVALKINLX

SEQ ID NO: 284883 - protein, 430 aa, Zea mays
  Clone ID: MRT4577_22915C.1.pep
MEKEKLSFSISSSKQRPPKPPARPAAAADDDDLRSAPAPGQQYVTEFDPSQTLAAACAARAVIAPLPNSGNFLTHRPRKPSSLPTPEEEAALAAESGGWGPAFVLDTSTAPEDPSSKIGYGLTRRNGATDAAAAKEPEKAPPPSPPRATDAASAAGNLMLQRYKEDMEGLPEHRGMDEFNEIPVEGFGAALLAGYGWTEGKGIGRNNKTGDTKVLEYDRRAGTQGLGYNPSEADPRKTRSGDWIVGKKVSENGSTKRDRGSRDRMEESDSSAQKKRYNEERSEKEGREKVRNGRGSREGTSNASDTHSNVRWLQSHIRVRIVSQKLSKRLYLMKGKVVDVVGPTKCDIMMDDGSELVQGVEQDMLETVLPRTNGRVLVLYGKHKGLYGHLVEKNSKEEIGLVEDADTKDIVRVRYDQMAEYTGDPELLGY

SEQ ID NO: 284884 - protein, 42 aa, Zea mays
  Clone ID: MRT4577_22916C.1.pep
PQFDPNRGPQSFITPLPLLHIPKNPLYVTNPLPICSPHNLQT

SEQ ID NO: 284885 - protein, 115 aa, Zea mays
  Clone ID: MRT4577_22917C.1.pep
SSASFARVGILDSVHESLGTQELLNGAIPPPRFHLLPWTGSTTSLLLVSSVPSSYSIREKHQSGRGTEHRMAVVRDAGEPYRRRAEAAAVAQHRRSEMCLGLSNDESMAEITSWG

SEQ ID NO: 284886 - protein, 63 aa, Zea mays
  Clone ID: MRT4577_22918C.1.pep
QSRQQDILSACRSVVFQSIRFLKTSGFTYRSQQTGSDVTAATVELSKVMQRKILILSSIFPLL

SEQ ID NO: 284887 - protein, 87 aa, Zea mays
  Clone ID: MRT4577_22919C.1.pep
QNGFSSPPLVQMRGHPFFQQSKGQLLMVCLDPSRVFVPQPNLNLVPPWPLTLFLSQRTRCFLSDTGSFSFACPVLPNWACFSPKELT

SEQ ID NO: 284888 - protein, 39 aa, Zea mays
  Clone ID: MRT4577_2291C.1.pep
SLSRVPHITFFTSSIAVDECPYFQMLWHTYKSSFFQTLN

SEQ ID NO: 284889 - protein, 98 aa, Zea mays
  Clone ID: MRT4577_22920C.1.pep
CSRPSLSTAISWDHLSCLGSSHMLPRVACTSRSFSRASFHARLLRYQRQLMKTRQSFSLILMISWHHMSLSSMLTSCGCIRMLVSVLFLLLVWRINLL

SEQ ID NO: 284890 - protein, 135 aa, Zea mays
  Clone ID: MRT4577_22921C.1.pep
PRVRRIPESFADMPSLSVLRLAYNRLEGRFPMRIFQNRNLTVVDVSYNSKVSGLLPNFSSASIMTELLCSNTNFSGPIPSSISNLKALKKLGIAAADDLHQEHLPTSIGELRSLTSLQVSGAGVVGEIPSWVANL

SEQ ID NO: 284891 - protein, 68 aa, Zea mays
  Clone ID: MRT4577_22922C.1.pep
QATGAAGASPPPPQKGQTRNNNQRSTQHIDGHTRPEPNGVQRRHRSWFLGQTQPRHISKHPPPPPGRA

SEQ ID NO: 284892 - protein, 40 aa, Zea mays
  Clone ID: MRT4577_22923C.1.pep
FSWIFRAMDGLPVTMRLLHPPLHEFLLELNIEDIVSELSC

SEQ ID NO: 284893 - protein, 214 aa, Zea mays
  unsure (1)..(214): unsure at all Xaa locations
  Clone ID: MRT4577_22924C.1.pep
INQGLLLHLPPEINNLITVYLILVVVFFVVFLFSPPPPPPPPPPPPPKKNIPSPWKGRSSAARRGPSQGRTPSPPRPTSTTGSRSGPRAAPPRRARRSPRRRPMPAGPRAARARAAPGTRRPPPLPPREAPXPPRHAAPXTPPTAPXPSPPARHCFGASGDDVVAVVSMTSALLELAAAGLAPGPRKALGLAARSGRALAARHGTSSSSMAGCL

SEQ ID NO: 284894 - protein, 45 aa, Zea mays
  unsure (1)..(45): unsure at all Xaa locations
  Clone ID: MRT4577_22925C.1.pep
ISASSTRLMSGYRLVNVIWYWLCISCIYSRRMRFLCXVMQFEFLV

SEQ ID NO: 284895 - protein, 197 aa, Zea mays
  Clone ID: MRT4577_22926C.1.pep
SKSAFEHLKYLESLNLEDTPLSAEVIPPLASFATLKYLYLKSDFLSDPALHALSAASNLIHLGFRGNILSSFGLLQFVPPVTLCVLDLSGCWILTGDAISTFRKRHPTIELRHELLHEVEENFVGGSQFRKPRRRRSPHVKAEVGNSFAGSSRLHDIRFVDERIKYSKEEFVELQGLAKPNSLMLGVWLPPELRRPK

SEQ ID NO: 284896 - protein, 93 aa, Zea mays
  unsure (1)..(93): unsure at all Xaa locations
  Clone ID: MRT4577_22927C.1.pep
TVSELPGAEPAPARSVVIRRFFTARASLRKGAVTDVVAMAAIALLAGCAMAHEVLLGACYGGLVFXPIQFTFKAGDTIIFKNNAGFPHNVYFD

SEQ ID NO: 284897 - protein, 52 aa, Zea mays
  unsure (1)..(52): unsure at all Xaa locations
  Clone ID: MRT4577_22928C.1.pep
FHSRGNPTHPGRSRTGRAQPPVACLPSTPPKAIGSRDRXVPRLMTGILKIFS

SEQ ID NO: 284898 - protein, 91 aa, Zea mays
  Clone ID: MRT4577_22929C.1.pep
RRVRRRWRFRLPYPIRESGGASDDEEEDIRKIGENLVQTQALMNALAYSLKNVLQKVMPELWKDINHKIHQNWIYNWIFLTLLVSTYDYAL

SEQ ID NO: 284899 - protein, 139 aa, Zea mays
  Clone ID: MRT4577_2292C.1.pep
PPTQPALPTREVIISSRPSHSKHQFSSPPPRPLFPSSRSIIFHAAASGRWSLIRALRGARKDQNMTRTSSASVPGTRNARRSPPALPRLRRPRAPRCCAPGAETRPHAAGARPRPVPTHWRRGPAPPNRAVKTARGQQV

SEQ ID NO: 284900 - protein, 205 aa, Zea mays
  unsure (1)..(205): unsure at all Xaa locations
  Clone ID: MRT4577_22930C.1.pep
RVDPAFCARGLLEXVIDDHRRRPRSGEEGGDRDFVDVLLDVHNKDQEHGIQLETNEIKAIILDMLGGGTDTIATAMEWAMAELVTHPRAMRRAQDEVRAAAAGSTGVNEDHVAQLDYLKAVLKETLRLHAPLPLLVPREPAADTEILGYHVPARTRVLVNAWAIGRDPATWERAEEFVPERERDAVAGHDRDERISRAYQLRSSA

SEQ ID NO: 284901 - protein, 170 aa, Zea mays
  Clone ID: MRT4577_22931C.1.pep
RARGPSGGGQWNEPQHGSPTSCGRQDTSCRRQVALWSKISPCKRITRCSFRRPCGIYWMEEYDAASVSLVSTRLSSRRHTSGWSPSHSSWSSHQWWLCCSGGLPSSKRVNAETLTFHHVLTSRLVKIVGKRYAVRSEEVSGRPVSGSLVVRLLLPSPFSRGKSRPASRYP

SEQ ID NO: 284902 - protein, 128 aa, Zea mays
  Clone ID: MRT4577_22932C.1.pep
YHVPARTRVLVNAWAIGRDPATWERAEEFVPERFLGGAAAADVGFKGQHFELLPFGAGRRMCPGIAFAEGSAEMALASLLYHFDWEAASRGQNGKGTLSLDMTEMNGLAVHINSGLPLVAKPWIPFKN

SEQ ID NO: 284903 - protein, 66 aa, Zea mays
  Clone ID: MRT4577_22933C.1.pep
RMLVVAGRSGSTPGLMAEQLGVPAATLSFHLKELMHAGLVTQERDGRNLIYRTSFEQMNALLGFLT

SEQ ID NO: 284904 - protein, 71 aa, Zea mays
  Clone ID: MRT4577_22934C.1.pep
NMWVSSGWCHGHSEGDSDGVYIPVLLAWKLILMELQCSNCIAHVCKHHLCSAIWKVIPFLVDSKAFQITSF

SEQ ID NO: 284905 - protein, 239 aa, Zea mays
  Clone ID: MRT4577_22935C.1.pep
MEAAMQTILVGMAHMEFRLTAALAGSGGEQASTSSSFASLFGSFESESAPPPVLYDCYDEPNDDEIAEVLALLEYNEGTSSATVLVDCNTTSKSPTKCSTMEFSDADSSARTRAVTYDEPSFHRFIPPPFRAGETNEEEDSSAEEAMAAMGAVASPSPFLLTVGNLLLPYLALPPTHAAVVDEPYRDAKAARALAETDKAKGCATMEAAAAVQKLAESVVPLHLTTELRQRGPVDIEAN

SEQ ID NO: 284906 - protein, 65 aa, Zea mays
  Clone ID: MRT4577_22936C.1.pep
LAMLHEMHKLPELRRDNHAQVVLTNNRRRASYTALEIQATWITYNDFNSNQITLTIKSYANRNVI

SEQ ID NO: 284907 - protein, 112 aa, Zea mays
  Clone ID: MRT4577_22937C.1.pep
QRPRPRGDILAVGGSSICAPSQHTCTYLVFIYLSYYFSPTNFRFYNIYLLCRSPLTQLSSAPLASREKAPIGHLRPGHRCRLLPSYHHHSMLPPHHAAFTAQFLIHNVKHVI

SEQ ID NO: 284908 - protein, 49 aa, Zea mays
  Clone ID: MRT4577_22938C.1.pep
TWGERQGKKFISVNFPSVDIVNPDHGGVEKLWLERERSPGHTTLPDKLS

SEQ ID NO: 284909 - protein, 85 aa, Zea mays
  Clone ID: MRT4577_22939C.1.pep
CFPMPCRPPEGPSVQRWSARPQGGQEQRETPCALGRLQHEPAQEPPTPHGSGGPQGLRGSGLRRSYQGRTQPLLRARGRGSRCWR

SEQ ID NO: 284910 - protein, 147 aa, Zea mays
  Clone ID: MRT4577_2293C.1.pep
PKGPPEGRFFNGKQKNLARSISLKKKGKKSPGLGKTPGQTEKKKLSGQFFGGEPMGTHLIKIPEKRPPGLGHLKGLAPQFKGPFPKFLPRAPPKEPKEKAPPGVPPNFVLNFNPDPPFFSLEGEFGLLAGKKGPFKNRDPPQNGPQG

SEQ ID NO: 284911 - protein, 82 aa, Zea mays
  Clone ID: MRT4577_22940C.1.pep
FTLTLKPVNKILTDLLKAMLSLTLLPGKPLHLTFFPQLLSDAHMGAHHLYNHTRSKNRYPQIGFINMSSKRSRPSSPSQLWL

SEQ ID NO: 284912 - protein, 69 aa, Zea mays
  Clone ID: MRT4577_22941C.1.pep
ARANKCARATHGPAQGPMPCFILLLCISWAGQGMPIYLNCDADTHRCLHLAAHIYTYMLTQREINRSIL

SEQ ID NO: 284913 - protein, 259 aa, Zea mays
  unsure (1)..(259): unsure at all Xaa locations
  Clone ID: MRT4577_22942C.1.pep
APRGVEPRLFVARAAGPAQQAADAKACSALCSPAARAVPAMESFGVPPAPVAAPEKRKKPLDLKDPVPAAAAAAANGGGATKASPAAKWAEKKKLVGGDAGYVLEDVPHLTDYLPQLPTYPNPLQDNPAYSVVKQYFVNPDDTVTQKIVVHKTSARGTHFRRAGPRQRVYFQPDEVNAAIVTCGGLCPGLNTVIRELVCGLYDMYGVTSVVGIEGGYKGFYSKNTVALTPRSVNGIHKRGGXTVLGTSRGGHDTAKIVD

SEQ ID NO: 284914 - protein, 62 aa, Zea mays
  Clone ID: MRT4577_22943C.1.pep
PSPQRHGTDRRRGTRSRGIINGSRPLDSNIAGTQNHRGEPTGRPASMQAAGQSGAFQDKPSA

SEQ ID NO: 284915 - protein, 110 aa, Zea mays
  Clone ID: MRT4577_22944C.1.pep
TFSPGCFVFLGFPPLYALSFHPCRLPRLLGFSTNASSGIDIHLGSVCLVRYSFFSPPSSAPSRWVSGSRLEISNALSLFKSFNLPYACLALLDSFRFSLQHVNMSLPFFG

SEQ ID NO: 284916 - protein, 75 aa, Zea mays
  Clone ID: MRT4577_22945C.1.pep
HHLAVASTQITAEFLGAPIPPCLRVQMSEVVSFFGREARKLFHLLRPICGTPPVCKPPDAWPDALIEILKLGKPN

SEQ ID NO: 284917 - protein, 43 aa, Zea mays
  unsure (1)..(43): unsure at all Xaa locations
  Clone ID: MRT4577_22946C.1.pep
TLPLHSALISGFSIIILLXQFVYTYTKVTTDASHKHCLSFNKT

SEQ ID NO: 284918 - protein, 73 aa, Zea mays
  unsure (1)..(73): unsure at all Xaa locations
  Clone ID: MRT4577_22947C.1.pep
FHDMFEMNVERSFNYKGSLRAFTCLTIYCVLFAGLHQDVNRFPVELIEILKFGKPNEACSLPPVSSCALWXSX

SEQ ID NO: 284919 - protein, 134 aa, Zea mays
  unsure (1)..(134): unsure at all Xaa locations
  Clone ID: MRT4577_22948C.1.pep
RSSNSLEATRPTLACGGRWFFILCGAYLPKATGTDYVAMAVRAXLIDGRAMAQEGLLGSRDRGLIFYPRQFTGKADDTITCKNKSALPHNVXFHQNQVPSGIDPTKISQEXYLNLPSKTYXKTLTVPTTYGYYC

SEQ ID NO: 284920 - protein, 105 aa, Zea mays
  Clone ID: MRT4577_22949C.1.pep
MGGWNRSRHVRWQRDRPRRPPLPPPDYGPEHCSVPLWEREFCSYVGNISWQRFCENKRYASVDNTLEHWDDSGALENFQNSKARFWAHYHGQPSDIPLPDPDMYI

SEQ ID NO: 284921 - protein, 63 aa, Zea mays
  Clone ID: MRT4577_2294C.1.pep
CRSAFPLSPKRIPLSRQRWPDPVLVLLCWARGPSGRRCASTPGSLHPTVRAGSPHKLPRLTVP

SEQ ID NO: 284922 - protein, 86 aa, Zea mays
  Clone ID: MRT4577_22950C.1.pep
AMNIFISLNTHHNQRLKRQMLSSIRRNGGSGWGHSGRKPDPQSFKKPTCATSPRTSAAFFHGRSGHFRGLQKNPSSMVPRAEFRAY

SEQ ID NO: 284923 - protein, 128 aa, Zea mays
  Clone ID: MRT4577_22951C.1.pep
SHPSFFLFRGGGEKLGGAQVPSPPGGYFAPGLASVSMGGGPPKLKAPGPKGERTPPFGGASCRPQKPSLVVLNPKKGWLPGARGGALFYKLAGVCGGPARGAPRSLFFKWSRDSTNNKKNPGGVLFSK

SEQ ID NO: 284924 - protein, 69 aa, Zea mays
  Clone ID: MRT4577_22952C.1.pep
GSMDAFGSVISSCEMSLTGSVRIMSLSSICATSRSCRQFVNRCEISRSFYLRSACSCESLHIARTAMGS

SEQ ID NO: 284925 - protein, 58 aa, Zea mays
  Clone ID: MRT4577_22953C.1.pep
LRVGGWGELLLKLYIKIPHTEIPFKSPRSNQMLPLTKDREDVILPFTQLMPNTTGIIP

SEQ ID NO: 284926 - protein, 172 aa, Zea mays
  Clone ID: MRT4577_22954C.1.pep
MAGRYDRNPFDEDDVNPFAGGGVPPASNSRMPPLPHEPAGFYNDRAATVDIPLGSSKDLKQKEKELQSKEAELNKRERELKRREEAAARAGIVIETKNWPPFMPIIHHDISNEIPIHLQRMQYLAFCSLLGLTLCLFWNIIATTAAWIKGAGVVIWLLAIIYFISGVPGAYV

SEQ ID NO: 284927 - protein, 103 aa, Zea mays
  Clone ID: MRT4577_22955C.1.pep
PAGSNQHQSRRLIAKPSAPKRPHRSVPARPEWRWHRAHPPPSPPSPPAQCGPLPLSGRAPPRSAPLRRRWRVAGGGRHYWGGPGRPTTLRPRPRPRRCRRTTT

SEQ ID NO: 284928 - protein, 90 aa, Zea mays
  Clone ID: MRT4577_22956C.1.pep
RTRAPSLSRAPFTCSCGRCRPQRRRGTGTSTTVTDSISTPFACVIFTSAGAIDRRTSLLRIHAERARVAKKFHFPFCLEVARSVCFFVRV

SEQ ID NO: 284929 - protein, 93 aa, Zea mays
  unsure (1)..(93): unsure at all Xaa locations
  Clone ID: MRT4577_22957C.1.pep
MSDNSNNKPSTLQSYIDSATGAVQNAVGSMXGNSGDQAKGELRQDKAQTEYDASQAAVKLPGGTIFSTGAFAKDDPNRTEGSWNQTVGAAKET

SEQ ID NO: 284930 - protein, 137 aa, Zea mays
  unsure (1)..(137): unsure at all Xaa locations
  Clone ID: MRT4577_22958C.1.pep
TRNREFQSPKPFQGPQTKPGETQIKQGPPGVPSPPPNPLNKTAGHPXNKNPPPDPPPFFQSQXPPPGGPPLPGGGGPNTPDQKNLGKRPPAPPPAPLGGGPLGGPPPFGGLGNPHPPDTLAKKNVLAPYPGGPDGPK

SEQ ID NO: 284931 - protein, 82 aa, Zea mays
  Clone ID: MRT4577_22959C.1.pep
LKIIYNRNSMYQTPIHYNTVLCQFASNNHCGTTKQEHLTRQIKPFGSLHPGKLHNPLTFTRCWIIKYHALYTQLIVRPYYSD

SEQ ID NO: 284932 - protein, 115 aa, Zea mays
  Clone ID: MRT4577_2295C.1.pep
LKHNNMLWPYKILSATTTSHPHPHNHHTPTQKKKNQHHTLPHTYRSINTTKTQQPKTINHTRNRHTLLHISYLYHISPPLPPQVPYPLYLHITYKAIPQPTPLGTQPSCTTPNPF

SEQ ID NO: 284933 - protein, 52 aa, Zea mays
  Clone ID: MRT4577_22960C.1.pep
KPKQFMAIKIDRAKMPKDYTFSKHRGRKNLVGSLKLGTSVGQDINCAGPIVL

SEQ ID NO: 284934 - protein, 252 aa, Zea mays
  Clone ID: MRT4577_22961C.1.pep
MHPHHTHTHQRETAMAPTPEDPAADDDAEPFSPSIFLDLPPTPHPGDDGKDSMIDLHFIRRLLMEDDDVQFQYADHHALLQAAEEPFAQILAGSAGSSVSGSATADTTAIYYPDGTGFHFHQQTAGPTSTTGDDGVVTMDMLNRAFLKGMEEANKFLPVVASSTHTSLLCRDYASKHRVVDGIGMPLFFQESSGNNRRGRGCHHHHDDDGDDEADTRSAKLIAPELEESGEVTDGVFLRGYEVALEKMNGLS

SEQ ID NO: 284935 - protein, 88 aa, Zea mays
  Clone ID: MRT4577_22962C.1.pep
LHRLMMMSLLRLLMHSIPECPIPTKMMGRLLHLEVLLLLVYPRDSRRQHPHLVQCECQTFEVTKRVWIMLLTLVMKLKHHMDLHDVAD

SEQ ID NO: 284936 - protein, 44 aa, Zea mays
  Clone ID: MRT4577_22963C.1.pep
AGVKLHGTPWDMGLDCAAKVGDSESVWHISESQRQVCQTLFHFA

SEQ ID NO: 284937 - protein, 174 aa, Zea mays
  unsure (1)..(174): unsure at all Xaa locations
  Clone ID: MRT4577_22964C.1.pep
MSVVGLDVGSQSCYIAVARAGGIETIANEFSDRCTPSVISFGSKNRTIGVAAKNQQITHANNTVSSFKRFHGRAFNDPFIQKEKENLSYDLVPMKNGGVGIKVMYMDEEHFFSVEQITAMLLTKLKETAENNLKKPVTDCVISVPSFFTDAERRSVLDAAXIVGLNCVRLMNDM

SEQ ID NO: 284938 - protein, 86 aa, Zea mays
  Clone ID: MRT4577_22965C.1.pep
FVFFFFFFFFFFFFFLLNFFFFFFLCFVLYFIVVLLYLFTHYPFNQIIGGGGGIILIIKHSKLIKEHTLVRKRIFNDRCNSGLSPF

SEQ ID NO: 284939 - protein, 118 aa, Zea mays
  unsure (1)..(118): unsure at all Xaa locations
  Clone ID: MRT4577_22966C.1.pep
HSKHIVYQQGSQIFCFLMLLGLSASVGTVTIFPQXSQAPIASLFSLYMSPAVCRMCXRAIVQPYGVXQSAIATGILPLLQLLLQEXVSIIRVVYIXHLVXRDMMAQLLPQLVLSIFVE

SEQ ID NO: 284940 - protein, 74 aa, Zea mays
  Clone ID: MRT4577_22967C.1.pep
VTVTSYLPSSCSYRSLYSLVLYGVRELWLRWCKKRLIGTCIGLRLMMQDKTSCTALSQFGACMANVPADASFFF

SEQ ID NO: 284941 - protein, 128 aa, Zea mays
  Clone ID: MRT4577_22968C.1.pep
MWVLPSLPPLIWRWWNPNFWGGYNGCGSPLGPQTGGGWDQPRGGGGGGLLTILVDKKGFFLGCPRTGKSSGCGLFWKKNPPPVFFLKKKKKKKKKKKKKKKKKKKKKKKKKKKRKKKREKAASMSDRD

SEQ ID NO: 284942 - protein, 67 aa, Zea mays
  unsure (1)..(67): unsure at all Xaa locations
  Clone ID: MRT4577_22969C.1.pep
KRXVFYSXXKISXXLQXXSYFVXEVQQXLTWXQXXVRYPSSXXKATILQXGWQXFQHRAYMLSSKKP

SEQ ID NO: 284943 - protein, 80 aa, Zea mays
  Clone ID: MRT4577_2296C.1.pep
KPKPTHPGVPREAQVEISSLSLARSTPFSFSRGRACIVDCLRPPVCRTRSHSFIFLGPAVIPVRLSSLEPLIRDPFASVN

SEQ ID NO: 284944 - protein, 113 aa, Zea mays
  Clone ID: MRT4577_22970C.1.pep
KNDISTIRTSKKPSTSTITSSGRVLIVLRRIKKKTVPAPLQLIRHGQTPSGRVRISWRPPLTVLHCSLYNGSPCADGRSRRSAGACGLRHPQHRARLGRRGGAGRALANGGGH

SEQ ID NO: 284945 - protein, 86 aa, Zea mays
  Clone ID: MRT4577_22971C.1.pep
KKWVFKLSPGHQKAKKPHQPNNKFPLKPTTKGSPTSTLLYGSKKKPLALERVASASKRASLGNLVKKPTKTIWAIPGKPKRKRQGF

SEQ ID NO: 284946 - protein, 44 aa, Zea mays
  Clone ID: MRT4577_22972C.1.pep
EDLTASRVEACHLDPGSGKDSGHWEVNCHRLRSCLESTQFLSFS

SEQ ID NO: 284947 - protein, 148 aa, Zea mays
  unsure (1)..(148): unsure at all Xaa locations
  Clone ID: MRT4577_22973C.1.pep
TRIDPNRNXEISMASYHLNISYSDMDVFILTKTHKIHSTSRDIXLMDAIQDASHSEYAYXAGTHYHILPTSDLSYMRMRWLTRLLRHYYDAANTNKHMYHDMYICSKRNIXANTRXLMSTIHRCNAAKAXDXTLSDQIQAHSSRAGET

SEQ ID NO: 284948 - protein, 90 aa, Zea mays
  Clone ID: MRT4577_22974C.1.pep
ADHHADGLLRPFSDPLAFFLRHPGAFFFSLCVSMARDATATFLPALLFWLVDLLPLLVLLLFDVHVLSLLYWIYMFATDCFRQSLLSMNY

SEQ ID NO: 284949 - protein, 110 aa, Zea mays
  unsure (1)..(110): unsure at all Xaa locations
  Clone ID: MRT4577_22975C.1.pep
WACFYTWFRTKFYHKQGTATITXVSNYNHXTNXEHTFHYIGHLRPQHSRTPTPMESHQAPNNQTSYILYHLYKIYILGLTNKKNQTYTPLHETTLTNPYMHLNKIHYTDT

SEQ ID NO: 284950 - protein, 71 aa, Zea mays
  Clone ID: MRT4577_22976C.1.pep
NDPYIRFENSLPRGGVKPIHAASLASRNCCWYNRFENTHRTASWNPSINPPKAPPKGRPRGPIMSPITRAN

SEQ ID NO: 284951 - protein, 99 aa, Zea mays
  Clone ID: MRT4577_22977C.1.pep
LVELRYQRCYFYRYSITTIVASLCCNYKTNILKTLPFYTICFNRGLRFFPCILASATNASIVSSSGEVTSFSITRTTPSFVFNLITVDPNYTMRGKWPS

SEQ ID NO: 284952 - protein, 153 aa, Zea mays
  unsure (1)..(153): unsure at all Xaa locations
  Clone ID: MRT4577_22978C.1.pep
MRKSCGLNSGPGRPFNDRRWLLPFLASLLVSVTLFLAAACGLFSXLFGRRRRLPXVDVVSFTDWDDGGSPSQRDSGQSVEPEAKDPLLDDNDNPDNAAVNSDDSDAEPPRLAYLLEGTKGDGLRMRRVLQAIYHPRNQYILHLDLEAPPPEED

SEQ ID NO: 284953 - protein, 53 aa, Zea mays
  Clone ID: MRT4577_22979C.1.pep
LWQTVPCVILNILTHNKPLALFTRHYNGLWPASLQFKALISSCGLFTLSRPYV

SEQ ID NO: 284954 - protein, 83 aa, Zea mays
  Clone ID: MRT4577_2297C.1.pep
RELRRRRSHEPGRTGSIARVTTSSDNEQARALTLASGKHKCWIQQMTPSEHAARHTTTTIVESATERWRIRRTRPRSRAGAGR

SEQ ID NO: 284955 - protein, 76 aa, Zea mays
  unsure (1)..(76): unsure at all Xaa locations
  Clone ID: MRT4577_22980C.1.pep
ADGDGPNAASAGSSTSTGDGVVDAILRGRGVRVFXMRGSERGRRRYSGVGTRERSGGAAGFVSGVLFPARPAXEVP

SEQ ID NO: 284956 - protein, 71 aa, Zea mays
  Clone ID: MRT4577_22981C.1.pep
SVLSSFLWIDGCIRRSGSGRPSHGPRHGLGVRAAAMNCYDFRPYTIVDAGAHCSLRVSRLIGCCGVCALEF

SEQ ID NO: 284957 - protein, 642 aa, Zea mays
  Clone ID: MRT4577_22982C.1.pep
MQTSAVPSSDELSPDLAVHAAGELASSLPPGEVVGSDTGLALNPSPLVDAALTIADVDNSWLEAPPDCREDPVETGTVNFQLIVFDPSEVFDFEGIGPDLRWDEEGPQHVTVMNDHHTCTSSGRRRTSTPTSAWVAAKALPILEKKPHTGAKDLQTFLQDTYKCTISYDTVWYGKEKALKELFGTWEESFQLLFSWKEAVLQRSPDSVIEIDVRVEDGRVYFSRFFCALGPCISGFLHGCRPYLSVDSTALNGRWNGHLPSATAVDDHNWMFPVAYGFFESETEDNWHWFLLQLRKAIGDLPNLALCSDACKGLTNAMKDVFPEAEKRECFRHLMNNYVKQYAGSEYMYPAARAYKGRNRFHSLLWYRSAFNPTIKCDYVTNNIAEVFNNWIKDYKDLPVCDLTNKIRIMIMQLFYKRRRIGRRLEGKILPSIIAQLNARTRGLGHLEVIKGDDYVAEVRDNGDCFSRYVVKAHLRECSCKEWQHTGKPCHHALCLITTQQYRNVMMEEFVDDYYSVDMFRKAYERLVEPIESKLFWPKVDFAKEVGAPLGKRGVGRQRKNRFKTCLEGGSSKKKPANESEKAKKIIRGKFKCPNCGELGHRKTSYKCPLNGMKKRKRKPRKNSTKKWFPKEPAEASSSQPN

SEQ ID NO: 284958 - protein, 68 aa, Zea mays
  Clone ID: MRT4577_22983C.1.pep
VRPLQSRLLGRLLPQPGVHYSRLPAFAQLLVASAPLGPSSGVLLMCPAFDALLVVVSGHVSATAASND

SEQ ID NO: 284959 - protein, 163 aa, Zea mays
  Clone ID: MRT4577_22984C.1.pep
ASARVGRIQAREIRARGHQSEQTCRPPPSPCTLPCFLPVFIIQSIGLLCTDNTQTHTRLKQKTNGNVRLQEQNKYYEQVQKARIWSRSDNCSLIFGSTLKFLSRLIIPSTKQILPSRIIFRGKKISDDNRTREKAKINQTEKRDLNKGSEGSIGFYRQESENR

SEQ ID NO: 284960 - protein, 154 aa, Zea mays
  Clone ID: MRT4577_22985C.1.pep
MDEWVRQAEAWAGQAERWIRQQPPEQIYVAVAVIAVTILVLLAASCLKSSKSNTIVLSGLSGSGKTILFYQLRDGSSHQGTVTSMDPNNDTFVLHSELERKGKVKPVHVVDVPGHARLKPKLDEFLPRAAGVVFVADAQDFLSSMQAAAEHLYD

SEQ ID NO: 284961 - protein, 43 aa, Zea mays
  Clone ID: MRT4577_22986C.1.pep
HTPVKGNLNKPPTNLFPQKKHPKVTKLYYKNFHCYKNTILLPK

SEQ ID NO: 284962 - protein, 63 aa, Zea mays
  Clone ID: MRT4577_22987C.1.pep
PRLFFFFFTKSKDLYFKETQASTSAGVLLGHGGGILSLYYNMATSRKGTSNLIVVLITTMLHI

SEQ ID NO: 284963 - protein, 42 aa, Zea mays
  Clone ID: MRT4577_22988C.1.pep
FSHGTCPCCLSYQRPQQASDAYHLMSTVCSIGLRTLCGRIRR

SEQ ID NO: 284964 - protein, 63 aa, Zea mays
  Clone ID: MRT4577_22989C.1.pep
LKPARGWATTLNKILVGGGGVNLLNLVRFLLEPSEAVAEFDSVAEPEFASEEQLLFSWQSNFT

SEQ ID NO: 284965 - protein, 41 aa, Zea mays
  unsure (1)..(41): unsure at all Xaa locations
  Clone ID: MRT4577_2298C.1.pep
FSXLRLDRLELXLGGXGHSRPPRLSPAGVVSLPKGMFFLEP

SEQ ID NO: 284966 - protein, 155 aa, Zea mays
  unsure (1)..(155): unsure at all Xaa locations
  Clone ID: MRT4577_22990C.1.pep
NSARGRAARHADGTLTPFKVPSPQYPCXRAAFLVIDAADPSPTQPLRRKAKTLQTWNLQDRKADITYTLGLTNSQMHITAPWPGPPCTDRAANGCCPRASLPTPHSCNRSTSIDANTRATISTRPLLHRHERNILPDLCVMGHKDGIRTLTTIFM

SEQ ID NO: 284967 - protein, 91 aa, Zea mays
  Clone ID: MRT4577_22991C.1.pep
IPSPNFTCVCPKRVPCAPRTRRDRSRRAAPDYRLYERLSQCPLRTRLRHTIGETCSRRYSVVVSHADVLLYLSHFGTLRRLDHPQPVLCIV

SEQ ID NO: 284968 - protein, 205 aa, Zea mays
  Clone ID: MRT4577_22992C.1.pep
MAGCKQDDDAVGRSPSSSSMDSSSSTHPPALSAASSSGFRPTTTERRDDLSTDLQLGLCSLSPAASSALLVVAESKSVLSTPRGSRTTQDWPPIKPFLRSALTASARRRRRTLFVKVYMEGVAIGRKLDLLLLDGYDSLLAKLRHMFKASITFADAMEYHQRVPHEKPAHVLTYEDRDGDWMMVGDVPWELFLGSVKKLRICKNR

SEQ ID NO: 284969 - protein, 163 aa, Zea mays
  Clone ID: MRT4577_22993C.1.pep
HSRLPRHTPKTEPPRSDWVGSRRGGEGEGGGRTRRRAFVQDAAAADGGGLLGGPADAVRAAGAQPHPLRGGHGGRLPRLRPLLPRRRRPLPRRPLPRPRRPSPAHLRSATVDRSKGNKTEISKSELIQKSAYCRVSGRDMDLVELSAYGNVRRGPDSGGCKIQ

SEQ ID NO: 284970 - protein, 305 aa, Zea mays
  Clone ID: MRT4577_22994C.1.pep
MAHRTVRSRACSSLQAGYPVAYLSKALGPKLQEVVSSYDGDNEASTMVAKLALDPQAIPHKAWQYGLLRYMNRIWLEDNVQLQQRLVSTFHCSTVVGYSGFPVTFAWLKHLFPWKVDTFTKYPNFLPLWHPFTAFTVARVFLDHIYKHHGLPQSIVSDQDKVFLSRLWQEQFHLADVQLHMSSTYHLQYDGQIEKVNECLETFLRSFVHACPNRWSKWLSVAQFWYNSSTHFATGLSPFEALYGCQPRQLGITDQPIISSSQLADWLQQRLLNSDLLKQHLERAKLRMKRKAGKGRSECEFAVGE

SEQ ID NO: 284971 - protein, 191 aa, Zea mays
  Clone ID: MRT4577_22995C.1.pep
MADVYKGELTPLQRHVAFFDRNKDGVIYPSETYQGFRAIGCGVALSAAAAVFVNGGLGPKTVLENEKPAPFKFPIYVKNIHRGQHGSDSGVYDSNGRFVPEKFEEIFKKYAQTRPDALTGKELQEMMKANREPKDLKGWLGGFTEWKVLYSLCKDKDGFLHKDTVRAVYDGSLFERLEQERNSKKESSKKK

SEQ ID NO: 284972 - protein, 145 aa, Zea mays
  Clone ID: MRT4577_22996C.1.pep
LWLVRVRACLLWRRALKENEKPAPFKFPIYVKNIHRGKHGSDSGVYDSNGRFVPEKFEEIFKKYAHTRPDALTGKELQEMMKANREPKDLKGWLGGFTEWKVLYSLCKDKDGFLHKDTVRAVYDGSLFERLEQERNSKKESSKKK

SEQ ID NO: 284973 - protein, 559 aa, Zea mays
  unsure (1)..(559): unsure at all Xaa locations
  Clone ID: MRT4577_22997C.1.pep
MRAREPRMWMGWCWVALAALLALILPPSNATLSPAGINYEVVALMAIKTELEDPYNVLDNWDINSVDPCSWRMVTCSSDGYVSATESPRLRLSRYMSHGIGNLTRLQSVLLQNNVISGPIPSTIGRLGMLKTLDMSDNQLTGSIPGSLGNLKNLNYLKLNNNSLSGXLPDSIASIDGFCYRDLSFNNLSGPLPKISARTFIIAGNPMICGNKSGDSCSSVSLDPLSYPPDDLKTQPQQGIGRSHHIATICGATVGSVAFVTVVVGMLLWWRHRRNQQIFFDVNDQYDPEVCLGHLKRYAFKELRAATNNFNSKNILGEGGYGIVYKGYLRDGSVVAVKRLKDYNAVGGEVQFQTEVEVISLAVHRNLLRLIGFCTTESERLLVYPYMPNGSVASQLREHINGKPALDWPRRKRIALGTARGLLYLHEQCDPKIIHRDVKASNVLLDEYFEAIVGDFGLAKLLDHRESHVTTAVRGTVGHIAPEYLSTGQSSEKTDVFGFGVLLVELITGQKALDFGRVANQKGGVLDWVSMHACSLCLLYLSDFRFALKLQNEERLSVC

SEQ ID NO: 284974 - protein, 163 aa, Zea mays
  Clone ID: MRT4577_22998C.1.pep
SAESYSVPKGLKILENLADASSLITGLEHELPVPWAKLKRVFWFDGFGNDESATEQALLQKFFASIAIKILSEQLSGLQVILIMKNTRYIQLQVERLARECFFFLSESFLSDEANLGWFSDTSTHTRRMQVAAPVTYVFNLHPPSSTQFGDYPAELREALRRD

SEQ ID NO: 284975 - protein, 51 aa, Zea mays
  Clone ID: MRT4577_22999C.1.pep
SCRAVILVIAEVDDIDVRLLDPVVGRRLHAGGGHVAEAVDEHGQALLSPGR

SEQ ID NO: 284976 - protein, 320 aa, Zea mays
  Clone ID: MRT4577_2299C.1.pep
MLLLSPSAVPAPALRGRPRRSRRLVPPPLASAPASIVVSSDEDAFNVCSGYLFEEGAATESELPTAYRTHSPGALGTCSRRPVLPSRSSPARTTSPWSRLRYLDRVNERADDMFELRAAPLRRILLELGPAFVKIAQAVSSPTRVVPPAYLDELSLLQDRIAPFSNDVAFNIIEKELGLPLDMVFSEITPEPVAAASLGQVYQARLRSSGKIVAVKVQRPGVQAAISLDIYILRFLANLARKAAKLNTDLPAVLDEWASSLFREMDYREEARNGLKFRELFGKFRDVSVPEMYLDQTRRRVLIMEWIEGEKLSEVRDQYL

SEQ ID NO: 284977 - protein, 38 aa, Zea mays
  Clone ID: MRT4577_229C.1.pep
LENASGYIYCWRNWISLPLIGTVIKLIILYILTKFYSI

SEQ ID NO: 284978 - protein, 189 aa, Zea mays
  Clone ID: MRT4577_22C.1.pep
MPPTPTAAAAGAAVAAASAAEQAAFRLVGHRNFVRFNPRSDRFHTLAFHHVELWCADAASAAGRFSFGLGAPLAARSDLSTGNSAHASLLLRSGSLSFLFTAPYAHGADAATAALPSFSAAAARRFAADHGLAVRAVALRVADAEEAFRTSVAAGARPAFGPVDLGRGFRLAEVELYGDVVLRYVSYPD

SEQ ID NO: 284979 - protein, 50 aa, Zea mays
  Clone ID: MRT4577_23000C.1.pep
FLMLDDRVSVKLSLYTSLNAYPAKRLCSYKMELSTYSRIPEVSCVIDEVA

SEQ ID NO: 284980 - protein, 80 aa, Zea mays
  Clone ID: MRT4577_23001C.1.pep
RKISLGWGDRSPQVKLAKLFFKPQPPFLGRGPTNKTPVFFSPTKKGRGWAKKKKKKKKKKKKKKKKKKKKKKKKKKTRRG

SEQ ID NO: 284981 - protein, 154 aa, Zea mays
  Clone ID: MRT4577_23002C.1.pep
LGSIFHLRRCAKPMLFRPQLRHPFILFHITHAFISKSKPPVSVRGVKSDCRHDEFGDRRSMTDAMAQRRVLCSTAKNRLNRSSDSDTNTDTDTAGTGARTRTHSRPLRTSTSRCSQRPSAFGSIAVGGRGGAWIFFLAARSRSNGQRCFTFSFL

SEQ ID NO: 284982 - protein, 160 aa, Zea mays
  Clone ID: MRT4577_23003C.1.pep
PLRLGPGGVPTLGCAYAGPATPPPRRTPLVSVSVEGGPFPNPLPPPPLPVFFPFWYRRFPLWFAGWGPAPIPLGFFFFLPPPFSPFFFPFLFLGGVVGGNLFPSRTGSGLVFAHVGPGLGPACAGPRCAGLCPCPRPRGRGKEKKKKKKKKKKKKKKKKL

SEQ ID NO: 284983 - protein, 96 aa, Zea mays
  unsure (1)..(96): unsure at all Xaa locations
  Clone ID: MRT4577_23004C.1.pep
PYSCSHTQTVDAIRLKRLKLRSKDRYTTGDSRLSVMKPNAEXDPYKRKMPQSAFFVFMEEFWKDYEDKHPHEKQVSLVGTAGGAKWKSLSDDADAP

SEQ ID NO: 284984 - protein, 63 aa, Zea mays
  Clone ID: MRT4577_23005C.1.pep
VSYCLLCRVVKTAGPKGHILNLGHGVLQKTPEEAVAPFFYVPRCLRYHPPFQGFVFKGFHPVA

SEQ ID NO: 284985 - protein, 53 aa, Zea mays
  Clone ID: MRT4577_23006C.1.pep
ILSKAVLVRVVFRLRVSRLSCLFENPLKFSKFWCYESLETLLYGVEVRTELIC

SEQ ID NO: 284986 - protein, 96 aa, Zea mays
  Clone ID: MRT4577_23007C.1.pep
PPTTPLPLAPPLVPSPSTIGSTAAAAIRSIWRYKNCRRIPIWRQRFSNGAGFMRRRKRWGGSEWNGGRLRWAGGGGGDGGGSGCGLGFDGVVARRE

SEQ ID NO: 284987 - protein, 62 aa, Zea mays
  Clone ID: MRT4577_23008C.1.pep
SHSCLFKHLATTIKFSKLGLLWGYGGQPLGMFVTKGARNMHLSKYIQSKGRGHFFSLAKQTN

SEQ ID NO: 284988 - protein, 112 aa, Zea mays
  unsure (1)..(112): unsure at all Xaa locations
  Clone ID: MRT4577_23009C.1.pep
CRPFVHRGSASPRRVRPTCQCLPLSLPSSPCVQRFALPFHTLCPCGLHHGPRRNPLADPRLGHGRKCIPSPQSTPRRCIKIPTPLSTQTCCPHLTNRNTPPLAKSHASAHAX

SEQ ID NO: 284989 - protein, 80 aa, Zea mays
  unsure (1)..(80): unsure at all Xaa locations
  Clone ID: MRT4577_2300C.1.pep
TRLKKEQDDIXVDINKYHKKLLPYPEIVVYPVDTIMLKLGGLYVLALELSENETSASYALRALLDGLLAPGSLTAQKKKI

SEQ ID NO: 284990 - protein, 106 aa, Zea mays
  Clone ID: MRT4577_23010C.1.pep
SSLVGGRPLFIFFFFFVYIERVNFICTPNRTIFLSKGKQNALDSRTFCFITTTPQNRAGLKEPKKGAGTPANSIGYIEPENGEDQFEFLGSGLPLQKKTPEVFDKR

SEQ ID NO: 284991 - protein, 39 aa, Zea mays
  Clone ID: MRT4577_23011C.1.pep
HIAKKKKKKQKKKKKKKKKKKKKKKKKKKLRAYKKEEKK

SEQ ID NO: 284992 - protein, 68 aa, Zea mays
  Clone ID: MRT4577_23012C.1.pep
QYSAYKVQCLFPFPVHIFHIQVSRMPSIFTIAASTLKLPWNLLQIWVLQMCGTMLDLSSGWLNQPLQW

SEQ ID NO: 284993 - protein, 57 aa, Zea mays
  unsure (1)..(57): unsure at all Xaa locations
  Clone ID: MRT4577_23013C.1.pep
LRRATTEGIWVAVCKNPNVVVWDIEGADGQEHQDDAXFENQAALFALSISDVIFFNM

SEQ ID NO: 284994 - protein, 59 aa, Zea mays
  Clone ID: MRT4577_23015C.1.pep
DGVSSRAITSNFGVWGPNSIKSRFYFPPSIKIYRRGGPPIRIMWFSSPPISGCGKSGGS

SEQ ID NO: 284995 - protein, 109 aa, Zea mays
  Clone ID: MRT4577_23016C.1.pep
GPPLWGLLQQRHMGSGIRPVTFAGSPWIRLGPRRVSPRTGAPLIARRTSGALTKSLFAVVRSLRHPIADEQATVESEVQQVEIAEQELIEGEEQVVEEESPNTEEFDLI

SEQ ID NO: 284996 - protein, 62 aa, Zea mays
  Clone ID: MRT4577_23017C.1.pep
MYEMHLALFLKAGCDKRHTCLMAKEKKVRIRNTPKYTSSSDEESSDDEVDYTELFKGLDRNK

SEQ ID NO: 284997 - protein, 564 aa, Zea mays
  unsure (1)..(564): unsure at all Xaa locations
  Clone ID: MRT4577_23018C.1.pep
RPGNGSDESSFEDFEILHGDMQGLTDTMSFLKSLSGLVGNDLRSPEKQTRERAAASVLFDWEEEIYVARAPGRLDVMGGIADYSGSLVLQMPIREACHVAVQRSDPTKQKQWKHTQARQLANGGAVPVLQIVSFGSELSNRAPTFDMDLSDFMDGDKPISYDNVKEYFSRDPSQKWAAYVAGTIFVLMAELGVRFKDSMSILVSSSVPEGKGVSSSASVEVASMSAIAAAYGLNIAPRDLALLCQKVENRVVGAPCGVMDQMTSACGEANKLLAMVCQPAEVKELVNIPTHIRFWGLDSGIRHSVGGTDYGSVRVGTYMGRKMIKCAASNLLSELLLSCTSTQPGDSSPDEYEGHGVDLLKSEASMEYLCNLPPHRXYEAVFAKEIPETITGDAFLEKYGDHNDAVTEVDPKRSYCVKAPTRHPIYENFRVEAFKALLTAAKTDEQLSALGELMFQCHYSYNACGLGSDGTDRLVNLVQEIRHRKSSRAGGPSLFGAKITGGGSGGSVCVMGKNCLKSSEEILEIQKRYKAATGYLPTVFDGSSPGAGKFGYLKIRRRSTSPSD

SEQ ID NO: 284998 - protein, 184 aa, Zea mays
  Clone ID: MRT4577_23019C.1.pep
KMSRIQMQRCRCITRSAEAGIGSSVGLCISRSSPSKTKIRTKKNKQDKIGGDLLLLSGGNRVIGSILPASVLTAFRRESLVSSSQHYVPPSDGEKKQTGILCREKIFRIANKQRKIRWLSSAGKSAYRSISCRERPVIWSVELEFYRVVTAISLDTKNCLRRTERTMHPPLSGCVLSLEPADLA

SEQ ID NO: 284999 - protein, 116 aa, Zea mays
  unsure (1)..(116): unsure at all Xaa locations
  Clone ID: MRT4577_2301C.1.pep
EDVSSITGRGLFSIGRFKRGTAKIVATVVIFGIRDTRNXTVTGVEMFQKTMDNALVGDNVGLLFLGLQKDXFERGLVLVKPGFYKPNTKFGAVGFVLKKEKGGRDXPFFPGYRPQF

SEQ ID NO: 285000 - protein, 73 aa, Zea mays
  unsure (1)..(73): unsure at all Xaa locations
  Clone ID: MRT4577_23020C.1.pep
TPAHEFNLGGPKKKLLRCKPGEVNLDPLKRPPPFFFFFFFFFFFFFFFFFFFFFFFXXXXXXXXXXXXXYKPN

SEQ ID NO: 285001 - protein, 43 aa, Zea mays
  Clone ID: MRT4577_23021C.1.pep
ATGGVKVLGSFCVSQGKCLKTECRSKDKCVNVGSLADALSALR

SEQ ID NO: 285002 - protein, 108 aa, Zea mays
  Clone ID: MRT4577_23022C.1.pep
MAATAAALRCCFPGSSGVGSGFVKPNSSRRGWCAAAVAAPSREAEPVSSLGHRTRVDFPILHQEFDDAKLVYFDNGATSQKPCSVMKTLDEYYRSYNSNVHRGIHALR

SEQ ID NO: 285003 - protein, 100 aa, Zea mays
  Clone ID: MRT4577_23023C.1.pep
PLLRSSSLIPLHSERTRRQRPHRSLAERIPSQALRTVQRGLEGRRRATQTRVKEVLRRAHEWRSSPSTEDASPSPTPLGGFAPRRSSPRQHRISPEWLVE

SEQ ID NO: 285004 - protein, 117 aa, Zea mays
  Clone ID: MRT4577_23024C.1.pep
RESVPGQVVQRVPASTEADHVAATASFCRHWVAMLVTGPVNTVFLDSTKLPRAEYPYIRGPCPLPLYSVPAQAPAPESPQRQSSQFVSPRRVSLQSLQGWSSTEGAAAVSVFMEPHP

SEQ ID NO: 285005 - protein, 61 aa, Zea mays
  unsure (1)..(61): unsure at all Xaa locations
  Clone ID: MRT4577_23025C.1.pep
MAKYTQEXGNTTXSGXTMGXXQRIHIKNTRKTAFTHRKQPLTKAKRYNEDVITHKQAIPNR

SEQ ID NO: 285006 - protein, 99 aa, Zea mays
  unsure (1)..(99): unsure at all Xaa locations
  Clone ID: MRT4577_23026C.1.pep
PPGANTCSFGGHTARPGPFNILVFFGPGLGLCGPALVTSPAKGGAHFVAGRXGAPVFLSSNKGVASPVCLANALGFPKGVALPRGGRVPQMSPVGDARV

SEQ ID NO: 285007 - protein, 407 aa, Zea mays
  Clone ID: MRT4577_23027C.1.pep
MAAPTTSRRGPGGARNMDDENLTFETSPGVEVVSSFDQMGIKDDLLRGIYGYGFEKPSAIQQRAVLPIINGRDVIAQAQSGTGKTSMISLTVCQIVDTAVREVQALILSPTRELASQTERVMLAIGDHLNVQVHACIGGKSIGEDIRRLENGVHVVSGTPGRVCDMIKRRTLRTRAIKLLVLDEADEMLSRGFKDQIYDVYRYLPPELQVVLISATLPHEILEMTSKFMTEPVRILVKRDELTLEGIKQFFVAVEKEEWKFDTLCDLYDTLTITQAVIFCNTKRKVDWLTEKMRTNNFTVSAMHGDMPQQERDAIMGEFRSGATRVLITTDVWARGLDVQQVSLVINYDLPNNRELYIHRIGRSGRFGRKGVAINFVRKDDIRILRDIEQYYSTQIDEMPMNVADLI

SEQ ID NO: 285008 - protein, 83 aa, Zea mays
  Clone ID: MRT4577_23028C.1.pep
KVKPPKKPPQKVSEKKGLGPLLSGAPIFKASTRGPCQQFQWVFPAWNPKEKKCYSVTGLGPKTLNGVIRYARLGPFQFGEREK

SEQ ID NO: 285009 - protein, 43 aa, Zea mays
  Clone ID: MRT4577_23029C.1.pep
VIPASCFITPPGHKLASLEWYFFTGIFLKLCWVNPVVSLTVKG

SEQ ID NO: 285010 - protein, 502 aa, Zea mays
  Clone ID: MRT4577_2302C.1.pep
IPDLSGSSNLSIIHLENNQLTGNVPSYFGSLPKLSELYLENNRLSGPIPKALLSRSIIFNYSGNVYLGTAGKQKKKHVIIIISALLGASLLLAAALCCYMLTRKAMNSSSSPQAQEKALPAEQNKLQKYPSTQQLQSIATETAHPYSLCELEEATNKFASRIGSGGFGIVYYGKLSDGKEIAVKVPSNDSYQGKKQFSNEVVLLSRIHHRNLVAFLGYCHEDGRNILVYEFMHNGTLKEQLHRRDKHISWIKRLEIAEDAAKGIEYLHTGCTPSIIHRDIKTSNILLDKHMRAKVSDFGLSKLLAAEGKDSHASTNVRGTMGYLDPQYYVSQQLTEKSDMYSFGIILLELISGCPPISTIAFGDNFRNIGPWAKFYYESGDIEAIIDPSISTAAEYQDVQSVWKIAEAAVRCIDAEPRKRPCMPEVVKEIQDALALERAAAETTTSDRALACPFSPAAASVRSGGTMRSHDMVMDNLLLLDDDDDSTFSGSTVTKLKYPELR

SEQ ID NO: 285011 - protein, 170 aa, Zea mays
  Clone ID: MRT4577_23030C.1.pep
MDQIMNKMGSYWLGQRANKEMSSAGDDIESLSTSVGDGAKWLVNKLKGKMQKPLAELLQEHDLPVGLFPREATNYEFEPETRRLTVHIPAVCEVGYRDGSELRFDTTVAGTLDKGSLTGVEGLKAKVLVWARVTAVKADAAKVYFAVGIKKSRSREAYEIIRGAITVDEF

SEQ ID NO: 285012 - protein, 91 aa, Zea mays
  Clone ID: MRT4577_23031C.1.pep
TSFVKRHLTAEGEMKYEPTIGVEVHPLDFTTNCCKITFYCWDTAWQEKFGGLMDGYYIHGQCAIIMFDVTSRLTYKNVPTWHKDLCNVCEN

SEQ ID NO: 285013 - protein, 44 aa, Zea mays
  Clone ID: MRT4577_23032C.1.pep
HSFEYASVCMPGATIPEQGARTTQSPSHVNPYVLQAPHHCFQLT

SEQ ID NO: 285014 - protein, 139 aa, Zea mays
  unsure (1)..(139): unsure at all Xaa locations
  Clone ID: MRT4577_23033C.1.pep
SCSRAAPHATPRGILPTRRPPRPLLLPPSRPXPAMPKPPVVPTVPAATLPPIPAVPTSTVPALGVPPIPALPKIPAVPPMPAVPALPKVTVTLPPPMPAVVVPKVGALPPMPAVPKLTLPPMPSIPGVPMPFVAPPPSA

SEQ ID NO: 285015 - protein, 119 aa, Zea mays
  Clone ID: MRT4577_23034C.1.pep
THRLVDPNWTHKRRLEHAKFDSYYPMLHEDCFEYSIEDLLSATKRNNCRTMLTSTTPTTHTTLPCASLSLVTQYTTTDPIVITNVSALLLTDHATATHDYYLYCWLVHFHECMVRHRLQ

SEQ ID NO: 285016 - protein, 132 aa, Zea mays
  unsure (1)..(132): unsure at all Xaa locations
  Clone ID: MRT4577_23035C.1.pep
SCSRAAPHATPRGILPTRRPPRPLXTAIPAIPAMPKPPVVPTRPAATLPPIPAVPTSTVPALGVPPIPAVPPMPAVPAVPKVTVTLPPPMPAVVVPKVGALPPIPAVPKLTLPPMPSIPGVPMPFLAPPPSA

SEQ ID NO: 285017 - protein, 115 aa, Zea mays
  unsure (1)..(115): unsure at all Xaa locations
  Clone ID: MRT4577_23036C.1.pep
MAHEKKLTNPMREIKVQKLVLISAPGESGDRVTRAVQVLEHLSGEAGVFSKARYTGRTIGIPTNETIACCFTVRGENAMXLLGSGLNVTEYXLFMRNFSDTGRSGSRRSGSTSYL

SEQ ID NO: 285018 - protein, 88 aa, Zea mays
  unsure (1)..(88): unsure at all Xaa locations
  Clone ID: MRT4577_23037C.1.pep
PPPGALARPXPXRVRASAVAXLGGLSFGXXXGRLAGXGCGVVFXPAPXLXXLVFLXPGPGFLFLXXVGXSFPLFLXXSPFSCXXXXXX

SEQ ID NO: 285019 - protein, 99 aa, Zea mays
  Clone ID: MRT4577_23038C.1.pep
GGGTKNFTIRPGFPCPFFNSPENFPKPFFQFLPLFPQFQEGQIQQSVWATILFTCPPPLPKYFFLWASFAFQTKQTPPLLGAVFLDPAKKNPTHALLLG

SEQ ID NO: 285020 - protein, 127 aa, Zea mays
  Clone ID: MRT4577_23039C.1.pep
FGSSEIPIFILGQAHPGSLPWRLWVLWKGQDAPSSIWSALYLEVDWSLSKRLNELRKGHLLLENSVVAEEDLKGALHFTPLAQGSVRTQRNGARTSCVEGNLGRGLPQGVTSRSSAHGNSRSSGLFQ

SEQ ID NO: 285021 - protein, 153 aa, Zea mays
  Clone ID: MRT4577_2303C.1.pep
MLAGTIWTRTTKASAAGTVNMSATYNSRSQDIESSVVAHGDLWRLEASRGGSTSGNGTSPLYLVQLGPLLFVRDSTLLLPVHLSKQHLLWYGYDRKNGVHSLCPAIWSKHRRWLMMSMMCLNPIACSFMDLQFPNGQLTYVAGEGISASGFLP

SEQ ID NO: 285022 - protein, 165 aa, Zea mays
  unsure (1)..(165): unsure at all Xaa locations
  Clone ID: MRT4577_23040C.1.pep
IGTLEAGRKAFRGRSFAQRSSVFSRFSSCSSLDVVSGIQICITGSTSAGLHQILPWLYYHNVIGVSHFFLLVEGEAAKPAVTSVLESIQDARMDWIIHLDTDELIHPAGAREYSLRRLLLDVPDNVDMVIFPNYESSIDCXDIKDPFTEAFIIASTATEEEMGNW

SEQ ID NO: 285023 - protein, 130 aa, Zea mays
  Clone ID: MRT4577_23041C.1.pep
NWKTGVFVGFWQRPPLGVFFSSEVNKIFYITAHVMVLRQPVAAGAPPPGREFVGASASRYNPGISQVLRRVLQLLIPCLVTVQRQMGHHHKSRSYFRQTDIKRSGNASIDIMSKFFKLMVVGVLLCLSHC

SEQ ID NO: 285024 - protein, 544 aa, Zea mays
  unsure (1)..(544): unsure at all Xaa locations
  Clone ID: MRT4577_23042C.1.pep
MAGYRGSSSVSASTGGGGSAVAAAFSTRLLLLLTLLPLALAAFAFALQWRGGMRDPAGAAWPADAQRFPGMENSPLSSSHGGAGSYFAVSSSSSSPGADCAEILGRSAASSNGISLYRGWSFDSESAITPKICITGSTSASLHQILPWLYYHKVIGVSHFFLFVEGEAAKPAVTSVLESIRGVKIIYRTKELKEKQEKSRIWNETWLAGFFYKPCNYELFVKQSLNMEMAIIMARDAGMDWIIHLDTDELIHPAGAREYSLRRLLLDVPDNVDMVIFPNYESSIERDDIKDPFTEVSMFKKNYDHLPKDTYFGLYKEATRGNPNYFLTYGNGKSAARVQEHLRPNGAHRWHNYMKSPNEIKLEEAAILHYTYTKFSDLTSRRDRCGCKPTKEDVKRCFILEFDRLAFIIASTATEEEMXLVQGTCCMDRXRHQFETFKEECLDTHICAHGXIIRGLKESGVFTNAVTSAKAQSKTKSSNMGLGNKDPIQPNGTAGQSTLEGSHGKLQATVRKILEMVDTQEEAAMPPMSPPGFLELTESVTAFS

SEQ ID NO: 285025 - protein, 172 aa, Zea mays
  unsure (1)..(172): unsure at all Xaa locations
  Clone ID: MRT4577_23043C.1.pep
YCEIKLEEAAILHYTYKKFSNLTSRRDRCGCKPTKEDVKQCFILEFDRLVPGTCCMDRXRHQLETFKEGCINTYICAHGXFIGGLKESDVYXNAITSAKXHXKTKSSNMGLGNKDHIRLNXLLVSXLEGGHGKVQVSVRKILEMVDAXKEXAMPPMSPPGFLELAESTTAFS

SEQ ID NO: 285026 - protein, 98 aa, Zea mays
  Clone ID: MRT4577_23044C.1.pep
RCTSRSAGRRAEAPGSRGRVGGAELGRAPRVMFRVLDILHFLRAGIVGDVHGISVHYKDHGDQVHQVNLRPLNPPCESMHLPRRLVRSSCLSCLEPGL

SEQ ID NO: 285027 - protein, 54 aa, Zea mays
  Clone ID: MRT4577_23045C.1.pep
YMADVCHYIVGQLAYSYSTLDGQQEPTNKRTICCSKRSKRAADCLIIDFSQSKL

SEQ ID NO: 285028 - protein, 92 aa, Zea mays
  unsure (1)..(92): unsure at all Xaa locations
  Clone ID: MRT4577_23046C.1.pep
PKIEQHRPGSTDNKIKKTGRTREQKHAKQRKRRDTSQQXKNXXRXLWMPRLXERIQNAAAAGTPHQHKTGAADTPLSSPTSWQPGGGGGLYA

SEQ ID NO: 285029 - protein, 62 aa, Zea mays
  Clone ID: MRT4577_23047C.1.pep
ISRQLAVRILNRTLYAGIRSFVKKLNSRKHTPMPDTPRSTRQHLHHAVLNIAISHSQCLFIL

SEQ ID NO: 285030 - protein, 89 aa, Zea mays
  unsure (1)..(89): unsure at all Xaa locations
  Clone ID: MRT4577_23048C.1.pep
HSFGHTRAIARLLKAAKYSELMISCVPGYIAAFLEYLIAEVLELAGNSTRDNNNTRIVPRHIQLSVRNDYELTKLLXGATITRRCIMPN

SEQ ID NO: 285031 - protein, 73 aa, Zea mays
  Clone ID: MRT4577_23049C.1.pep
SPTSVCTILMSTRRATLCFVPCIGSCSSFHNRSLIFLSCSGPTAWFDCLPMQKAPHNAGISPAYSCHDVLTTV

SEQ ID NO: 285032 - protein, 331 aa, Zea mays
  Clone ID: MRT4577_2304C.1.pep
AAAAAATGSAAASSVSGHVSGDDLDEEDEGFGCGIGTLGNFKKANGTVNMSATYNSRSQDIESSVVAHGDLWRLEASRGGSTSGNGTSPLYLVQLGPLLFVRDSTLLLPVHLSKQHLLWYGYDRKNGVHSLCPAIWSKHRRWLMMSMMCLNPIACSFMDLQFPNGQLTYVAGEGISASGFLPLFGGLLQAQGKYPGETRVSFSCKNKRGTRFTPMFQWPDKSVSLGVTQALAWKRSGLMVRPSIQVSVCPTFGGSDPGVRAEVVHSLKEELNLMCGLSCSRHPSAYTALSIGRSKWNGQVGSSGVVITLETPLNNIGRPSLSVQLNGGFEL

SEQ ID NO: 285033 - protein, 82 aa, Zea mays
  Clone ID: MRT4577_23050C.1.pep
SGGWIQDSPYKLEPTLIRTAPGEVITEKEHIRGGHDHCSYSVTYKTCTLALATIMLIPCASARYIDVNKLMNIRTWTIVYSL

SEQ ID NO: 285034 - protein, 196 aa, Zea mays
  Clone ID: MRT4577_23051C.1.pep
HGPIADDTASLVVAQLLFLESENPLKPVHLYINSPGGVVTAGLAIYDTMQYIRCPVTTLCIGQAASMGSLLLAAGAPGERRALPNARVMIHQPSGGAQGQATDIAIQAKEILKMRDRLNKIYQKHTRQPIDKIEQCMERDLFMDPEEARDWGLIDEVIENRPASLMPDGIGGGLDVPSLGVGPGGRGRDAVEPSAV

SEQ ID NO: 285035 - protein, 73 aa, Zea mays
  Clone ID: MRT4577_23052C.1.pep
NKAPTQERLCLISTIPKQNRPRFPGMKSGYRKTPALCENRGKTQTGNLALKKTQAPSLGGDSSGPWFVKAHPL

SEQ ID NO: 285036 - protein, 304 aa, Zea mays
  Clone ID: MRT4577_23053C.1.pep
MTPSSALALALQAAASPLPASTPRSSPRSSSLSLGRGTAGNGPRRLAAAAPPRAFFSSSPYQPPQPEGFSPHREYGLVPMVIETTSRGERAYDIFSRLLKERIVCINGPIADDTASLVVAQLLFLESENPLKPVHLYINSPGGVVTAGLAIYDTMQYIRCPVTTLCIGQAASMGSLLLAAGAPGERRALPNARVMIHQPSGGAQGQATDIAIQAKEILKLRDRLNKIYQKHTRQPIDKIEQCMERDLFMDPDEARDWGLIDEVIENRPASLMPDGIVGGLDVPSLGGGGGGGGRGSDVEEPSAV

SEQ ID NO: 285037 - protein, 302 aa, Zea mays
  Clone ID: MRT4577_23054C.1.pep
MTPSSALALAHHAAVSPLPSSTPRPSPRSSSLSLGPGSAGLGPRRLVAAAPPRAFFSSSPYQPPQPEGFSQHREYGLVPMVIETTSRGERAYDIFSRLLKERIVCIHGPIADDTASLVVAQLLFLESENPLKPVHLYINSPGGVVTAGLAIYDTMQYIRCPVTTLCIGQAASMGSLLLAAGAPGERRALPNARVMIHQPSGGAQGQATDIAIQAKEILKMRDRLNKIYQKHTRQPIDKIEQCMERDLFMDPEEARDWGLIDEVIENRPASFMPDGIGGGLDVPRLGGVGGGRGRDVEEPSAV

SEQ ID NO: 285038 - protein, 386 aa, Zea mays
  Clone ID: MRT4577_23055C.1.pep
MDGLLSKLRSLDAYPKVNEDFYSRTLSGGIITLVSSAVMLLLFVSELRLYLHAVTETTLRVDTSRGETLRINFDVTFPALQCSIISLDAMDISGQEHLDVKHDVFKQRIDAHGNVIATRQDVVGGMKMEAPLQHHGGRLEHNETYCGSCYGAQESDDQCCNTCEDVREAYRKKGWGVSNPDLLDQCKREGFLQSIKDEEGEGCNIYGFIEVNKVAGNFHFAPGKSFQQSNVHVHDLLPFQKDSFNVSHKINRLSFGEYFPGVVNPLDGANWVQHSSYGMYQYFIKVVPTVYTDINEHIILSNQFSVTEHFRSGESGRMQALPGVFFFYDLSPIKVTFTEQHVSFLHFLTNVCAIVGGVFTVSGIIDSFVYHSQRAIKKKMEIGKFN

SEQ ID NO: 285039 - protein, 140 aa, Zea mays
  Clone ID: MRT4577_23056C.1.pep
SSSTRAAALFFFFFFFFFFFFFFFFFFFWKGEADPGEDPPLRGRETKCREPQLGPPNGPLHAWRKPGRAPHRPQGRGSKTPLRGARGPPPGESPGAGALGFLWEKIGETNGKPKKRAQLKIPKRALSWKKNRGRGVIKRL

SEQ ID NO: 285040 - protein, 76 aa, Zea mays
  unsure (1)..(76): unsure at all Xaa locations
  Clone ID: MRT4577_23057C.1.pep
MSCCCASRCGCCSSCKCCKKYPDLXDTSTAAQATVVLGVAPEXNAAPEFFQAAWVCGEGFLGCSCGGICKCDPCYC

SEQ ID NO: 285041 - protein, 314 aa, Zea mays
  Clone ID: MRT4577_23058C.1.pep
MRCEVTQQESGDSPQARRNGSLSRPASPMRGSLGDKRCDGGSGGPRAWETKTSDYKRPSMTRTRHLLHCHCPYHHSSAACLHEIPRDRTGRSMAASDQQPRPEKPPLPWRARLLVGAASALHAASLRRDGTVSRFLLSLFDRAAPPTPTAPLGGVASTDHAVSDHLRARLFVPEIPGGGNELPVVVYFHGGGFVFHSAASAQYDVLCRRLASAIPAVIASVDYRLAPERLAWLWRAFLPPGATRDHEAANVPAAIRRDAGAGADRWRAFPPTLVCVGGWDVHQDRQRAYADALRAVCSRGVTVGGVPGRHPRPS

SEQ ID NO: 285042 - protein, 404 aa, Zea mays
  unsure (1)..(404): unsure at all Xaa locations
  Clone ID: MRT4577_23059C.1.pep
MLANVCRRRLTIPLSPILAAAAAAASGKNPIHSNHARALLSQSYYSSAVQAAPDREPCPTTVSYLVSCGVSPAVAAARKVRIRDTDRADAVRALLRKYGFSEADITRTVRLDPLLLTFDPDRTIRPKLDFFVSLGIQPRLLATEPHILARSLEKHIIPCIEFFRTILRTDDNIRIAVSRVPRALMTDIESTMRPAVEAFLSHGLSMEAIAKLLMIHMGMIKTPPERIREAFHDLKALGLRVTDTGFXSTASASFAALGGRLWXRKVAVFKSFGVSESDLFRAFKTQPTILLVGDETIKKKFRFFLDVMKLEIADVMAQPLTLALSLEKNIMPRCAVLSILMKEGKLKRTQKLIPPLLSNSRVFSERYVLRHAKDVPDVVKAFEGKIKFQGFGESEVRTSVPLND

SEQ ID NO: 285043 - protein, 231 aa, Zea mays
  unsure (1)..(231): unsure at all Xaa locations
  Clone ID: MRT4577_2305C.1.pep
IHGSTHASEDAWAKQHLLWYGYDRKNGVHSLCPAIWSKHRRWLMMSMMCLNPIACSFMDLQFPNGQLTYVAGEGISASGFLPLFGGLLQAQGKYPGETRISFSCKXLAWKRSGLMVRPSIQVSVCPTFGGSDPGVRAEVVHSLKEELNLMCGLSCSQRPSAYTALSXALVNISDWFFLGFXVDVTYSLHGXGRSKWNGQVGSSGVVITLETPLNNIGRPSLSVQLNGGFEL

SEQ ID NO: 285044 - protein, 44 aa, Zea mays
  Clone ID: MRT4577_23060C.1.pep
ARGVTPQCHLGFFPKLIQPINTCKFSKRGNIKRKFRTKVYNESS

SEQ ID NO: 285045 - protein, 309 aa, Zea mays
  Clone ID: MRT4577_23061C.1.pep
MEQVQVVGVTCLGMYHPLLAHKKFDTCIMDEAGQITLPVSLGPLMLATKFVLVGDHYQLPPLVQSSEARENGMGISLFWRLSEAHSQAISALRCQYRMSSGIMELSNSLIYGNRLCCGSLEIANAKLKFSGREPMQLKLKEILNPDRAVIFANTDQIPALEAKEHRTVNNPTEAHIISWIIKELLRRGVAQDAIGIITPYNAQVNIIQQCTDGLVEVHTIDKYQGRDKECIIVSFVRSTANSRASGSSLLGDWHRINVLLTRAKKKLIMVGSRGTLSTIPLLRLLVDKVAEIGGLLDLTNKDAHSFSRT

SEQ ID NO: 285046 - protein, 164 aa, Zea mays
  Clone ID: MRT4577_23062C.1.pep
MMSRERKKAAALQEKLKILRSITHSHALSNTSIIMDASAYIKELKQKVVRLNQEIACAQDALRHKSSSYPTVTVEALGVQGSSFLVNVFSDKSCPGLLVAVLEAFDELGLSVLQATASCADSFRLEAVGGENVADNVDEHVVKQAVLQAVRSCSEGGSEHDDEE

SEQ ID NO: 285047 - protein, 111 aa, Zea mays
  unsure (1)..(111): unsure at all Xaa locations
  Clone ID: MRT4577_23063C.1.pep
GHPRVATSMLGCLRYTVRRGQRQHISSLLCWRAQLMYTGVRSARVALTLPPXLPPTRWENSMVPTGLVLAPLTGEGGYGFFPXPHAILCYQHRATKGGLLIAGATGVFYTG

SEQ ID NO: 285048 - protein, 134 aa, Zea mays
  Clone ID: MRT4577_23064C.1.pep
LFVFRLWVKCFLVPSGNKDPLVYVFGCLEYLVETACDLSHIYYNDSGGLASILRRRLNMEDVDPRPAVGGSVCSINDGVRSMFSTRLSSFYGTRLFSVRPVSGRFYVCSNMRFILRFSVKKQKSCCLLFLCFAL

SEQ ID NO: 285049 - protein, 50 aa, Zea mays
  Clone ID: MRT4577_23065C.1.pep
VFSPLGRFRLPSKPKSLSPASASIHVTFGLHILITRLYHERTFIPKSKLP

SEQ ID NO: 285050 - protein, 140 aa, Zea mays
  Clone ID: MRT4577_23066C.1.pep
GPREVLRITSNTRHSSNRAGRNAKRSKRPSQTVDSLVVRAEGGIILNGDWPLSGIYVVIVCALFQFAFDVLDRIFVALPANVALVPGPSVCSLSELLCCVVQVVEGKRLTQTLRIGKHLAVRCPHKCGISWCRACSRPAA

SEQ ID NO: 285051 - protein, 66 aa, Zea mays
  unsure (1)..(66): unsure at all Xaa locations
  Clone ID: MRT4577_23067C.1.pep
GHLYSIHYPTQYNFITNKTITLPNLIPFQHIFLSTTLLITNIPTPITLPNXFTNLITNXTLTITSH

SEQ ID NO: 285052 - protein, 75 aa, Zea mays
  Clone ID: MRT4577_23068C.1.pep
AVPTGRRQVLYRALVMVADITAQLCSRRGKGLGGDELHAQCRIKRTTTPFAHARLLRTPHSPTDVISPTEEQTGH

SEQ ID NO: 285053 - protein, 110 aa, Zea mays
  unsure (1)..(110): unsure at all Xaa locations
  Clone ID: MRT4577_23069C.1.pep
MNPGSMVKEGSMAQEVFLGASDDRFFFEATLFTVKGVGTIKLKMNAVLPQKIVFGKLEVLTGVGSSNIWLEKDLGAPGNTXSVPLTAAGTNGFSCHPFQETVMVGKISVT

SEQ ID NO: 285054 - protein, 112 aa, Zea mays
  Clone ID: MRT4577_2306C.1.pep
LEAGRASELSVERKKKTGLMVRPSIQVSVCPTFGGSDPGVRAEVVHSLKEELNLMCGLSCSQRPSAYTALSIGRSKWNGQVGSSGVVITLETPLNNIGRPSLSVQLNGGFEL

SEQ ID NO: 285055 - protein, 270 aa, Zea mays
  Clone ID: MRT4577_23070C.1.pep
GRVGGRVGGRVGWAEEVRLGTYSARASTLPPAAIVATKAMLSDPRAEPRYAERVPYVVIHGEPGARLADMVIDPYGLLEVGSPYRLNEQYYITKQIIPALQRVFGLLGADLNKWFNEMPRPIRSTLAKRQFAAAHGSFSRDGSFIRLGLNNKTSAKGGRIDTYYMSSHCSICGDMIQGSESFCNNCLKSEAVVATVVAGRTSKLEREIQHLAAICGHCGGADWIVESGVKCISLACPVFYERRKVQRELVVVSESAGEAGYYPFCCAELF

SEQ ID NO: 285056 - protein, 78 aa, Zea mays
  unsure (1)..(78): unsure at all Xaa locations
  Clone ID: MRT4577_23071C.1.pep
SIHTTTIHASYVWCVALHILLDTNHMXLPFYQHRCSLTAGTPLTTCNNLLPFNQXCFDKPSSVLPTTHHWWCPLLDFL

SEQ ID NO: 285057 - protein, 105 aa, Zea mays
  unsure (1)..(105): unsure at all Xaa locations
  Clone ID: MRT4577_23072C.1.pep
FGGIRTPQAPKVFQSLFFQFLQQGCQKILFSPGASNLSPRDFLITGIGGFLGLXIQEGQKAIFFFGGNKVKKWPVQFRRSNPGGFPPGLNGSPLPHHHHQNMAFF

SEQ ID NO: 285058 - protein, 61 aa, Zea mays
  Clone ID: MRT4577_23073C.1.pep
RLKRMYVKLHGHLYFSLILQHHISMSFLLLIYTVLFLPLSNIFNSLLLLVLLPYILIFIFY

SEQ ID NO: 285059 - protein, 108 aa, Zea mays
  unsure (1)..(108): unsure at all Xaa locations
  Clone ID: MRT4577_23074C.1.pep
HSLSLPFSTVRYATLPTAGVNLNRGGCPPIPTKKKTHKLTNPLFHKRPKQFGICLALPTKNDLHRFVKWPTFMRIHRXLSILKQCLRVSSTLNQFTRTIYMNLCTKLF

SEQ ID NO: 285060 - protein, 71 aa, Zea mays
  unsure (1)..(71): unsure at all Xaa locations
  Clone ID: MRT4577_23075C.1.pep
SSFEEVIEARVITDRETGRSRGFGFVNYSDSDAAKEAISAMDGKEIDGRQVRVNMAXEGGGYGGGSQSYDA

SEQ ID NO: 285061 - protein, 71 aa, Zea mays
  Clone ID: MRT4577_23076C.1.pep
MYGKYLYFLKFSMDGKEIDGRQVRVNMANERPAGNRGGGGYGGGGYGGGGYGGGGGYGGFGYGGGSQSYDA

SEQ ID NO: 285062 - protein, 103 aa, Zea mays
  Clone ID: MRT4577_23078C.1.pep
LSYFGSRLISCSTPARITSRLNVRKMDSSPIVIVHLTLNNVPPGRHTRAVGARCATCATDGRELFPANGASLRCSSVFSRELVARATTAAGTLRARGSRFCVL

SEQ ID NO: 285063 - protein, 347 aa, Zea mays
  unsure (1)..(347): unsure at all Xaa locations
  Clone ID: MRT4577_23079C.1.pep
AWRGGAGHNGREPPPLSVFGIPKYHYKDLQKATSNFTTILGQGSFGPVYKAVMATGEVVAVKVLASDSRQGEREFQTEVALLSRLHHRNLVNLVGYCVEKGQRILIYEYMSNGSLARLLYGANKRSLSWQERLQIAHDVSHGIEYLQLQIAHDVSHXGLSTCMKGYXHLITIKVADFGLSKEEVYDGRKSGLKGTYGYMDPDYMSTNKLTKKSDVYSFGIILFELITAINPQQGLMEYINLAAIGGEGRVDWDEILDKDLLVGNIPEEVRMLADVAYRCVNKNPRKRPWISEVTQAISRLRQHQLIKHDAITLPRSETRTVLRRIDYQHVELSDLTSIKELTPIRAS

SEQ ID NO: 285064 - protein, 63 aa, Zea mays
  Clone ID: MRT4577_2307C.1.pep
PMFPHRNVLKKTPPKNESVAPLVAVLAAHPHELKANTLMGAPPVVPAMTERCDCSTCKLSPQA

SEQ ID NO: 285065 - protein, 128 aa, Zea mays
  Clone ID: MRT4577_23080C.1.pep
FFPRLATLNQNFFWLGKTNQFGLFKFFQAKPVKENKLFPVPLGEKKTPLGGKGLTPFLWGWVDSLIKGAAKFSFLKKEQSVNPTQFMLVTSLAPQGFPFFFCAPFFWGTPQGKKFFPRKKLCPWFAKV

SEQ ID NO: 285066 - protein, 109 aa, Zea mays
  Clone ID: MRT4577_23081C.1.pep
FLCKFTQYGYQGITKTGAKKMPHHIFPLRQHDFITKFGGGKMNFIGHKNRFSMARWKKGPFPLTIITIFTLYKVTSHFKLRYSLVSSIKPPPYFRKIYRPHHFGKTICV

SEQ ID NO: 285067 - protein, 65 aa, Zea mays
  Clone ID: MRT4577_23082C.1.pep
QKGLTGASITHVAKPKKNSNHMNINLYHRSGKNKSTRHSPICILPTQEELHPCTNRIPRPRQKHH

SEQ ID NO: 285068 - protein, 84 aa, Zea mays
  Clone ID: MRT4577_23083C.1.pep
VVREGDDDLFFLSLLQLSFLTFWKDRRLWPPPSVSACPAPACPPATPPLLLLACCLRAYPQRTQKAKTLAAPPSRPPTIRSSRT

SEQ ID NO: 285069 - protein, 57 aa, Zea mays
  Clone ID: MRT4577_23084C.1.pep
LQLQAHTNNLSLSCQITQDLKTSGIPTIIRFLFDFPDRTVLLWMVTRVDQVKGRESK

SEQ ID NO: 285070 - protein, 184 aa, Zea mays
  Clone ID: MRT4577_23085C.1.pep
LVPRAGREAIPAIRTCAVIAPAPPPLASREPRELDALESLLRLHLLYEPSSCATMILTTSCLYAMRSWRWSEQKSALPHGRMTNLLHRPQGIQVDSKSCGTPEDNFQTAAPYQEAGPPTARWNAPSPTMMRLLDPIYLTTHGEKILLLLLRRLQISHHPEMASDHHAIIHSHVQGAYATPKPEI

SEQ ID NO: 285071 - protein, 74 aa, Zea mays
  Clone ID: MRT4577_23086C.1.pep
TLLMGGAHLVAPNPPVSFSVHRLRVHRTPLYTRRRESRSDISAHGRPPPHVLGSWAVRGTRTPRRAAQPRAPPG

SEQ ID NO: 285072 - protein, 124 aa, Zea mays
  Clone ID: MRT4577_23087C.1.pep
VSMPLFSLASRSLGFRLKPGRLSRLSTLWRWQRNQRPPLGPRCQVVPVPQVAQGCADAPEVPGVPGVPDAPEAVDDLNGRGCHPSHPPSIRGSGPPSDHPGEPRATGPPASMVFIWVIRVIWGI

SEQ ID NO: 285073 - protein, 156 aa, Zea mays
  Clone ID: MRT4577_23088C.1.pep
IKKNNIESPNLSDQPLQRDLIVAPVKRRLVDEFKSCDLSHRQKRKVKLQGNSLQTQTPRRSPRLVNVNNTCNKNKKVSKGRAKVLKTPPDATDQVKDRAHKSCLLDEKLDNALKAVHEEATGSLSQDLRKLDSPRCEVGLSKEHGHDQGDTGKMLD

SEQ ID NO: 285074 - protein, 209 aa, Zea mays
  unsure (1)..(209): unsure at all Xaa locations
  Clone ID: MRT4577_23089C.1.pep
MFAAATDTTYTTLVWAMAELINHTHEMRRVQDEIRAAVGIDDDHVTEDHLEELRYLRCVIKETLRLHMPLPLLIPRETTVDTELLGYHVPAGTRVIVNAWAIARDPAAWERADEFVPERXLPATTSTADYLMPGQDFRFVPFGAGRRGCPGVGFXAVPTMELALASLLYHFDWELPAGVAAKLEMDEVNGLSVRRKAPLYLVAKAWSPQ

SEQ ID NO: 285075 - protein, 132 aa, Zea mays
  unsure (1)..(132): unsure at all Xaa locations
  Clone ID: MRT4577_2308C.1.pep
KPSTPLLKDELNMGIPTIRNLNFLERGGPFFQPYHLIMGQEGNPTKTIRAPGGLNYKLXNRNNINRFLGPRASXISLKDSACRCLGYMVSKKKYIYTMDDNCLVAKDPXGRDFNAFEQKIKNLLSPPTPFFL

SEQ ID NO: 285076 - protein, 1076 aa, Zea mays
  Clone ID: MRT4577_23090C.1.pep
MDGGDATNSGKHVAGQVCQICGDGVGTAADGDLFTACDVCGFPVCRPCYEYERKDGTQACPQCKTKYKRHKGSPPVHGEENEDVDADDVSDYNYQASGNQDQKQKIAERMLTWRTNSRGSDIGLAKYDSGEIGHGKYDSGEIPRGYIPSLTHSQISGEIPGASPDHMMSPVGNIGRRGHQFPYVNHSPNPSREFSGSLGNVAWKERVDGWKMKDKGAIPMTNGTSIAPSEGRGVADIDASTDYNMEDALLNDETRQPLSRKVPIPSSRINPYRMVIVLRLAVLCIFLRYRITHPVNNAYPLWLLSVICEIWFALSWILDQFPKWSPINRETYLDRLALRYDREGEPSQLAPVDIFVSTVDPMKEPPLVTANTVLSILAVDYPVDKVSCYVSDDGAAMLTFDALSETSEFARKWVPFCKKYNIEPRAPEWYFAQKIDYLKDKVQTSFVKERRAMKREYEEFKVRINGLVAKAQKVPEEGWIMQDGTPWPGNNTRDHPGMIQVFLGHSGGLDVEGNELPRLVYVSREKRPGFQHHKKAGAMNALVRVSAVLTNGQYMLNLDCDHYINNSKALREAMCFLMDPNLGRNVCYVQFPQRFDGIDRNDRYANRNTVFFDINLRGLDGIQGPVYVGTGCVFNRTALYGYEPPVKKKKPGFFSSLCGGRKKTSKSKKSSEKKKSHRHADSSVPVFNLEDIEEGIEGSQFDDEKSLIMSQMSLEKRFGQSSVFVASTLMEYGGVPQSATPESLLKEAIHVISCGYEDKTDWGTEIGWIYGSVTEDILTGFKMHARGWRSIYCMPKRPAFKGSAPINLSDRLNQVLRWALGSIEILFSRHCPIWYGYGGRLKFLERFAYINTTIYPLTSIPLLLYCILPAVCLLTGKFIIPKISNLESVWFISLFISIFATGILEMRWSGVGIDEWWRNEQFWVIGGISAHLFAVFQGLLKVLAGIDTSFTVTSKATDEEGDFAELYMFKWTTLLIPPTTILIINLVGVVAGISYAINSGYQSWGPLFGKLFFAFWVIVHLYPFLKGLMGKQNRTPTIVVVWAILLASIFSLMWVRIDPFTTRVTGPDIAKCGINC

SEQ ID NO: 285077 - protein, 391 aa, Zea mays
  Clone ID: MRT4577_23091C.1.pep
VFNLEDIEEGIEGSQFDDEKSLIMSQMSLEKRFGQSSVFVASTLMEYGGVPQSATPESLLKEAIHVISCGYEDKTDWGTEIGWIYGSVTEDILTGFKMHARGWRSIYCMPKRPAFKGSAPINLSDRLDQVLRWALGSIEILFSRHCPIWYGYGGRLKFLERFAYINTTIYPLTSIPLLLYCILPAVCLLTGKFIIPKISNLESVWFISLFISIFATGILEMRWSGVGIDEWWRNEQFWVIGGISAHLFAVFQGLLKVLAGIDTSFTVTSKATDEEGDFAELYMFKWTTLLIPPTTILIINLVGVVAGISYAINSGYQSWGPLFGKLFFAFWVIVHLYPFLKGLMGKQNRTPTIVVVWAILLASIFSLMWVRIDPFTTRVTGPDIAKCGINC

SEQ ID NO: 285078 - protein, 113 aa, Zea mays
  Clone ID: MRT4577_23092C.1.pep
GVAGRVFSRGLFVTEGVFVCVPFWVWFICARAKNSGKHVAGQVCQICGDGVGTAADGDLFTAGDVCGFPVCRPCYEYERKDGTQACPQCKTKYKRHKGMANRRHFHRFPCTPG

SEQ ID NO: 285079 - protein, 53 aa, Zea mays
  Clone ID: MRT4577_23093C.1.pep
TYVSSPVLYSHPPGQEQVPQDEAHEGYCEEFVSGLGCRLLVNFVLLDCCLCMM

SEQ ID NO: 285080 - protein, 33 aa, Zea mays
  Clone ID: MRT4577_23094C.1.pep
IYPFPSIYSISNVSTNICVRVSHLEKVIILILS

SEQ ID NO: 285081 - protein, 39 aa, Zea mays
  Clone ID: MRT4577_23095C.1.pep
STTVPANKLNPLACKCWHAAILSGGRLSQSNKTKQKRIK

SEQ ID NO: 285082 - protein, 49 aa, Zea mays
  Clone ID: MRT4577_23096C.1.pep
STDLSAMRSIYFSMPLSARLAKRLFVTFYDPASAKVSAIAFTMVVFVVA

SEQ ID NO: 285083 - protein, 447 aa, Zea mays
  Clone ID: MRT4577_23097C.1.pep
MTESLSVKLSPLGSHLTKLFQKDKEPAKTEKAARPKKQRIITVTEVIEKTPPRALAPKAPVVEDISATEAAPSEAIAAKAATAEDTELETTIANIDKILLDMAAEEAAAATEETSAQIGQELTKAEKEELKEYAISCGYRPGSFLFGGIDDEKLGCIRDQTGAKVIGTLSKSIGFPKLETDISHYRRQHIVGSLFYSNFKSMLLSKALKMQQDLEDKKHEVIIENLEGKIKDQSAALEKKDFELQTTEGLLAEAEAKITELNTKLLCQSESFEQEKQKLNEKFEAEVQKVSNLQKSLTSLQNKCLEFSTRCTQRLKVFYSVGASSEKFTPSAEDLPGAFEHIEGEIDDLDDVIAGHGDFYALVASRGTAAFLKSGCEHGKIINRPNFSLSPADLDDIPNLAQNITNKFIKVVWTKGGRDKASDETRSHLKPCLNSCRMTKPKPKLEE

SEQ ID NO: 285084 - protein, 269 aa, Zea mays
  unsure (1)..(269): unsure at all Xaa locations
  Clone ID: MRT4577_23098C.1.pep
LWDLSYNKLSGSIPDSLPTLPSLRVLNVSGNQLSDESLCKNYTGPLIFRRDFDGSVCNKPSPSPSRNKVAIIAISVVVPVLVLIVLLLXYFIWWQKRKPIVQPVPTHGSTRDPEPDNASGIKKSYGYNLNITENRQFTYKELEKFTNNFKKFIGQGGFGPVYYGRLEDDTEVAVKMRSESSSHGLDEFLAESLTKVHHRNLVSLIGYCWEEDHLALVYEYMPQGSLFDHLRXGKXWTAIGYWFKRNQVLLESAHGLDYLHNCLDLRNFF

SEQ ID NO: 285085 - protein, 292 aa, Zea mays
  Clone ID: MRT4577_23099C.1.pep
MIFLHFTDFQDTQLRQFDILINENESGPKLTAYNDTSYLTPTHVYTKSYRADDGKYNVTLAATKASVLPPMINALEIYIRVPYESPTTLPQDFDAIVAIKTEYGLSRNWMGDPCFPIKYAWDGVKCSNASGNTSRITSLDLSNSSLHGTISKNFTLLTALENLDLSYNKLIGSIPDSLPSLPSLRVLNVSGNQLSDESLCKNYTGPLIFSRDFDGSACDKPSPSPSRNKVAIIAISVVVPVLVLIVLLFTYFIWWVKRKSNVQPVPTHGPTRDPEPDNVSSQKSYGYNMNKT

SEQ ID NO: 285086 - protein, 89 aa, Zea mays
  Clone ID: MRT4577_2309C.1.pep
SPHAYGTHVASMKKVLCSYLGRKLITDWDERTKNSNQISMKRYDFQKKWPVEVSILVVLQISVILMTGDPLQVADLWLEGRFLSGLRQL

SEQ ID NO: 285087 - protein, 112 aa, Zea mays
  Clone ID: MRT4577_230C.1.pep
KQRTLSWSTIFTLTQACFWRPPCRSLNYSRPQRQKGCFILGHRAGGGEGCKSLCGRGFCRGTSLAGGRGPCQRVENFGLDPSCRGGPPPGERPPGGGGTPPRQGGKRDKTGP

SEQ ID NO: 285088 - protein, 87 aa, Zea mays
  unsure (1)..(87): unsure at all Xaa locations
  Clone ID: MRT4577_23100C.1.pep
VEVTLFDKLFMSKKPLKLXDRLGDFNPLSKXVIKDAYVVPSLAPEVLGDKFQFEELGDLAVDTSSTPNKLVCIKSVTLRDSFGKTGP

SEQ ID NO: 285089 - protein, 83 aa, Zea mays
  Clone ID: MRT4577_23101C.1.pep
IFFFFFFFFFSGKIYVRGHKNTRSDAPKIITPVPSSERYYPILWVGQNELYTMGDGCCHPEPIQTEYMLTIQLSWDLSLRRLP

SEQ ID NO: 285090 - protein, 101 aa, Zea mays
  Clone ID: MRT4577_23102C.1.pep
GYFGPFNSSSNRPHSLSFFQNSPLNRCYHPKVRGPFNKIPVPRVLFFFHPQFYSFPCLHIPLVFFFFWVWFFFLPFLVLLMRFLPKKKKKKKKRLCVVTTA

SEQ ID NO: 285091 - protein, 384 aa, Zea mays
  unsure (1)..(384): unsure at all Xaa locations
  Clone ID: MRT4577_23103C.1.pep
ATAAAASVTFTPRACSLSPSPSPCDDWVGYRRPTQGAENFADICAGEERPPDQALRRRAGRWMTMAGGGGXTGLHRGGSCRRKSCLTISAXRFLLNVPKEELESFERILFLLEQAHWFYEDNSVEHNPNLKSLSFKDFTSLMFKSCTALRPYIAHLDDIYKDFNNYKFRVPVSGAIILDDTYERCLLVKGWKAGASWSFPRGKRNKDEEDHTCAVREVLEETGCDVSRLLNLDDYIEVSIGQQRVRLYIITGVKRDTVFAPQTKKEISEISWHRIDDLLPASDDAVSRAVNGMKLYMVAPFLTGLKAWIATHPPPLHQKPETSARGTVWRAKGSSSGTTPVENPVAKAGSDVQHAADRPGCSFRNFRFDTASILQAMEASFLRT

SEQ ID NO: 285092 - protein, 39 aa, Zea mays
  Clone ID: MRT4577_23104C.1.pep
NVYRTGKVFFEVTKVTILNMFDLMDQSILDELVHLESIS

SEQ ID NO: 285093 - protein, 60 aa, Zea mays
  Clone ID: MRT4577_23105C.1.pep
LIITFSSMHAYLINKHILYMVVTSTVLASCSVYMYREKNGRMVVTSTSKHMVLHSTGEYC

SEQ ID NO: 285094 - protein, 94 aa, Zea mays
  unsure (1)..(94): unsure at all Xaa locations
  Clone ID: MRT4577_23106C.1.pep
PHLLKKKKKKKKKKKKKRKTNNIYDTNKTXCPPLLKYPILPPHSSHNITFLYAHLISIPWPYLYKYSFKKTLFYPILIYLKDILFSPFPIISKT

SEQ ID NO: 285095 - protein, 125 aa, Zea mays
  unsure (1)..(125): unsure at all Xaa locations
  Clone ID: MRT4577_23107C.1.pep
PPFPGGRRPILISSFFPINFSSSHSRSFSPPLLVLSSLRLLSFPSFSSSLHTSTVDDTLHLRPSHSPHGGVAPCTPQPRXPLPSRRRPSPGSGALPLAASASAAAPCPRPAVSFTSRAAVRNGPG

SEQ ID NO: 285096 - protein, 88 aa, Zea mays
  unsure (1)..(88): unsure at all Xaa locations
  Clone ID: MRT4577_23108C.1.pep
IDVMDHLFSCXTWHKGHTLAQTVFTCIYLMRMERTSSHAILNSFCRILRATCNAVISAVSTARTHEEEDLFTMSFGLPLRDEGDHKCL

SEQ ID NO: 285097 - protein, 81 aa, Zea mays
  Clone ID: MRT4577_23109C.1.pep
RCARPRNSYSDMGMLASLCLESGRLESSDGFRCRPRWLQDRPNKRTNNSNSYMTIFASLFLENVELEFGDGILYSRFARMS

SEQ ID NO: 285098 - protein, 104 aa, Zea mays
  Clone ID: MRT4577_2310C.1.pep
VVSSVHMTNKKCTFHFFFFQSTLSVSYSRTSTRSTIDVLFRKARTGAVIIRQFHTWVSQVEALPRTGKHVRHACYGGVGVQKQKRLHPESRLDGRPEKARRNSQ

SEQ ID NO: 285099 - protein, 86 aa, Zea mays
  Clone ID: MRT4577_23110C.1.pep
VTLQGPRCVDTLSRLEVLNRSVPLLNLRSVNARPDIKSQSNLLLRAFVGFLPDKSEIRGGLIGGPHDIYKDVHRKGHKLIIKKKNK

SEQ ID NO: 285100 - protein, 53 aa, Zea mays
  Clone ID: MRT4577_23111C.1.pep
LHNLTSVSGQGWSCMTIAHGAHWIHSGRTDDDWLGVVSDITSCGKKKTAIKCS

SEQ ID NO: 285101 - protein, 402 aa, Zea mays
  Clone ID: MRT4577_23112C.1.pep
IRHEAESSITDKSEVSLHQSKGKFCMKRTRESDSDGESELEENVISGNTSSSSLESTKHEDARLEPTTFISFDWENEAPYEKAVERLISEGKLSDALAVSDRCLRNGASDNLLQLLIEQKEEKGPGTGQIHPYVANSLGNDTSQYCLRLRDKKVAAQLALKYLHSWDLDAATNVLTMCMCHLPENDPMRSEVLHMKQSLQRYGHIMSADEHYTRWQEVEADCEDDPEGLALRLAAKGAVSAALEVAESASLSIDLRRELQGRQLVKLLITDPLNGGGPAAASRFLATLRDSNDALPVAIGAMNLLPDLRSKQLLVHFFLKRTVGNLSDAEIARLNLWALGLRVLSLLPLPSQQRCSSLHEHPQLIVEVLLMMKQLQSASLILKEFSSLRDDKLIIAYAKKAI

SEQ ID NO: 285102 - protein, 68 aa, Zea mays
  Clone ID: MRT4577_23113C.1.pep
ILGKGSRAFFFLGGLNPPQLTWGFFQAFSTFQKKKKKKKKKKKKKKKKKKKKKKKKKKKKKKKKKKKK

SEQ ID NO: 285103 - protein, 170 aa, Zea mays
  Clone ID: MRT4577_23114C.1.pep
MALQAQASPSPSTSPTRERTASGEWPDDVEKLPAGASASPPYSSDAVELVVVASTHHAAAARYSEAVNVIGFLYSVFQFVALVELMRRNKHLIPHRKRGLFDFTMDQVLAYLLISSSSSATARVSDLIDNWGSDPFPTMANGSIAISFMAFAAFGVCSLISAYNLFRRDM

SEQ ID NO: 285104 - protein, 130 aa, Zea mays
  Clone ID: MRT4577_23115C.1.pep
GKKNGSGGVLMGKNYAGQKQGGFPGLSKQELGKFLPFLSKKLKIYVGGGFFPPFVLDGGLDFPTLGNIPLGGGNRPPKRLWSKRLPFVFQSGHFFCKQSLCLRFGCKKKKKKKKKKKTKQKKKKKKKKKK

SEQ ID NO: 285105 - protein, 64 aa, Zea mays
  unsure (1)..(64): unsure at all Xaa locations
  Clone ID: MRT4577_23116C.1.pep
EQYYVQPAPGPAVADDATCLAPDXRLHPTDEELVSYYLKRKVLRRPLKADAIADVDLDTLEPWD

SEQ ID NO: 285106 - protein, 35 aa, Zea mays
  Clone ID: MRT4577_23117C.1.pep
PLAGWYDDSLHAFLPYDRQWIKQKLFQHLKRMAQQ

SEQ ID NO: 285107 - protein, 119 aa, Zea mays
  unsure (1)..(119): unsure at all Xaa locations
  Clone ID: MRT4577_23118C.1.pep
GPPVRDKGKGLNYNNLFYPMVDPVFPPLKKAGAPNVXRVFVSKNGWPPAGGFGARVYNAGKYNQGFFAPVGPGTPKRTGPLETFVFPMFNKNQKGGVPPEKNFGLFFGNKQPVYPIRFN

SEQ ID NO: 285108 - protein, 70 aa, Zea mays
  Clone ID: MRT4577_23119C.1.pep
AMPGHSGCQEGRKQLMLCPHSPSGSAPGREARQCLLVCNTFHTGRGNPKDGLWRPRRPVRWCDFPSPANK

SEQ ID NO: 285109 - protein, 74 aa, Zea mays
  Clone ID: MRT4577_2311C.1.pep
SVAALFLLYFFFFFYVCFYVFFFFFFIGNQKGDCVLPWKTIKLQNYIRLMINHTGDPFFVSGNLNNKGSGIELT

SEQ ID NO: 285110 - protein, 103 aa, Zea mays
  Clone ID: MRT4577_23120C.1.pep
MAGRHTIILMQPSQNRSTRTFMDYDSVNHALDGICGLYERKIRNINPMVRNLTYDIGDLYNFIDGLTDISALVYDDSLHAFLPYDRQWIKQKLFQHLKRLAQQ

SEQ ID NO: 285111 - protein, 107 aa, Zea mays
  unsure (1)..(107): unsure at all Xaa locations
  Clone ID: MRT4577_23121C.1.pep
FPGVXAGAGXASXAPXLLXSVPPSPXAQPASGAGFPSXRGAWGQXRRRRRIXANLRXVPTRVATETTMSGXSTPLAAAVXAXPQWGXLVXLPGAFRCAARLLPCXXG

SEQ ID NO: 285112 - protein, 103 aa, Zea mays
  Clone ID: MRT4577_23122C.1.pep
MAGRHTIILMQPSQNRSTRTFMDYDSVNHSLDGICGLYERKIRNINPMVRNLTYDIGDLYNFIDGLTDISALVYDDSLHAFLPYDRQWIKQKLFQHLKRMAQQ

SEQ ID NO: 285113 - protein, 63 aa, Zea mays
  Clone ID: MRT4577_23123C.1.pep
QPLSCSHDDSSTTSYRDSPMYLITCSECSSTFSEINFLASGFSSITPANKHKIICFDGLRIST

SEQ ID NO: 285114 - protein, 176 aa, Zea mays
  unsure (1)..(176): unsure at all Xaa locations
  Clone ID: MRT4577_23124C.1.pep
TIMAEKFGVPPPPPFLSLRMTGKDVLGGVNFASGGAGILNETGVYFVQYLSFDEQISCFEIVKRAMIAKIGKDAAEAAANAALFQIGLGXGRPWSNDYINNFLQPFMADGTTYTHDQFIRLLITALDRQLKRLYGLGARKVAFNGLPPLGCIPSQRVRSTDGKCLSHVNDYAVQFN

SEQ ID NO: 285115 - protein, 65 aa, Zea mays
  unsure (1)..(65): unsure at all Xaa locations
  Clone ID: MRT4577_23125C.1.pep
DLIGPTVTTTDQQDPLIISARTARCFSDSSVGKTNTSFRLRSTRAPNFYTGTXMPSPRITLSSPG

SEQ ID NO: 285116 - protein, 65 aa, Zea mays
  Clone ID: MRT4577_23126C.1.pep
VRLAMVNLLIQCRKRGIRGGASWMAEREAGGSSVCVGRPSRIRNLPRDARGWVERKPEDEWADAW

SEQ ID NO: 285117 - protein, 86 aa, Zea mays
  Clone ID: MRT4577_23127C.1.pep
AATDASANPSFFRRNTFFVCPSLPTRQGVLLRTRRTSPQKDGLSGGSLELLPVQDDAHTQQREPQVQYTVFLHTQSHIPILQNHQR

SEQ ID NO: 285118 - protein, 230 aa, Zea mays
  unsure (1)..(230): unsure at all Xaa locations
  Clone ID: MRT4577_23128C.1.pep
MEVVASSDQYRSSSSSASSPARRYYLPKPGALRRPISFEDSPDWDDIHPDDTIHLATAASASISIASSAYPSPSPSLPQGSSSASAACRDRKVAGVTLVWKDLTVSSLAAATNRFSDRLVKSSNGYALPATLTVIMGPARSGKSTLLRAIAGRLSSTERIYGXVFVNGAKSPLPYGSXGYVDRDDVLIESLTVREMLYFSALLQLPGFLSSKKQFVXDAIAAMSLGDHAD

SEQ ID NO: 285119 - protein, 114 aa, Zea mays
  unsure (1)..(114): unsure at all Xaa locations
  Clone ID: MRT4577_23129C.1.pep
PRRPVSSLLNSRLPHSFYGAIIAVFRWVYSECGRAALYRGVRTTLMRILTYAGLKHYIYERLKVHVPQDYTCYVTSKLTYNAXVGLFEQTLTYSLYVVRRQMQVQNQQQHEQLG

SEQ ID NO: 285120 - protein, 120 aa, Zea mays
  unsure (1)..(120): unsure at all Xaa locations
  Clone ID: MRT4577_2312C.1.pep
LSCANTRTADSLRRVGMLLDXLSSNAARYRPTGRTHTDMVEGIEMSVRGIHVGHYLLASLLPHDMHKFVYRHHQXWMVGLITGNTNTLDRNMPAMDGLEDTRRLSAGVHEQNGSGNIDGS

SEQ ID NO: 285121 - protein, 104 aa, Zea mays
  Clone ID: MRT4577_23130C.1.pep
KLGRVFRRWVYLTDFTTLSSTYHLCGGQRYYAQRVYVTFYLSPTCRATYVYRNHDKLDLIHEDGDWYILLGSDGLIDEFTNNENVLVVYQFMHDNPMGDPAEYF

SEQ ID NO: 285122 - protein, 119 aa, Zea mays
  Clone ID: MRT4577_23131C.1.pep
KPGQKDPRGTGGEAKSLLSLTALGGHIHHSKTKLVQGKALRLSVGKTPIKKQGFFSSWFPQISPPSGVQEIGPQFINSGSPFRRGPPKKNGFSWGTGGTSLTGEHPFLRRGSQIGGPFW

SEQ ID NO: 285123 - protein, 72 aa, Zea mays
  unsure (1)..(72): unsure at all Xaa locations
  Clone ID: MRT4577_23132C.1.pep
CXXLASXXVXLXFXLLXLXXSFLXXLLXXXAPLCXXVGLLXXLVXPXXXXLRLFLXSFXFFXXFXFXLXXFF

SEQ ID NO: 285124 - protein, 140 aa, Zea mays
  Clone ID: MRT4577_23133C.1.pep
TAKRGAERGRSQMPREHVRMNTMLINSKPCYDVSRKTSLDLGKPRHRERTIHCMFEGREGRRRSRRMTRPECLPLRGLIDDDYIHVFTDHAEVYGQYLQEGCAADIARYARRTQGGSRGKLTRYAETLAMCLYPNRTCPK

SEQ ID NO: 285125 - protein, 175 aa, Zea mays
  Clone ID: MRT4577_23134C.1.pep
RLIGNLDDKVPERVLYEILIQVGRVVDLHIPRDKETSRPKGYAFAEYETEEIAQYAVKLFSGLVRLHNKTLRFAISGQDKPSLNGNIPVTPRLNSVPQPKPHQPMRSSDTPLPQHAAVNGRNAGYGIPPNHSYDTHTQGEENSGHFGIQVNVELCVKSHNSPFDQHCRVGYRIED

SEQ ID NO: 285126 - protein, 123 aa, Zea mays
  Clone ID: MRT4577_23135C.1.pep
MELGELCAEANREMGAAASTGEQQRRRHARKPLGWALELEAERSSRLGRAADRLKEGADAVRVETRERPSTREEEKERAVVTSRSAESRKSARRKWRLRQLQEESREGFGMTLGRQEKSRARP

SEQ ID NO: 285127 - protein, 76 aa, Zea mays
  Clone ID: MRT4577_23136C.1.pep
IIQGILLVLMLALLSAVGGLLCNWCGFMSLFGASQVLWRVTVVAVINAFLCCSEAVFVSGGSVPTSHHVHKIQSCL

SEQ ID NO: 285128 - protein, 146 aa, Zea mays
  unsure (1)..(146): unsure at all Xaa locations
  Clone ID: MRT4577_23137C.1.pep
PTKKTYKSPPPXIPRTTPPGPGPLRNKPLTPKPRFQPPPWPPPPXVWAPIPPWPPPTTFPPXPNPLFLGPPFYFPEPPRRXPFPKPPRSHPPKPRATPKSXGPPFRPFGAPPRPKDXTPPSPWGPGSAPVWPSRXRRNPPRNPPLF

SEQ ID NO: 285129 - protein, 390 aa, Zea mays
  unsure (1)..(390): unsure at all Xaa locations
  Clone ID: MRT4577_23138C.1.pep
SNDGDYEHTSAAAAAAAAGGGGGGRGGGRRLWVKERDHEWWDRMSSPACPEDEFRRAFRMSRATFEAVCEELGAAVAKEDTMLRAAIPVRQRVAVCIWRLATGEPLRLVSKRFGLGISTCHKLVLEVCAAIKAVLMPKAVQWPEAPDAAAAESARFEAASGIPGVVGAMYTTHIPIIAPKANVAAYYNRRHTERNQXSYSITVQGVVDAGGAFTDVCIGWPGSMSDADVLDRSALYLQRGAAGLLQGQRLVGGAGYPLMDWLLVPYTHHNMTWAQHVFNERVDGVRAVARDAFQRLKSRWGCLQKRTEVKLQDLPVVLGACCVLHNICERAGDAVDPDIAFQLFDDDMVAENPVRSTAAVAARDSIAHNLLHRSRGSSSSAAAGPRFAFN

SEQ ID NO: 285130 - protein, 212 aa, Zea mays
  unsure (1)..(212): unsure at all Xaa locations
  Clone ID: MRT4577_23139C.1.pep
MAATPLPITSPPPPPTPPLPQPPTAATIRSLTAAGNHAAALHALSSLSAASSSHAPLDHFALPPAAKSAAALRSLIAVRSIHGAALRRDLLHGFTPAVANALLTAYARCGDLTAALALFNAMPSRDAVTFNSLIAALCLFRRWLPALDALRDMLLEGHPLSSFTLVSVLLACSHLAEDLRLGREAHAFALKNGFLDGDERLAFNALLXMYAR

SEQ ID NO: 285131 - protein, 151 aa, Zea mays
  Clone ID: MRT4577_2313C.1.pep
MPPKKTATRAPQENISLGPSVRDGELVFGVARIFASFNDTFVHVTDLSGRETITRVTGGMKVKADRDESSPYAAMLAAQDVAARCKELGINALHIKIRATGGNGTKTPGPGAQSALRALARAGMKIGRIEDVTPTPSDSTRRKGGRRGRRL

SEQ ID NO: 285132 - protein, 58 aa, Zea mays
  unsure (1)..(58): unsure at all Xaa locations
  Clone ID: MRT4577_23140C.1.pep
CSPSRCWGSLCVAVALRGVARLPGSSRXGAVGSCCCAALIGLAKVDALARAVSICVNV

SEQ ID NO: 285133 - protein, 107 aa, Zea mays
  Clone ID: MRT4577_23141C.1.pep
IQPSRSVSLPAFMRCTWAAPVGRSVGCASFSCDIFVVPVPVACGSVPARLHLFRSVRLARLIAIHYWPVSWSGSLLCSRPCVLLSGRSPMGSGSSMSPDLGVSACRY

SEQ ID NO: 285134 - protein, 73 aa, Zea mays
  unsure (1)..(73): unsure at all Xaa locations
  Clone ID: MRT4577_23142C.1.pep
WCWKLGKKRRAPLYLGGGPDRKGREKKPPRKKGQTEGKKKKXXXXKKKKKKKKKKKKKKKKKKKKKKKKKLEK

SEQ ID NO: 285135 - protein, 99 aa, Zea mays
  Clone ID: MRT4577_23143C.1.pep
APPGNPKADEKIFKTKCAQCHTVYKGSGHQQGTNLNALFGRQSSTTGGYSYSAGNKTKLGSGEENTLYDYLVYPKKYFPGTKMAFPGLKNPEERADLIA

SEQ ID NO: 285136 - protein, 44 aa, Zea mays
  Clone ID: MRT4577_23144C.1.pep
TVLDRERPPFFFLYFFFLWVFGNFFFIFLFTILFYLYFLNLFDF

SEQ ID NO: 285137 - protein, 72 aa, Zea mays
  unsure (1)..(72): unsure at all Xaa locations
  Clone ID: MRT4577_23145C.1.pep
LTPVVQTLGVPNAXALFIWLCGPISGLLEQPIVWYSIDRCRFRFGRRRALIFVXTILVTTVAFLNGYAAYLG

SEQ ID NO: 285138 - protein, 62 aa, Zea mays
  unsure (1)..(62): unsure at all Xaa locations
  Clone ID: MRT4577_23146C.1.pep
INHLLLNNLCTYLIRQTSVIDGFTLKMSLPIYKKMFIVXXXEXKKKKKKKKKKKKKKKKRAA

SEQ ID NO: 285139 - protein, 72 aa, Zea mays
  unsure (1)..(72): unsure at all Xaa locations
  Clone ID: MRT4577_23147C.1.pep
QCPGMGIQRRGLVEGKYWPGSWRCWCRWHGVVLRSESPGASGLGKYACITSSVSCSYTRSGSKLKVCSXISA

SEQ ID NO: 285140 - protein, 161 aa, Zea mays
  Clone ID: MRT4577_23148C.1.pep
ERLFAWAADARLPGRVTASVCDVSARGDREALVAAARAELGPRLDILVNNAGQSMFRAATEMAAGDYARLMATNLESCFHLAQLAHPLLLAAGAGAGAAVVNVSSIAGLVAYPALAAYSATKGGLNQLTRSLAAEWAGDGVRVNCVAPGGVQTDMFSNGRA

SEQ ID NO: 285141 - protein, 233 aa, Zea mays
  Clone ID: MRT4577_23149C.1.pep
MNVHMQQQHHLRQLRAVLLRRGHPVPPPPATHPDPDRAFLAAIRAAASSAPRLVLAACACLRRAGLPAPGPRALPALLRSAARCEGAGAYVAATHALAVRTGALDDGFVGTALAGAYAACGCVRDTRKVFDGMAVRDVVSWGVMLDSYCQTRNYKEALLLFAKMKNSGVVPDQLILATVLPACGHIRHLRIGKAIHSYMLVSDMIIGAHISSALISLYASCANMEMAEKLYNE

SEQ ID NO: 285142 - protein, 381 aa, Zea mays
  Clone ID: MRT4577_2314C.1.pep
MLGSLQTEVSALEEQTLSLANDHLHTNKLRMEENALSPHLVKTTTRSSGEENALRMVKGMELQKLHGTIKALQKVVTDTGVLLEQERLDFNANLKEAKKQIEVLKLKEILDDDIIEMNYEQMLKDIQLDLIQTSSGQKTSPFGQEKKNVAQVDDKMVNSRGSIGPSHGHVADDLRPPQSESFGRENNLMVVKELSIDKQELPRSLAMEPHEEWRNKVVERLASDAQRLSALQSSIQELKTNAETSEEVELGSVRYQITEAEGTIMQLIDTNSKLSKKAEEFTSPDGPDAENSDLRSRHQRKILERARKMSEKIGRLEVEMQKVQQALLKYEEEQSTRSTSKALQRRSKVQLVEYLYGRRRDSRKQQRNSPCGCMRAKTIDD

SEQ ID NO: 285143 - protein, 86 aa, Zea mays
  Clone ID: MRT4577_23150C.1.pep
PESAAWLPLPYDADACPALSCRYPLPGAPSCARKAEAHFGEFLAKLRVIDRYLQMTPCCISQSIPLRVVRTDCSIEPGHRNTWCKD

SEQ ID NO: 285144 - protein, 38 aa, Zea mays
  Clone ID: MRT4577_23151C.1.pep
RHVFGILGVWYTTFGPTRSKQDGYSILLPQYNFLCFIQ

SEQ ID NO: 285145 - protein, 100 aa, Zea mays
  unsure (1)..(100): unsure at all Xaa locations
  Clone ID: MRT4577_23152C.1.pep
TWGNLPLQIFFFFFFPXXPSGGGGGVFFGAPGSPNREGEFFPGPPGLLISFSENSPFRVGPLVQPTEGGRPTPXFLGVGGWXRFFFPPPGPRTVPRFQGS

SEQ ID NO: 285146 - protein, 165 aa, Zea mays
  unsure (1)..(165): unsure at all Xaa locations
  Clone ID: MRT4577_23153C.1.pep
GRVQEHQEMLHCPSKAMDIENEIQVLCDQLAKKSSDSLRLLKELELHRXTXENDMPLYELKGLETLGSTLHIVVHDCASVDFWNSSIQWFRIQPEGSKKEIIXGTTKPAYAPEPHDVGRYTQAEVKSGGQTSITKIAGSVDPXVAAGLVHYVEALVRRRETGYNV

SEQ ID NO: 285147 - protein, 168 aa, Zea mays
  unsure (1)..(168): unsure at all Xaa locations
  Clone ID: MRT4577_23154C.1.pep
LSQVILTAASFNPHLWYRIGQASTDAKRIIDEERANARLEIGSAKASVQKIQSALKEQEKFSHRTGKQDVDELKEEVQEARXMDIENEIQVLCDQLAKKSSDSLRLLKELELHRSYGENDMPLYELKGLETLGSTLHIVVHDCASVDFWNSSIQWFRIQPEGSKKEII

SEQ ID NO: 285148 - protein, 191 aa, Zea mays
  unsure (1)..(191): unsure at all Xaa locations
  Clone ID: MRT4577_23155C.1.pep
RPLFPPPPPPPFFPGYFPPRGAPPPRGPPQGKPPRGPPPARPXSPGGANRRGPPFPAPPGPGXSPVGXARPPPEPPPDHGAPKAAPPXPRVAPFGPPPGPPXSGFLLGGARHATNVSPLAHXAPGFAPPASPPYNVRPCGPPAPSPXPAGPRGPPGSGPTHQGEPWTPTKKQKKNKRKNKKKKKKKKKKKK

SEQ ID NO: 285149 - protein, 235 aa, Zea mays
  Clone ID: MRT4577_23156C.1.pep
FHEASWRQQLPAFYPGGGVTVADPSSQLATMGAQDATALSVQQGRARTAAENLVHVPAAQVSLPGALALGNFEQELGEDALLPPVLSQEQQDAVKRYNHLMGVHVAYFRVCIDPTVASSRRLLQQAIQDLKNHCAGDALVAHYYVNNRNNNDPADQPDTTTAIRQQAIARSADASSRQHHGACRGFNDHHGGGVVPSVHREEEEALAAPVVAMSMSPALAARGHQGQSRSFLCRS

SEQ ID NO: 285150 - protein, 245 aa, Zea mays
  unsure (1)..(245): unsure at all Xaa locations
  Clone ID: MRT4577_23157C.1.pep
WPHAPLPPPRRRRLVVLLQLHGGXRVASEPPYSCGAGASPNIPFCDVGLPIDRRVDDLGSRMTVAKKTSQLGDQSPAIPRLGVPAYKWWSEALHGIFNQGRGIHLDGPLRAATSFPQVILTAASFNLHLWDRIGQDVDELKEEVQEAPRVKMLHCPSKAMDIENEIQVLCDQLAKKSSDSLRLLKELELHRSYGENDMPLYELKGLETLGSTLHIVVHDCASVDFWNSSIQWFRIQPEGSKKEII

SEQ ID NO: 285151 - protein, 63 aa, Zea mays
  unsure (1)..(63): unsure at all Xaa locations
  Clone ID: MRT4577_23158C.1.pep
PGPASPAAPPPLAPSPLPTPPGXDPLYLAAPPPRSLSIYICCHSVYRPPFSCLVAPIMYAWTK

SEQ ID NO: 285152 - protein, 335 aa, Zea mays
  unsure (1)..(335): unsure at all Xaa locations
  Clone ID: MRT4577_23159C.1.pep
MTRASTIDFGRRKQSELFGSGPLRPANIIRNKFPTYKNGSNGIVIKLADGPEMPSLKEAVAKEATDLLDRCQRPSVRELTMKFEKGFNAATLLSNEAKWRHAALLERDILLKDLKSVLESLRGRVGGKNKDEIEESLSMVDILAIELSKREDELLRQKTEVTKIADTLKRASTDAKRNIDEERANARVEIESAKASVQKIQSALKEQEIFSQRTGEQDVDELKEEVQEARRVKMLHCPSKAMDIENEIQVLRDQLAEKSSNSLRLLKELELHRSYGENDMPSYELKGLETLRSTLHIVGHECASVDFSNSSIQWFRIQPEXSKQEIISCATKLVY

SEQ ID NO: 285153 - protein, 107 aa, Zea mays
  unsure (1)..(107): unsure at all Xaa locations
  Clone ID: MRT4577_2315C.1.pep
PRVRGSLLSLYLLPRAVFLLLAACCSFASGGVNNYNTSDAAARQLQWGNARATWYGQPNGAGPYDNXPLYRDGKGCGSCYKIRCSKHAVCSGRTETVVITDMNYTPG

SEQ ID NO: 285154 - protein, 74 aa, Zea mays
  Clone ID: MRT4577_23160C.1.pep
YGGLSLEMKGHVIFLSTKNNTCLLVIFPLDKRTLCFYVQPILANSLFGFLMNHVCMLLLDQSPPPLPTIMFWQA

SEQ ID NO: 285155 - protein, 47 aa, Zea mays
  unsure (1)..(47): unsure at all Xaa locations
  Clone ID: MRT4577_23161C.1.pep
DIHFRGXKKITGNVYSGVGNYQVYVCIHMYSCFVIMEHEIQHIYTVQ

SEQ ID NO: 285156 - protein, 185 aa, Zea mays
  unsure (1)..(185): unsure at all Xaa locations
  Clone ID: MRT4577_23162C.1.pep
MEGRARLSLLHAVAAALVVLLQLHGAAVVVASEPPYTCGAGAPPNIPFCDAGLPIDRRVDDLVSRMTVAEKISQLGDQSPAIPRLGVPAYKWWSEALHGISNQGRGIHLDGPLRAVTSFPQVILTXASFNPHLWYRIGQVIGVEARAVYNNGQAEGLTFWAPNINVFRDPRWGRGHETPXEDPTM

SEQ ID NO: 285157 - protein, 62 aa, Zea mays
  Clone ID: MRT4577_23163C.1.pep
MPSTDSCLIRLCVSSLVMASVKRFRVTGKDKIVRRCAGKQHLLAKKNTKGKKRLSKMVYRWK

SEQ ID NO: 285158 - protein, 100 aa, Zea mays
  unsure (1)..(100): unsure at all Xaa locations
  Clone ID: MRT4577_23164C.1.pep
RGAEHGTGGQAGKGEDXXAFIHKAGARPGDAVLPVRTKETEANRAAVGAGARPGCAHLLFPAEAVVELRRDAMHRECCKYSPFEIYSDMARFGGPRWDDK

SEQ ID NO: 285159 - protein, 49 aa, Zea mays
  Clone ID: MRT4577_23165C.1.pep
RCTFICRNSVKLYLCLQKTGHICTMLIRFPSYPLNCVGNIWIACLICCT

SEQ ID NO: 285160 - protein, 55 aa, Zea mays
  unsure (1)..(55): unsure at all Xaa locations
  Clone ID: MRT4577_23166C.1.pep
CSVKVDXSAXTRDFITTXXYVRSPXXLTFETXRHXTFPFXFLSLQNXXVXSXXSL

SEQ ID NO: 285161 - protein, 275 aa, Zea mays
  Clone ID: MRT4577_23167C.1.pep
SPLKPFFPRPGWHASVGPPPAAPAPVRLRLIFENSRLLRRVQRDEGLRRCWLLLSPELATVANLAAHVAARFRLRRTCPRGVVLSMDGFTLPPFESTCIFRDNDIIRVKQKSCTKHIEHNDVHCIQDHEIIEKRSLPVDGKILAIQDKEDVCKHQEEEAHDDHQLEENATASHSTENNGTSLKRKRNDGVADIPESSKGQRLKVTNSGKHIDYSKKEQNGSKKLKLSVIDIEAKKATPQHETTTTLVEQQKSEGYYSQGICQLLLLSFKALWFEK

SEQ ID NO: 285162 - protein, 43 aa, Zea mays
  unsure (1)..(43): unsure at all Xaa locations
  Clone ID: MRT4577_23168C.1.pep
TPAILPHECLIVPYXAEAHALAPSTPPPLSRIRSXGSNTSGEC

SEQ ID NO: 285163 - protein, 124 aa, Zea mays
  unsure (1)..(124): unsure at all Xaa locations
  Clone ID: MRT4577_23169C.1.pep
QNNILKHLEQNETEYMRLRRHRMGAEEXYNSRWVGRXAKGEARIFLEKTGGRGDAIIKLTKSEMLGRGQVEHVKAERNLVAESDXGYLGKLYDSFQTRRVYMCIMEYLAGGXDLMTLLIRTGMT

SEQ ID NO: 285164 - protein, 188 aa, Zea mays
  Clone ID: MRT4577_2316C.1.pep
MEPHMESALRQGLSEAEQRELEGVVRAHHTFPGRAPGTCTSLVTQRVDAPLAAVWPIVRGFGSPQRYKHFIKSCDLKAGDGATVGSVREVTVVSGLPASTSTERLEILDDHRHILSFRVVGGDHRLRNYRSVTSVTEFQPGPYCVVLESYVVDVPDGNTEEDTRMFTDTVVKLNLQKLAAIATSSSAN

SEQ ID NO: 285165 - protein, 431 aa, Zea mays
  unsure (1)..(431): unsure at all Xaa locations
  Clone ID: MRT4577_23170C.1.pep
GVLLPISLDLMRDPVVXSTGQTYDRTSIIQWIEEGHSTCPNSGQALADNRLVPNRALRSLISQWCGVHGFQFDSPESNEGMIECVAASCCSKAAIEANKATARILVRMLMEGSVSAKPIAAREIRLLAKTGKQNRAFIAELGAIPLLCKLLLSSDWMAQENTVTALLNLSIYEPNKARIMEQADCLHLIVSVLKNGRTTEAKENAAATLFSLSVVHDYKKKIMNEPGAVEELASMLTKGTARGKKDAVMALFNLSTHPESSGRMLESSAVLALIESLRNDTVSEEAAGALALLMKQPTIVHLVGSSETVITSLVGLMRRGTPKCKENAVSALYEICRRGGSTLAQRVARIPGLNTVIQNVTLTGTKRAKKKASLIVKMCQRSQVMPSALAPLGSTLTVVDHSLVGNGTLRRAASFGSEELSNPVSISVPVP

SEQ ID NO: 285166 - protein, 61 aa, Zea mays
  Clone ID: MRT4577_23171C.1.pep
ILNLPGSMLRTKSAQQQTLYDFQVTTKPAENQNLCQLLNLNSRHFSRQTGIIFILQEARLP

SEQ ID NO: 285167 - protein, 76 aa, Zea mays
  unsure (1)..(76): unsure at all Xaa locations
  Clone ID: MRT4577_23172C.1.pep
KKKKKKKXKKKKKXKKKKKKKKKKKKKKKKKKKKKKKKKKKKKKKXKXXXKKKKKDKNKGPQTKPKILEEFHQCKK

SEQ ID NO: 285168 - protein, 115 aa, Zea mays
  Clone ID: MRT4577_23173C.1.pep
KPTSPPRRKTGAPPRLIKDLASTKPKKISLRSTTCCCSPVAHLPLLCAYVRHLLTGYSTARRSMTFEEHAAHDNDHARQRYLRPAARSNTFPRTSRMSATTLTWSQRLPYLPDLS

SEQ ID NO: 285169 - protein, 188 aa, Zea mays
  Clone ID: MRT4577_23174C.1.pep
ARDGSEPEPEAYPSEQLSDEALVEDLLAALAAARSFQEFRRSQRKESFGLQRWLQLVLPLIQEIREIAPSLSDDAYRRLALLGRAFHAARRLLRCCHDGSKIFLSLESEAVLGRFRAVYEKMNLALDGMPYSEIGISDEVKEQVELINAQLKRCKKRSDTQDMELSMDFMMILQNKDGNADRAILERL

SEQ ID NO: 285170 - protein, 235 aa, Zea mays
  Clone ID: MRT4577_23175C.1.pep
MRTPRAVSSSCLALSGFLLLVAVSVAATGYAASPGESSNGYGAAAGSNGGGQEGSYTVPPYQKPVDGLDGRYYGRSCPKMEEIVGTAVMKAVKADETLAASIIRLFFHDFAVGGVDGSVLVDVPGQSEKYAEASRTLRGFELIEGIKKEVEAKCRATVSCADILTAAARDAAFSAGAPYWSLKYGRRDRKDYSSVEAPERDVPMGGQRVTELVASFETKGLNIQDLVALFGAHTI

SEQ ID NO: 285171 - protein, 41 aa, Zea mays
  Clone ID: MRT4577_23176C.1.pep
GFGVLPPSYLPPPAFLSSFNPLVVWVSLLKWEAFFPLLSGY

SEQ ID NO: 285172 - protein, 59 aa, Zea mays
  unsure (1)..(59): unsure at all Xaa locations
  Clone ID: MRT4577_23177C.1.pep
SQTQPIQLRRPRPWFCPPHLPPPPPNQRLLFNLPRLKTDQPPILTPAQQQHEPFHLXIE

SEQ ID NO: 285173 - protein, 101 aa, Zea mays
  unsure (1)..(101): unsure at all Xaa locations
  Clone ID: MRT4577_23178C.1.pep
SWASRATWAWMNPLVQRGHXLXLELSDVPTLAPSHRPERMHELFTLHWPSAWASKDNNPVRHTLFRTFWAQFLLNALLALLRLTVMYVGPTLIQSFVDFTS

SEQ ID NO: 285174 - protein, 48 aa, Zea mays
  Clone ID: MRT4577_23179C.1.pep
SSTSFACFGPLIQSLLHGPAHHLYITNIVLSYLYQYGTRITHRTVALA

SEQ ID NO: 285175 - protein, 56 aa, Zea mays
  Clone ID: MRT4577_2317C.1.pep
STYLIIILKYIILLQPNFSYSTHITFKTYSYISIIPNYNNLYTLYPLFISILLKFY

SEQ ID NO: 285176 - protein, 98 aa, Zea mays
  unsure (1)..(98): unsure at all Xaa locations
  Clone ID: MRT4577_23180C.1.pep
SCTATPPPLAGTLSTFRLLALARCCHPPAPKFIADPYSLMIDYGLHGNEWIQNRYHIRESWNPAYYMEVSLARILRTTLWCXSAEFFLNQIIHRKLSF

SEQ ID NO: 285177 - protein, 559 aa, Zea mays
  unsure (1)..(559): unsure at all Xaa locations
  Clone ID: MRT4577_23181C.1.pep
MGKSPGKWIKSVLLGKKSTKSGPTKSNESKADNNRYSTGEDRTLSESSPVISEPVLVNIHKNVAINGKAADASDRARQQDPQSQSVVESRSSAPAAQLGEDQAAAKAQAAFRGYLARRSFRALKGIVRLQALIRGYLVRRQAVSTLRATWLIVKFQALVRGRNVRLSGSRMQLNVKFGQSNFGGVRSSDAWKEKLSSNAYVRKLLSSPIVLEPLHFQYDKRDPNSTYNWFERWTIGCIWKPAFQPKRVADGKPLVKKASYAMETQSAKLKRNIRKGSAAIAGSFHTSGESDKVKRNPKNFSSFPADSVPDSQLSELEKVKRNLRKVTDSMAEASXYLVPGLIPRRYVXTAEVPKESNPVAEISKIRSLLNGISDHQDIQCENTRESSFPLGTQEDSDNDHLLRYSNMDSLDLVPGLKSDQEIQLDSVSIGENVDDPTVVAPAVEEMSPQNIDTEDNVLCKKEEARSKEEHLSNGSLRTSKRKSSFPNKSEYVENGTHATPVQPRQPSYMAATESAKAKLRAQNSPSLDSDSAAEKNGFTRRHSLPSSTKSRALKAEWKR

SEQ ID NO: 285178 - protein, 102 aa, Zea mays
  Clone ID: MRT4577_23182C.1.pep
DTRSGVDEAGPARVSVDLHKAQSCVIDVIPLILLIHTMVTETDSSFHPQGTPENPDPEVCLDNPGKQLLYRLAGQMVALRSEEYGLLVLSRRSELTFQELAY

SEQ ID NO: 285179 - protein, 143 aa, Zea mays
  Clone ID: MRT4577_23183C.1.pep
PSLHVHEVTTIQIDYTQLRISNHTTYVALNPCICQLATGVLKTRSGSRQPRAQIHYRPASCHGGYKHTLVISPLQVRASCSGIGPTEAKLTHDEACGQLKGPRSASLLSVRSLIDTDGRPFLLNVWSHIKIILKTWYLSEVPY

SEQ ID NO: 285180 - protein, 150 aa, Zea mays
  unsure (1)..(150): unsure at all Xaa locations
  Clone ID: MRT4577_23184C.1.pep
MDRCTKYITFCYAPRNPNITPLATASFGDMADSSIFTFPRIHVKDPYQRLGISREASEEEIRAARIYLISKYGGHKPSADAIESAHDRIIMQSFFDRKKPKTNLKKKIRELXSRAVKAIQGRFQTPRSKVIWQTAITFVLLGVLTLAFPT

SEQ ID NO: 285181 - protein, 255 aa, Zea mays
  unsure (1)..(255): unsure at all Xaa locations
  Clone ID: MRT4577_23185C.1.pep
MAAAAAAGGAASAAVASQEPMKALGTGILRRSAPHWSAAAASFFSPPFRPRRCRRAPAPAAAARXPWLASLSLLPTDDIPSADATTNGWVIGVDPDIGGAIAVLSPDGSSQVFDNPFVHIMVSEVIRKRLDTKSIIQLLRGLDAPPGTTAYIEKSSPFPTDGKQGWWSTGFSYGLWIASLVASGFSVVPIASQTWKAYFXLMRSETPKDDSRQAASILFPDKXQSLELKKHHGRAEALLLAAYGKGLXLPSGEFS

SEQ ID NO: 285182 - protein, 120 aa, Zea mays
  Clone ID: MRT4577_23186C.1.pep
LLQPREQPPDRGDEQRRGQLLQPHLPPLPQLLRPPLRLVDESCNAKYPGVQLHLRRWLQLNRIRVNLLSAGVLTGCGSVMTSCAADCSCYPIIRTQRRNVCRCVNNYQILDLVYAAVDTT

SEQ ID NO: 285183 - protein, 280 aa, Zea mays
  Clone ID: MRT4577_23187C.1.pep
MAAAAAAGGAASAAVASQEPMKALGTGILRRSAPHWSTAAASFFSPPFRPRRCRRAPAPAAAARTPRSRASAKARAKLLAEVEARDPWLASLSLLPTDDIPSADATTNGWVIGVDPDIGGAIAVLSPDGSSQVFDNPFVHIVVSEVIRKRLDTKSIIQLLRGLDAPPGTTAYIEKSSPFPTDGKQGWWSTGFSYGLWIASLVASGFSVVPIASQTWKAYFGLMRSETPKDDSRQAASILFPDKDQSLKLKKHHGRAEALLLAAYGKGLVLPSGKFSKTSV

SEQ ID NO: 285184 - protein, 56 aa, Zea mays
  Clone ID: MRT4577_23188C.1.pep
HIVQCTEEEPLLFFVHSSTKCPEDPSVIHNLCSLRHHSMNDRVVWLFIHRLMSRVS

SEQ ID NO: 285185 - protein, 118 aa, Zea mays
  unsure (1)..(118): unsure at all Xaa locations
  Clone ID: MRT4577_23189C.1.pep
SYPQPASHSRRNPSSGGRWAPPRPPAGLRSRASRPPPPPRLEVVAKVKKGHNMKTHEAAERRVRETKRGKIARRCAGKQHLLAKNNTERKKRLSEMVXANKSDYDNATGALPYLRVNR

SEQ ID NO: 285186 - protein, 128 aa, Zea mays
  Clone ID: MRT4577_2318C.1.pep
MRCWRMGMGSSLLRAVFLLLACCCSFASGGVNNYNTSDAAARQLQWGNARATWYGQPNGAGPYDNGGACGFKNVNQYPFMAMTSCGNQPLYRDGKGCGSCYKIRCSKHAACFGRTETVVITDMNYTPG

SEQ ID NO: 285187 - protein, 328 aa, Zea mays
  Clone ID: MRT4577_23190C.1.pep
MWVEILCGLVVYKIIQRVFFAGGDDASYLADLDSSHSDLCFAVASRLEKLYAGRCFVGLRIPDPDAGERQHIDVVLVTKREVMVVAIKNLSGFVEADKDGNWSCPTDKKHKHEIFPNPVLEVNRLAANLQSYLEQRGAKLPDGHIIGRVVLPNPNCRPSYTISTQPEVMLYDQWKDLKTDSKTGLSAWIKGAFTGSRSDMQDSVLQNLHFILSSSPMWDRLELKGDKNVLGEFIEFKGRHEDVQLLKILKRSKVSRFIIQKSTLFGGFGRSRVQILYSPRDYRAEGTSSSELKEISVKQYTEIVFQPLRSKKARKFKLSNVVSVTLSA

SEQ ID NO: 285188 - protein, 90 aa, Zea mays
  Clone ID: MRT4577_23191C.1.pep
PASWLWHGGSRRLQASQRGPLGGSEPGNGPPGSSPPRLYLLWEQGWGAEGCCRYAPAWDTTIHQTCSDVMSVKHACQPRMRCHDNTTHTQ

SEQ ID NO: 285189 - protein, 44 aa, Zea mays
  Clone ID: MRT4577_23192C.1.pep
FSITLQKSIEKADGVKGGRLVPLPTVSDSGGKGKGSSSPSNRRN

SEQ ID NO: 285190 - protein, 58 aa, Zea mays
  unsure (1)..(58): unsure at all Xaa locations
  Clone ID: MRT4577_23193C.1.pep
YSPAVCNALDMKLRDDLXTLKNIRDRRGLRHXWGLRVRGQHTKITGRREITVXVSKKR

SEQ ID NO: 285191 - protein, 71 aa, Zea mays
  Clone ID: MRT4577_23194C.1.pep
VSIGHVICDGDLVGKFSLSDTCRTGAAEAILQLRSMGIKSVMLTGDSAAAAKHAQEQLGGVLDELDSGLMP

SEQ ID NO: 285192 - protein, 89 aa, Zea mays
  unsure (1)..(89): unsure at all Xaa locations
  Clone ID: MRT4577_23195C.1.pep
RAVALMNSQSLIRYMQNNPIPCIXSGGQPPKYKFFFYAQKNGGGAFFPVERIVHPASTKAQLKIKADDGTAAXAFLSLFQSTLSKIGLF

SEQ ID NO: 285193 - protein, 51 aa, Zea mays
  Clone ID: MRT4577_23196C.1.pep
YQFQRAVSLGSCKLRECYAFAQCRIATGSFPSPQLICSMSYCPLVNLSVPH

SEQ ID NO: 285194 - protein, 39 aa, Zea mays
  Clone ID: MRT4577_23197C.1.pep
RQDIVAALFRLVAELRSRRTVYTRAKEKVTSIFASYDTT

SEQ ID NO: 285195 - protein, 83 aa, Zea mays
  Clone ID: MRT4577_23198C.1.pep
ARCMATEHGLGLGTGGVTALVGVENRSSCYPQPIPLLPIFRRWEGGPHPITPRSLLALWSSPSRLLSVYSIVTVPPDVFFFLA

SEQ ID NO: 285196 - protein, 118 aa, Zea mays
  unsure (1)..(118): unsure at all Xaa locations
  Clone ID: MRT4577_23199C.1.pep
VRKVLVLQLRFIGFLRSYREASAGIADPDDDIAWKEPLFLIRLNLDQRIXLNLQCDQELQRRLHAYDQHLKIILKDVQNVLXTTVEIDEEKYEHLVRPKQRTIPLLFDRRDGVILHSP

SEQ ID NO: 285197 - protein, 88 aa, Zea mays
  unsure (1)..(88): unsure at all Xaa locations
  Clone ID: MRT4577_2319C.1.pep
MADTPTPKMVLVPIVNGTEPMDAAITIDVLRCAAADVADVSVEPDATSXQLTYXGMKLTADAVLVDLADHESDLIHVPGMADFSTFGE

SEQ ID NO: 285198 - protein, 51 aa, Zea mays
  Clone ID: MRT4577_231C.1.pep
SKVWAFYTLRLEGDFTMSEIWSVWCHGRHIHRPSNLSVRLHVMTGLSGRVG

SEQ ID NO: 285199 - protein, 236 aa, Zea mays
  Clone ID: MRT4577_23200C.1.pep
MADKQLSTIVLKVDLECETCYKKIRKVLRTIQDKMNIETISFDEKSNAVTISGPFDSDMVCNRLCCKAGRVIKEMDVKGNEKDAKAKGGGGGDKPKDAAKPAAEEEGGNSEMKAEKAEKKEGKGDKEDTKSDRAEKGNKDGKAEAETVEFDLDVDGVASAADAKPGKAMAMPPGMTKADLGPLLEKMMAPGATQSVVVPSIWPASAGFVSGYYGCNPGYEASPSYYRVAGAVYGGY

SEQ ID NO: 285200 - protein, 52 aa, Zea mays
  Clone ID: MRT4577_23201C.1.pep
FYSIFVYSLGNTCPTLRAPFSDCPGRNHATGQARRINEPSYARREAVRGLGA

SEQ ID NO: 285201 - protein, 45 aa, Zea mays
  Clone ID: MRT4577_23202C.1.pep
AAFFAISMSISVNKLLSCISSRHWNNMHNAVVCAPLRIGQSAGHL

SEQ ID NO: 285202 - protein, 51 aa, Zea mays
  Clone ID: MRT4577_23203C.1.pep
CTLAEELVRHIYVCIFTLCIECTRVGFPNKRAYSLMVKDFRIASTNLGLDF

SEQ ID NO: 285203 - protein, 181 aa, Zea mays
  Clone ID: MRT4577_23204C.1.pep
SYGRLGSSRPAGNSYQIVLRFFTHAKKDPSTAQNIHRRCELPIHWFSPSPCQTFPSCLRRSSSPPLISRSCLRRSSPLPRFQGTKHSLARCRISPPNVQPRQCRLEVVIIRRNLPGRHRHESISRRLHILRYAHPVDNFVLGLGAIPCMPSKNVLITCVPLALHIIHTKKLYIYHSVACKE

SEQ ID NO: 285204 - protein, 44 aa, Zea mays
  Clone ID: MRT4577_23205C.1.pep
NGGDLRGGLSLSCTPPRFIYRFRCGSVNPPGPLLNSCFPCYVLR

SEQ ID NO: 285205 - protein, 106 aa, Zea mays
  Clone ID: MRT4577_23206C.1.pep
NVTIPYRAGTGVKMWITTSSSFCSLKNSSIPLTQRMNNRKPERIGAPRSSSRESARDDKRKEARGCVRRRGQERGLWPACAKAEGGASGRGGGRMASPGHAGSSGW

SEQ ID NO: 285206 - protein, 50 aa, Zea mays
  Clone ID: MRT4577_23207C.1.pep
ASRSPLPHGALSHGRRHSPQWTPILLPTVRHDIVSLLPVDACCTRCHSPE

SEQ ID NO: 285207 - protein, 84 aa, Zea mays
  Clone ID: MRT4577_23208C.1.pep
KQPKSRSFSSQRTFLTGTNNADQKPASKRSIISKKQTFVNNVQDSSVERLIREVTNDKFWHNPGCFFIVMFDLVVYDFYLTGKF

SEQ ID NO: 285208 - protein, 106 aa, Zea mays
  Clone ID: MRT4577_23209C.1.pep
TRPRTRGRELRPFFFVFFLGGGFFGWGGVFFFFFFFFKKIKNVLFFFWGAPNFFFFGDKFGKFLIKNPHSPLYTKNFFPRGGKNGFPTRESPLGVLTLLHLKSLLL

SEQ ID NO: 285209 - protein, 192 aa, Zea mays
  unsure (1)..(192): unsure at all Xaa locations
  Clone ID: MRT4577_2320C.1.pep
ERGRRRASLSTSSASSIATELHHRQPTATQDWVRTCSTXSTETLXPVGFLQPLEVPSXVYXDISMDFIKELSEVSXSSKSIVPTVVDHFSKYVHFFTIEHXYTTMSTARAFFDGIIQLYEFPSSIISDRDXVFTGHVXLDLFKMAGATLPMSKKKHPVWHQKGPADGPALEPDGLRSGQSAPVGQTVRACAE

SEQ ID NO: 285210 - protein, 66 aa, Zea mays
  Clone ID: MRT4577_23210C.1.pep
NNDSTRLAHSPRDEEMGLETRGRTKGIRSWSSLISCTVRVYFQINSISSWCDVCFLCKGFVLIFVQ

SEQ ID NO: 285211 - protein, 44 aa, Zea mays
  Clone ID: MRT4577_23211C.1.pep
VPVSYFVNLLLLCNLESKVVMCMMLLPLVLYGHNFELDVGWASI

SEQ ID NO: 285212 - protein, 78 aa, Zea mays
  Clone ID: MRT4577_23212C.1.pep
RHSLIQYFSWVYGQAHTSLVLPQWGLKGRLSSFSSVLQACGDYMGAVLSSVASRPLSSLLQKHQPAGLVRRWSDGFLP

SEQ ID NO: 285213 - protein, 68 aa, Zea mays
  unsure (1)..(68): unsure at all Xaa locations
  Clone ID: MRT4577_23213C.1.pep
VRPVFRPSALGVITSPPTRQAIRPGRTAIDAVKXTIHLIDAVRSLPMADHEATDPKAFLEERSKAQCV

SEQ ID NO: 285214 - protein, 532 aa, Zea mays
  unsure (1)..(532): unsure at all Xaa locations
  Clone ID: MRT4577_23214C.1.pep
MSREDTLKVQTLELKVNIHCDGCLKKVKKVLHKIDGVYQSTVNAAEGKXVTVSGLMDPDTVIRKLHKAGKPAQLWGATAKPAVATQLEKLQLKDAGGKGQGQPPKNAGGKGQPPKNAAGKGQGQGQKQQQPKGGAGGAGAGAKVVALPHSQPTPQQLMQMQQQMQMNGMKFAHPELMAMGAGRMPMPMPFXRQRRRRRRPPRPRXKTVKFDLPGGEEFGDDGSDLDDEFDELDDVDFEDDGLDDDDDGDLYDGPGMVMKPMGMPPAAAAGGGNGNGGGKKGGGGNEVPVQINGNASNGGGAKQNGGGKSGAKNGKGGGGGGGVVAPGGGNQAGQGKPKGGFPGGAGLGGPMMGGAPPPHAGMMMRPPNMMGGAGGFPGMGQMGGHPHMGGGGMPQAGGGAAHGMPAGGSISMAAGGMPGAGFFPRGVGGGMPAGAEMLGMSQLPPQQQQHMAAVMQQQQQHMAAIMQQQQQQXDDERARPRPRPPWPRRVRVRAPXAMPQYPPPPAYYYPMPQRHPHDSMFSDENPNGCSVM

SEQ ID NO: 285215 - protein, 102 aa, Zea mays
  unsure (1)..(102): unsure at all Xaa locations
  Clone ID: MRT4577_23215C.1.pep
GGQLSPRIQRRRQNHEPLSGELSGTASTRLGSRTYQAAMQQIFTILSDRSVTRQISLEEGGHPHHRRREGERRSLSLPWRDAWRGETLAAYDELCXVSGPAG

SEQ ID NO: 285216 - protein, 508 aa, Zea mays
  unsure (1)..(508): unsure at all Xaa locations
  Clone ID: MRT4577_23216C.1.pep
YKCAGHGLVGVAGVYQSTVNAAEGKVTVSGLMDPDTVIRKLHKAGKPAQLWGATAKPAVATQLEKLQLKDAGGKGQGQPPKNAGGKGQPPKNAAGKGQGQGQKQQQPKGGAGGAGAGAKVVALPHSQPTPQQLMQMQQQMQMNGMKFAHPELMAMGAGRMPMPMPFXRQRRRRRRPPRPRXKTVKFALPGGEEFGDDGSDLDDEFDELDDVDFEDDGLDDDDDGDLYDGPGMVMKPMGMPPAAAAGGGNGNGGGKKGGGGNEVPVQINGNASNGGGAKQNGGGKSGAKNGKGGGGGGGVVAPGGGNQAGQGKPKGGFPGGAGLGGPMMGGAPPPHAGMMMRPPNMMGGAGGFPGMGQMGGHPHMGGGGMPQAGGGAAHGMPAGGSISMAAGGMPGAGFFPRGVGGGMPAGAEMLGMSQLPPQQQQHMAAVMQQQQQHMAAIMQQQQQQXDDERARPRPRPPWPRRVRVRAPXAMPQYPPPPAYYYPMPQRHPHDSMFSDENPNGCSVM

SEQ ID NO: 285217 - protein, 123 aa, Zea mays
  Clone ID: MRT4577_23217C.1.pep
PPLLLSLSLSPSPRSGAGVERQADETRNASFFPCRRRPCSSPPSLIPVLSRTRSEAAAERDDDEVGQDEPRGYPESAGEFFCLPVILVNQAGLAADPGSRSPCMPCLLLRRFSVWAHRPSSSR

SEQ ID NO: 285218 - protein, 154 aa, Zea mays
  unsure (1)..(154): unsure at all Xaa locations
  Clone ID: MRT4577_23218C.1.pep
EPPRRGATIPGPRTNQKGRRGTKAPRETYLPPTEKKRNGRANNPGGPNRANVPPGAPKHPAPVGAXPNIQVGPQPPVVRGGPGGTTAXRTPLNWAQSPPRRAQHPGAGGETQPXGGPGPPTGFGNPGGGEKTGPKSQPPGGLTPIGGAPRGRRP

SEQ ID NO: 285219 - protein, 269 aa, Zea mays
  Clone ID: MRT4577_23219C.1.pep
TVQALGRRRRRRTPGAQVFVRPFASDEHPPHQDFIMVDSVHDNIVLNKCIKDILALIKPVEDDRSKRLSTIQELENCIHSLASLSGAAVKPFGSFVSDLYSKSGDLDLSVQFGNGSNHPINKKKKQNALRDVRKALLSRGVTGYMQMQFIPHARVPVLQYVSKQFGISCDISIGNFAGRIKSKIFYWVNTVDERFGDMVLLIKEWAKAQNINDPKSGTLNSYSLCLLVLYHFQVLFLIPKYLSMCSYLFMVSLMLRLDVDIGEDGIELG

SEQ ID NO: 285220 - protein, 132 aa, Zea mays
  unsure (1)..(132): unsure at all Xaa locations
  Clone ID: MRT4577_2321C.1.pep
YHCFIRGLAWATDEQRPSHKVFGTYGXGLETRIILTXDTMRTRGFRXLPLSYEEVKQNLLGGTNLKELXDSLHXTGNRAXSHGGRGXAGGGAGVPYEGAPTGGVXRLHDWGWYGTGSHCYGGGPGYGGLVAR

SEQ ID NO: 285221 - protein, 112 aa, Zea mays
  Clone ID: MRT4577_23220C.1.pep
KGGVVLTFGFWPKRSGPRYWLPPPPPPFFYQGGGGGPLGGPSFCTGGHATLRGAYGVWSPYPGLGFFLGFGGGRRGNNLLRGPASFREFFWTPLPKKLGCGTIPPDFLGRGS

SEQ ID NO: 285222 - protein, 86 aa, Zea mays
  unsure (1)..(86): unsure at all Xaa locations
  Clone ID: MRT4577_23221C.1.pep
RQQSLTYQNLHHYSTQSNKTLIYNTPTXALXYQYTNKXLSXPKCPVTIKNIQXIPHLIPSSYNKSMMTTNLMTFNSPYYNRSVLYL

SEQ ID NO: 285223 - protein, 150 aa, Zea mays
  unsure (1)..(150): unsure at all Xaa locations
  Clone ID: MRT4577_23222C.1.pep
QIKEEKQESEFLPAAGGTFNISVSGDIDGLITQALLTGNFESAVDLCLHDNRMADAIILAIAGGQELLARTQKKYFAKSQSKITRLITAVVMKNWREIVESCDLKNWREALAAVLTYAKSDEFSALCDLLGTRLESDGDSLLQTXACLCY

SEQ ID NO: 285224 - protein, 59 aa, Zea mays
  Clone ID: MRT4577_23223C.1.pep
LALLRFLGAFAHIATVVQLRVHSDTQAHCRLLITKAHSKPPLCYSTNHLLQSRYQPLEH

SEQ ID NO: 285225 - protein, 75 aa, Zea mays
  Clone ID: MRT4577_23224C.1.pep
WPPRPCLPGPILQFRSRTAPPPPNRERLEKKKRLGLGLGLVRTRWSRRCAPPRRSCWPGIASAPATEGSAHGPAP

SEQ ID NO: 285226 - protein, 51 aa, Zea mays
  Clone ID: MRT4577_23225C.1.pep
GSHNDSSDDHLIYPYTHRPACMHGSHLRRHITYVCLISHQSSLPCAPELEL

SEQ ID NO: 285227 - protein, 85 aa, Zea mays
  Clone ID: MRT4577_23226C.1.pep
KMPTEIIFRKGKPGPPVNRIVRFGFRFNRKNRTRLCCVSDFQYPVRRLAGCVVRKKQIAMCCIVHAYTASVPALGRLQGLIACYC

SEQ ID NO: 285228 - protein, 106 aa, Zea mays
  Clone ID: MRT4577_23227C.1.pep
MQCTTSAAKVQDNTDASSCSLSTDKSNAAALEWQRIQKKMKMTLPRCKGHSEPCIPRSVKKGPNIGRLFYVCARAQGPASNPEANCGHFQWAPGKSKEKSSKEKRL

SEQ ID NO: 285229 - protein, 100 aa, Zea mays
  Clone ID: MRT4577_23228C.1.pep
MARILVSFDRMLFFFPSMQASRTSFAPALCLPSLAAWIFDETDVPNKTGIQRGEKISPLPQAVYGCARRRAEDDAARSWQGFRLSEGQIRAILSAPLLLF

SEQ ID NO: 285230 - protein, 81 aa, Zea mays
  unsure (1)..(81): unsure at all Xaa locations
  Clone ID: MRT4577_23229C.1.pep
RGGGTKSRNGTLYPPPTSAYYVENSESQWTSWLVPMIVVANVAMFIVIMFVNNCPINIIDSXQHRLKXCVARFLGWLSFQP

SEQ ID NO: 285231 - protein, 49 aa, Zea mays
  Clone ID: MRT4577_2322C.1.pep
TTPPAGWHAKANTVAHPILYLIAVRLFRIAQRMPVRGAAHTCPSLFLRC

SEQ ID NO: 285232 - protein, 116 aa, Zea mays
  unsure (1)..(116): unsure at all Xaa locations
  Clone ID: MRT4577_23230C.1.pep
YXXXNIKFLNTLKKSPSHXHNTSPXXPXXLQLTXXXXPPXHHHHPQIHHYPSHPSNKIFPXXYXXXXHPXXHSSXHSXHXHHXXXXKTXXPXXXXXPTISIFMGLPXNXTXLYFFT

SEQ ID NO: 285233 - protein, 122 aa, Zea mays
  unsure (1)..(122): unsure at all Xaa locations
  Clone ID: MRT4577_23231C.1.pep
ERRKYIGPFSEQTPSYLTVXFFSDYGRYTSGLSADTETFARNRXLEVIHSRWAMLRSLGCVFPEILSKNGVKFSEAMWFKAGTQIFSXGWLDYLRNRNLMHAQSILAIXACHVELMGYIYGY

SEQ ID NO: 285234 - protein, 70 aa, Zea mays
  Clone ID: MRT4577_23232C.1.pep
TFALKAQRPSHSCTSVLLRACIVCSSWISGRYAHSWSSRQVPCGGGQQKHQQVRLGEARSGGREGLPRGW

SEQ ID NO: 285235 - protein, 121 aa, Zea mays
  unsure (1)..(121): unsure at all Xaa locations
  Clone ID: MRT4577_23233C.1.pep
SSSRAKSPPXXXVKHXGSXSNWSGSXHXHPXFPXFSAIFFHXDXVKXXHSSLFPIXSXKFXQVXTRXRXNKRVANLXXSXTXXDRELXXLPRXTXGPGSXTGLVASNXSXVVPGLTPYPGX

SEQ ID NO: 285236 - protein, 97 aa, Zea mays
  Clone ID: MRT4577_23234C.1.pep
TGFYTPLWPVPFVLTPFSFFSLSNIGFSIFSSYVVSLFSHFWGFNLIFTRKVFFFFFWPPPFFVTNCFLICLCHSLPLSFGVLFHENLCTTFFLLTK

SEQ ID NO: 285237 - protein, 80 aa, Zea mays
  Clone ID: MRT4577_23235C.1.pep
SLSFFLSFPTNNGAGRTTTNFTFPSQQQLEPTVPGRKRFPSFRFRNLFRLGRRFLQLVRGSPPSRSKPPATRFPLPLLSP

SEQ ID NO: 285238 - protein, 289 aa, Zea mays
  unsure (1)..(289): unsure at all Xaa locations
  Clone ID: MRT4577_23236C.1.pep
PRVRLVDIIWFTWRMKLLSGRRGVAILYAYMFLGLGFLRAVSPDFGDLANQEQELEGTFRFMHSRLRTHAESIAFFGGGSREKAMIDAKFMTLLNHSKVLLRKKWLYGIFDDFVTKQLPHNVTWGLSMLYALEHKGDRALTSTQXVGTCSEVLXSALSHVNIVTPSQKLLASQLSCDVSQGKSLLVTGPNGSGKSSIFRVLRGLWPIASGSLSKPSEGIFNVPQRPYTCLGTLRDQIIYPLSHEEAKLKMLSGETSDKSTASELLDDHLRTILENVRLLYLLDIQGLEP

SEQ ID NO: 285239 - protein, 132 aa, Zea mays
  unsure (1)..(132): unsure at all Xaa locations
  Clone ID: MRT4577_23237C.1.pep
HTVRPTRQLSAGILEDSLYEDDEPDYGPRRTPGHXRFEDQLEAEALSDKRIINAKTPNMSCNVPRRPPDPTARMPRRXADEYSXSDRAESXYQTDCADLEHSPSRAKQDELDXEQEIYEQCEEEAPISDEQM

SEQ ID NO: 285240 - protein, 380 aa, Zea mays
  Clone ID: MRT4577_23238C.1.pep
SRFMHSRLRTHAESIAFFGGGSREKAMIDAKFMTLLNHSKVLLRKKWLYGIFDDFVTKQLPHNVTWGLSMLYALEHKGDRALTSTQGELAHALRFLASVVSQSFIAFGDILELHKKFLELSGGINRIFELEELLQASQSNPVMPSDATNAGSEEIISFRGVNIVTPSQKLLASQLSCDVSQGKSLLVTGPNGSGKSSIFRVLRGLWPIASGSLSKPSEGIFNVPQRPYTCLGTLRDQIIYPLSHDEAKLKMLSGETSDKSTASELLDDHLRTILENVRLLYLLEREGWDATTNWEDTLSLGEQQRLGMARLFFHCPKYGILDECTNATSVDVEEHLYRLATNMGITVITSSQRPALIPFHSLELKLIDGEGKWELCSIHQ

SEQ ID NO: 285241 - protein, 90 aa, Zea mays
  Clone ID: MRT4577_23239C.1.pep
GGLGNSPGNWRNLPVGPARPSFLVSSRVVSPSPKGLFSFGSGLFFPLCVFFSKGALCQLRLCLSRGPANPCFNQHGLGVNGFCSPRQGFF

SEQ ID NO: 285242 - protein, 88 aa, Zea mays
  Clone ID: MRT4577_2323C.1.pep
SPPKSSPNTPSPREPSPSPSSPPTEGVAGTPDLLKRFFFVSLPQSPPPPAKEQACPPYKTGAPDCKGPLKFEAPVGEKSCSPPPAFFP

SEQ ID NO: 285243 - protein, 81 aa, Zea mays
  Clone ID: MRT4577_23240C.1.pep
YFNFKKAAMANAKAMGWCPNTSFDVRFQGLALVQLHSPSPLKLARKFLPLYTGRKSLGLAPSKPFYLLNKTLLSVRDKKKT

SEQ ID NO: 285244 - protein, 232 aa, Zea mays
  unsure (1)..(232): unsure at all Xaa locations
  Clone ID: MRT4577_23241C.1.pep
LGKKRYPASAGASVAPSQKSRRRRSEREKGRGRRWTGFSGADDAETVSASTLASDASPPRPSTPAPKQGTYGESASTSLRXAEPEAAPSARPARTPRSXSDAHSARASPPAPLMATEKATSSAGSPSPLPSSPSARDEEAAGLVSARSTMEAPSVEAASGRDHGAGNGVSGPSSSRRGGGREASHGHASSMSCGLVASVSVGRTDTGAPCTYAVVDSCGGDWRGRGSYGSCG

SEQ ID NO: 285245 - protein, 80 aa, Zea mays
  Clone ID: MRT4577_23242C.1.pep
VSCYSSRHISRSTPSTKPSIGEERRRASRRSSKFARLAFKKRASVSFTIHWPTSCDMMDDDCRLTLNIAAPAHQSLRRHS

SEQ ID NO: 285246 - protein, 96 aa, Zea mays
  Clone ID: MRT4577_23243C.1.pep
AGRRRVLGSVCLDVQSRHCELYRPDVMNNLVLMHDPEEHSPSRASSRCHAGARSRGRRWVGREKAGDLGDREGELHESAGGGGGMMDLLGRGRSVT

SEQ ID NO: 285247 - protein, 55 aa, Zea mays
  Clone ID: MRT4577_23244C.1.pep
RHQLLGVDALLIVTRKDAPLKTFWLSEALAPPWCTAISQSCVGITSVNVMSCWED

SEQ ID NO: 285248 - protein, 140 aa, Zea mays
  unsure (1)..(140): unsure at all Xaa locations
  Clone ID: MRT4577_23245C.1.pep
VDPSLCTARTHSPASFSHSLPLSSTLSXSLASPSAPHSTHNGAHRAXSCTPTPSTASSTWPSSXTLAMRTSKPSRVPQSSSSPWYPSLSMPSTPSSISSTSPGTSWPSATRDTRPRTQRSLRSPASLPRTLSKSNSARTC

SEQ ID NO: 285249 - protein, 245 aa, Zea mays
  Clone ID: MRT4577_23246C.1.pep
MPPAPPHGTLDAGGDPNGEGDNDASGSSSHDTELSEEPKPEGWIARPITRDAASRCHFHDALDTLLRRAFDRHTWSIEYRCVVYQHRRGLYPDQWEATCLVRRPNDDLQGAEAFSEHYSITERDTAEYCSLLSGVANGLNLKYYTRRSTGSAGGVIVSPVGEGNPRLNNMVNLAVVLNTELDHVLDELGKVRVEVAELHAECTACHYLDDGSPAPVGIQHPYRSPPRGRFEYGTPDCRTRIDLDP

SEQ ID NO: 285250 - protein, 70 aa, Zea mays
  unsure (1)..(70): unsure at all Xaa locations
  Clone ID: MRT4577_23247C.1.pep
TLYTLPPMTSQQSPWCVLGHLSRVXTPXDXRHPPIXTXXGDGRGGCCGRRSRLLLLALDRXRXDGGWSKR

SEQ ID NO: 285251 - protein, 76 aa, Zea mays
  Clone ID: MRT4577_23248C.1.pep
MVKFTGAQLRHLMDKMNNIRDLSVIAHADHVMSTLTDFVAAVARTIGPEVADDVRPTPSWPGEVQPALAPKGTGVS

SEQ ID NO: 285252 - protein, 517 aa, Zea mays
  Clone ID: MRT4577_23249C.1.pep
MLRGAISRLGARLRLHADPSPASPRLRVLSTRRGKRSSPTLSPADCDDEGPLRGLFVLSRDPECPPRLLVVQPRLRPGSLLESKLAEALNLANSLEERRDGFYHSEFGAKGAPPHLVVQNPASRGRSHADTYFGPGTVDNVKCYLSATESEEDVDAVFVNAILSGIQQRNLEVAWGFMSGAGETELQLQRRRIQERRVSLLAQIEDVRRTRAIQRSSRKRHGGSFGQELVTVAVVGYTNAGKSTLVSALSEADLYSDDRLFATVDPRLRSVILPSGRKALLSDTVGFISDLPVQLVEAFHATLEEVVEADMLVHVLDSSASNLEEHRSTVLQVLQQIGVKMYAALERYNVQVEIDLVDENVKSDGIDDEVFLTEGEQEDDIFSEDDAPSEQTSFDSVDVDDGADSEYLSEENSEDSNELPSKKSFAEPTEMGAMKELSSKECFGELRVLDTNGHTFPQPASTCHVKTSAVTGTGLQELLALIERKLTEQQTVVQRSYGPFDRKWRPTSMDCEKAAEP

SEQ ID NO: 285253 - protein, 120 aa, Zea mays
  Clone ID: MRT4577_2324C.1.pep
LWISISLWGRVKHAFHRGPVCPLGGGCFVDWAPFFTVLSGIKRGFSPFLGLWYISLFPGLVILWGGTPFALFTSFAPCMWHWAPCVVAFKAPRVGFTRLGAPLLVRGLSPARLFISPFFF

SEQ ID NO: 285254 - protein, 46 aa, Zea mays
  Clone ID: MRT4577_23250C.1.pep
MSVTLTDILYSKKKKKKKKKKKKKKKKKKKKNKKKKKKKKKLVTTV

SEQ ID NO: 285255 - protein, 407 aa, Zea mays
  Clone ID: MRT4577_23251C.1.pep
MLRGAISRLGARLRLHADPSPASPRLRVLSTRRGKRSSPTLSPADCDDEGPLRGLFVLSRDPECPPRLLVVQPRLRPGSLLESKLAEALNLANSLEERRDGFYHSEFGAKGAPPHLVVQNPASRGRSHADTYFGPGTVDNVKCYLSATESEEDVDAVFVNAILSGIQQRNLEVAWGKSVLDRVGLIIEIFNAHAETKEAKLQSELAALMYMKTRLVRVRGPGGRLTFGPSGEAEVVSARGRGSGGRGFMSGAGETELQLQRRRIQERRVSLLAQIEDVRRTRAIQRSSRKRHGGSFGQELVTVAVVGYTNAGKSTLVSALSEADLYSDDRLFATVDPRLRSVILPSGRKALLSDTVGFISDLPVQLVEAFHATLEEVVEADMLVHVLDSSASNLEEHRSTVLQVLQQ

SEQ ID NO: 285256 - protein, 566 aa, Zea mays
  Clone ID: MRT4577_23252C.1.pep
MKGAVIGASTVLVVAVVATICVVSFKGSGDGGRAEEGEMSTSVKSIKSFCQPVDYRETCEKALEAAAGNATSPTELAKAIFKVTSDRIAKAVRESALLNELKHDRRTSGALDNCGELLDYAIDDLRTTFDRLGGFEMTNFKSAVDDLRTWLSSALTYQETCLDGFENTTTPAAGKMRKALNSSQELTENILALVDEFSETLANLGLPSFHRRLLAEHARGAPSWMPDAKRRLLLVSPGEKGFRPDVTVAKDGSGDFRTINAALAKVPLKSATTYVMYVKAGKYREYVSVARNVTNLVMVGDGATKTVIMGHKSFMMNITTKDTATMEAIGNGFLMRGIGVKNTAGAKNHQAVALRVQSDMSAFYECRFDGYQDTLYTHTSRQYYRDCVITGTIDFIFGNAQVVFQNCLIQVRKCMDNQQNIVTAQGRKERRSVGGTVIHNCTVAPHPEFEKSVGRFRTFLGRPWKEHSRTLYIQSEIGGFIDPQGWLPWLGDFGLSTCYYAEVENHGPGANMTRRVKWRGIKNITYQHALQKYTVESFIQGQHWLPQLGVPFIPGLLPQQQSGRIH

SEQ ID NO: 285257 - protein, 82 aa, Zea mays
  Clone ID: MRT4577_23253C.1.pep
TTHVHGGGACYQTSKLNMQRIEMKAHVELYTPHSEAKACKKKAQLNSLTADTLLHYNIHWPEKYSLPERIRLYILSIGCLGK

SEQ ID NO: 285258 - protein, 47 aa, Zea mays
  Clone ID: MRT4577_23254C.1.pep
DTCQICLKLDNEHIREQSKRGHLRDPLIVVKDHGMPTDLAGSKLVPC

SEQ ID NO: 285259 - protein, 153 aa, Zea mays
  unsure (1)..(153): unsure at all Xaa locations
  Clone ID: MRT4577_23255C.1.pep
PAGIRTPHAYRYLLPDQILPVHDDAVASPVPPELHPSQEVEGFVQVRGREVKAESALIPKIXPLRLSPNRIGXDIDHETRHDWKRLRETGKVIALKQRGQGFVRPSDAPLGIGALGETKRYPKSVENILHSXHHGSSDSSEIDKTMWNLCVGQ

SEQ ID NO: 285260 - protein, 81 aa, Zea mays
  Clone ID: MRT4577_23256C.1.pep
VFPPHFFTCVGAATPPVAPPTAVCTSAVRGRSRPVAAGPRPPAVPGSRAGCLAGGRGGPIHGDTRGAQGPSAKEGCRASNG

SEQ ID NO: 285261 - protein, 45 aa, Zea mays
  Clone ID: MRT4577_23257C.1.pep
GQQPSTRPYLPNIPASGSRLVQMIFSSQPVSRIAMGSSPTRWKDS

SEQ ID NO: 285262 - protein, 66 aa, Zea mays
  Clone ID: MRT4577_23258C.1.pep
NSRADPRVHGRVGGRVGGRVGASYHFFARNALILTMYPNSVFHCDKGLAHFSTANFCGSLKFSLEL

SEQ ID NO: 285263 - protein, 122 aa, Zea mays
  unsure (1)..(122): unsure at all Xaa locations
  Clone ID: MRT4577_23259C.1.pep
NPLIIAGLLAREEDGFLCTNDLSEHQPIGAYLQDTHQNYYQETPTMPLLQHVELMYRHLYLGEIXELTANYRFIYISMLSDMCESKSISDSSYLVIQYIDCRFKGLIFRLYHRTACYLTRKH

SEQ ID NO: 285264 - protein, 388 aa, Zea mays
  unsure (1)..(388): unsure at all Xaa locations
  Clone ID: MRT4577_2325C.1.pep
MASRDAGASPRSAPHRPGAVAPKDGADLLSPRFRSAAALAGWDEESVLLAAMVVEDTPVRESRRKRRASTSSAGGSAGSSTRKMRPRRQSPAKIPPVVLALDDDDDDDAADGKSIVNAATKEEEKVVVVGDKEASGSGDKAASGSGDKAVATGNLPCMDRLREELSCAICLEICFEPTTTSCGHSFCMKCLIHAASKCGKRCPKCRQFISNSRSCTINTVLWNTIQLLFPGEVEARKNSTSPCDKDASRSPLRANRLSQGGNGMRTRTRSRSSSTEAXKKQLQELHGTRXQQAPTLVRTSSAHKSTQEAGGASSRPRSCCCLRGAPVRLDQSEDAALAYRLQQEEFMNAFEEPEQERQQPRNAVSTARDTLRAIASRAVRLRARGWHV

SEQ ID NO: 285265 - protein, 133 aa, Zea mays
  Clone ID: MRT4577_23260C.1.pep
TIFTGCFFFAPPQRKVVGLGFFVFFKALWVSSVPGVKPFFPFPGGLSRGPFLGGAAFLTGLFAFAPPMTVWFLVGPPSTKGFQKLSLGVYLCFLWGGQGWPRFKGLRWGPFLVSSEPFYGFLVCVTARFVSQC

SEQ ID NO: 285266 - protein, 82 aa, Zea mays
  Clone ID: MRT4577_23261C.1.pep
IHRKGAHLQPFEWNDQRINFLYRIRSSRLEKPLFLGFLQGFFACRGVGFWGGLYASLLFLGGAGLKRGRYRFGRLVCGNITK

SEQ ID NO: 285267 - protein, 92 aa, Zea mays
  Clone ID: MRT4577_23262C.1.pep
LWVGFLGKQDLPKPDMVITKSSYEGPKLNPQFLGLLDYSSTTDAKMPPDELPSRNASVSGGYPSNHTSTHESFRLSLVALMATRRANPDFLN

SEQ ID NO: 285268 - protein, 46 aa, Zea mays
  Clone ID: MRT4577_23263C.1.pep
LKQPKMDQYLAHHHHLDQHQVKILTSLIQVPLDFLHTHRTIVLRLH

SEQ ID NO: 285269 - protein, 134 aa, Zea mays
  Clone ID: MRT4577_23264C.1.pep
PRVRAEKDKALCFSDKENRMLKEKLSTLEKEHFIQNNQQDLELIMQESEEMVLRDIEMEPQRSCEISDRDIQYEGLIKLNQVLEIASTTVKEIETKRLNLSDIQGKREQEKQLECILVFIMNWSKELMRLNIEC

SEQ ID NO: 285270 - protein, 90 aa, Zea mays
  Clone ID: MRT4577_23265C.1.pep
GSTVRVSMMIQITQLHLNNWLSTLFVTKYDVNPVMEIKAHIFTFKGFFVDGNEFFRQTLKTQMQRCKWLEPNQVLENDFHAKVVRSVIKT

SEQ ID NO: 285271 - protein, 76 aa, Zea mays
  Clone ID: MRT4577_23266C.1.pep
GRVGCRLRTLLSTPHRSLHRSEFPNSGRPSILTWLNTTHMRCPSHMTHLHGYKSPRWTDSASIHQPCRIRCDEMGK

SEQ ID NO: 285272 - protein, 230 aa, Zea mays
  unsure (1)..(230): unsure at all Xaa locations
  Clone ID: MRT4577_23267C.1.pep
FPWLLVDYTSEKLDFNKSSTFKDLSKSVGALDENRFXSFYYGSHNSSMEIILQYLLRLEPSTSLHLSFQVVTLLIMEIFIIASSKSEHITIIFKTLFINLSIHNFYCRISPQFKIRDLXIIYIVQCGKFDHTDRLFQSIESAYINSLLNTSDTKELIPKSFYMPDCLENSNLCHLSVKRDGEPIGDVALPPWAKGLPEEFIHINREALKSEYVSSNLHNWIDIIFGYKQR

SEQ ID NO: 285273 - protein, 73 aa, Zea mays
  Clone ID: MRT4577_23268C.1.pep
KGRGNIVSIIINLVTSPILNLSLSLDAMDYKIGKVCTVKNTLGKQVIQLGFDQEQKHCTLDPSSSKLQIWLLL

SEQ ID NO: 285274 - protein, 63 aa, Zea mays
  unsure (1)..(63): unsure at all Xaa locations
  Clone ID: MRT4577_23269C.1.pep
PVTGGRAHVNGLVLPFQASLLYCASSAVPLPGLCFISRLLTGVYPEPMVNPAPPPASVQPKPX

SEQ ID NO: 285275 - protein, 43 aa, Zea mays
  unsure (1)..(43): unsure at all Xaa locations
  Clone ID: MRT4577_2326C.1.pep
IHECRFCLSQVEEVRVYMLGIAYQGIRSGXADRNLSIWHRNSL

SEQ ID NO: 285276 - protein, 153 aa, Zea mays
  unsure (1)..(153): unsure at all Xaa locations
  Clone ID: MRT4577_23270C.1.pep
NSARGEFFFFFFFFFFFFCLFFLCDSFFIICLNFGSRSVQRGEGRENSIVASSEKISPXGENLPITLQYIESXVVALDKALAGHADFCALVASRGXTFTGFLKVGCPHGKIGNRPPFFLGAADPAEIPSLLHEIYTFLILGFNTRTLTKMKHD

SEQ ID NO: 285277 - protein, 80 aa, Zea mays
  Clone ID: MRT4577_23271C.1.pep
KKFKKKKKKKKKKKKKKNNYLKKKKKKKKNFFFGGPTLGGKVADFHKMGGGLSLLLRGQIRLMGGRFKINVAAVLKTGDL

SEQ ID NO: 285278 - protein, 495 aa, Zea mays
  unsure (1)..(495): unsure at all Xaa locations
  Clone ID: MRT4577_23272C.1.pep
GSMLCLRACXVVGSGESMAVDEECDMGMSFWFPGVWTIRDRSAVAGMLWNSSKAGDGSGVSGVVSASSVDGSIHRGNFSEVKYEYNYTMVEEAKKHCLQDPASSKPKXRLRGRSSLXNYTDHDLEFHFYDTKGSMVGGGRAYPVAIGSAMVYGDQLAADDSFSRKAVVDMNTEELLNVSYDIRESVPPAGWVTPKNGSYSVILEERRMAAEGVFDPKTGILSMIACREYNSSTTDCQILITVYLASLPRGRAQGHGRGAISSLRNKTAADPLFFEKVDIMLYGMYSEQISESISRMDFESILLVVSTTLPCVFTVMQIFHAKRRSEAAAATSVTMLVVLALGYVAPLVVSSEALFLSRRRQYAPLLPFRSYVPYELSQAMLRAPTLIALLLQLRLIQLALSARKADAEQSKAESSASRAERRALWLCAPLYLIGGALTIVVHVVNALRAARENSLTVRIGPEPATLWEDLVSSAGLAQDAFLLPQVVMNALSPGG

SEQ ID NO: 285279 - protein, 60 aa, Zea mays
  Clone ID: MRT4577_23273C.1.pep
MVMLLLLLSALAGLFGAAEGQAFHLGKCPNPPVQENFDVNKYLGRWYEIEKIPTTFAHWT

SEQ ID NO: 285280 - protein, 37 aa, Zea mays
  Clone ID: MRT4577_23274C.1.pep
AGIPGPPHAVRLNSHIFLVPTVCDSAAIEHWRHSRVF

SEQ ID NO: 285281 - protein, 152 aa, Zea mays
  unsure (1)..(152): unsure at all Xaa locations
  Clone ID: MRT4577_23275C.1.pep
LKLEITISNIAVQIAHEITAILEIIIMVRCNKAKNPNFNHFLVEALTSVIDRTEEQNPTLLTAFKTSLYPMLQTIXPKTYEHILTYXFNIKLKSKIRDGHSSIKHAEFGILLNNATSNQTHDAPIXVHWLLAFITKMLKELNQESMLPNILT

SEQ ID NO: 285282 - protein, 90 aa, Zea mays
  Clone ID: MRT4577_23276C.1.pep
LRIFPPTRAQVWNCVNGWEGTRVRNNLFDPFFLKEKGKFKAGEKPVKKKVKSKARFFQQNAHHSKCKVDPKRLSQLNDQGGIPQPKNVKV

SEQ ID NO: 285283 - protein, 63 aa, Zea mays
  Clone ID: MRT4577_23277C.1.pep
HACDFTEDVCERLTGKPARGWGNRLDRFGCLLNCVWPDSIEVSAVRDVNAHADFCDDGWRSNA

SEQ ID NO: 285284 - protein, 85 aa, Zea mays [sequence omitted]

SEQ ID NO: 285285 - protein, 103 aa, Zea mays
  Clone ID: MRT4577_23279C.1.pep
KFTSRGLPPKKKKVGSPPPPFFFCPRSPGQRGKPRAQHPGKIFSPDQGGNWGGVFCYFFKKGFWFFFPKKKKKKKKKKKKKKKKKKKKKKKKKKKKLEKGRRY

SEQ ID NO: 285286 - protein, 50 aa, Zea mays
  unsure (1)..(50): unsure at all Xaa locations
  Clone ID: MRT4577_2327C.1.pep
PGPPKSKPFVQALKPDIRVSKNQILSCTSLNXSAEENPLYPGYPDGSTRV

SEQ ID NO: 285287 - protein, 45 aa, Zea mays
  Clone ID: MRT4577_23280C.1.pep
VTPDCHLVSDFLVLVLVFYLNFKIAVGFPSLSVFGTTKKKRGRPF

SEQ ID NO: 285288 - protein, 47 aa, Zea mays
  Clone ID: MRT4577_23281C.1.pep
HGKGLIFSIGLVTLQRANNQINDQKENPELKPGRHSKLIGNTTRLLL

SEQ ID NO: 285289 - protein, 121 aa, Zea mays
  unsure (1)..(121): unsure at all Xaa locations
  Clone ID: MRT4577_23282C.1.pep
MASAPSPADTRLDVDGNPIARLTICMIGALESIGSHLXEKIMGETHHTALAVDAYXEXIRHLGDPVSPDLDEGIXFHGLRIENDARLQVLIKKADLTIEMATMCATADYKTRPLDATYNNF

SEQ ID NO: 285290 - protein, 63 aa, Zea mays
  Clone ID: MRT4577_23283C.1.pep
SENGLFLLIYYPTRPRTRGKKKKKKKKKKKKKKKKKKKKKKKKKKKKGGRPKRNKPKLRVQAT

SEQ ID NO: 285291 - protein, 447 aa, Zea mays
  Clone ID: MRT4577_23284C.1.pep
MAGQEHRCRRIVLFPLPFQGHISPMLQLAELLHARGLAVTVLHTGFNAPDATRHPELTFVPIHESSFPDEVTSLGTDIVTQLLALNAACEAPFREALASLLRGGQDVACAVVDGQCYSALRAAHRLGVPALVLRTDSAATFSSMLAYPRLRDAGFVPVKEERLDEPVPDLERLRARDLIRVDGSDTDALCGFIARVADAVRASASGVVINTFERMEASELAKIQRELSRPAFAVGPLHLLSQAPAEQSLHAPDRGCLAWLDDHPPRSVLYVSLGSVACVDRGAFVEMAWGQARSGVSFLWVVRPGLVGGVPEVPPLPDGFSEEVRNRGKIVSWAPQREVLAHAATAAFWTHCGWNSTLESVCEGVPMLVQPCFADQMVNARYVTHEWGVGLEVGEEIERGRVAMAVTKLMTGEDAAQMRGRAYHLKILASAATSLPIDSLIHYISSL

SEQ ID NO: 285292 - protein, 76 aa, Zea mays
  Clone ID: MRT4577_23285C.1.pep
SSLYHSIARCCPSAEISDCMTVQCDCGCTCSCMGSCKSMSCHVKTGVPSCIKSTNLCAPTTNGRARRFKAASEGES

SEQ ID NO: 285293 - protein, 175 aa, Zea mays
  Clone ID: MRT4577_23286C.1.pep
RSSTPASTPPTPRATRSSPSSPSTSRRSPTRSRPSAPTSSRSSWPFIARVADAVRASASGVVINTFERMEASELAKIQRELSRPAFAVGPLHLLSQAPAEQSLHAPDRGCLAWLDDHPPRSVLYVSLGSVACVDRGAFVEMAWGLARSGVSFLWVVRPGLVGGVPEVPPLPDGFS

SEQ ID NO: 285294 - protein, 159 aa, Zea mays
  Clone ID: MRT4577_23287C.1.pep
MAGQEHRCRRIVLFPLPLQGHISPTLQLAALLHARGLAVTVLHTGFNAPDTTRHPELTFVPIHESSFPDEAMSPDIVTQLLALNAACEAPFREALASLLRGGQDVACAVVDGQCYSALRAAHRLGVPALALRTDSAATFRSMLAYPRLRDAGFVPVKGK

SEQ ID NO: 285295 - protein, 117 aa, Zea mays
  Clone ID: MRT4577_23288C.1.pep
SSRCQLSVMQNCKSSIACLLAFLTACLDGRERRPTGRVVASATRLCCTGRRKRMSEAPGPTSLRAGKWTEAPGTVCRHAGRQGWGWSLDAEPGCLDLDGHMHTRSQEGKKWRRLPGR

SEQ ID NO: 285296 - protein, 307 aa, Zea mays
  Clone ID: MRT4577_23289C.1.pep
MDAGGGGVLVAVLCMLLVFAIFPLLLWRRRSDAATADNHRVPPQPLQEDQVLHGRAAARRMRRRPGAAGAGSSTASTSRNAVEDDAESDDEEVPEGRNVPRSSKKEKKRQEREMQRQAEEPARDSWRSKQDRYDEMRRKKDEEREAQERQLEEEARARKAKEEAAAALEFEKWKGAFSVDAEGTTESETQDDGQGLLHNFVEYIKKQKCVPLEDLAAEFRMRTQDCINRIVTLESMDRLSGVMDDRGKFIYISTEEMKAVAEYIRKQGRVSISHLANNSNQFIDLEPKAQYEVESQQDDSAEAGTEA

SEQ ID NO: 285297 - protein, 88 aa, Zea mays
  unsure (1)..(88): unsure at all Xaa locations
  Clone ID: MRT4577_2328C.1.pep
VWAPGSLPDLDVCGWEVLCLYGPRDQVEAVRKVFALLPAHGCREGHLARCVLPAGSFAPPDAFPSCCVFLTPLVAAQHGLFMXRLRAV

SEQ ID NO: 285298 - protein, 80 aa, Zea mays
  unsure (1)..(80): unsure at all Xaa locations
  Clone ID: MRT4577_23290C.1.pep
CYDEPRLRPSRPPTXDDTPDQTPPTYTPTEHEXSRLPKXYTTTPYTYPTPPPHSPASNSPPTSPHHSKAPAPPAYLSLLC

SEQ ID NO: 285299 - protein, 45 aa, Zea mays
  Clone ID: MRT4577_23291C.1.pep
PRRVCMLGPETSAWGFLCVRPQLCSHVPMRVPATWIAQQPPALAG

SEQ ID NO: 285300 - protein, 94 aa, Zea mays
  Clone ID: MRT4577_23292C.1.pep
VGSSDLTSVDSSGGFLFRAGHKSTYFRDNLYAFPTTGLSTLYGFDIGSLSCRWCGPRMISTVLEESVGCTSSLLSYKIGYLVTSLRRGGFVRFA

SEQ ID NO: 285301 - protein, 110 aa, Zea mays
  Clone ID: MRT4577_23293C.1.pep
MKVFICLFAAFAVANASLLAAPAHLSTGSSTQTRSQDAHGNYAFSYNEQHATGGSSRSESGTPYGTVGSYTLNVADGRQRVVKYVADAAGFHAAFSTNEPGTAPKAPAAV

SEQ ID NO: 285302 - protein, 115 aa, Zea mays
  Clone ID: MRT4577_23294C.1.pep
EELTTYRRQTYEERAVAAKIKRWIESHAYKRNILLILVLIGTCTAIGDGILTPAISVLSASGGIKVQNQNMSTDVVVLVAVVILIGLFSMQHYGTDKVGWLFAPIVLLWFILIGS

SEQ ID NO: 285303 - protein, 149 aa, Zea mays
  unsure (1)..(149): unsure at all Xaa locations
  Clone ID: MRT4577_23295C.1.pep
WYAVFQTRDLHAERTSILCSEWVVDMLKLTCLDHRNLESFFDVLLSEGEHWPLWLMPSLQXTFICEGPXIQILQMKXLKHERFVAFVDRLILKLGFSEVVLGIPGNIQSATSQSIDITSPVSSLSKVWVAGEVLCTWTWKGXCALKTFL

SEQ ID NO: 285304 - protein, 132 aa, Zea mays
  Clone ID: MRT4577_23296C.1.pep
MAAEPIRTALLFLLVALAAAVAAAATEVVEAAPAPARTRTTTAGCRRGDLVVRQRATGRVDAWWRGSPSTRWRCGTRAGARSPACCCAATGSAAWRPWTRAPSAPSTASAACSAAAGRWRRAGAPCASPTPG

SEQ ID NO: 285305 - protein, 95 aa, Zea mays
  Clone ID: MRT4577_23297C.1.pep
HASGAHRKAGVARRQGGSFSFILERRAAARLGWPYCSGCLVSVRLRHGVAKLERQATGSSNFFPTKRYAGDKYAFAVGIIGEGDSFSCTYTRQRC

SEQ ID NO: 285306 - protein, 84 aa, Zea mays
  Clone ID: MRT4577_23298C.1.pep
KEMSHRTSNNRLYLHAIFSKPQVIIDSWDMKLEGIRVGSSIHQASIFNTSTRFLAVISRTTLKNKTVYTYNKSFSTYEHKIQQN

SEQ ID NO: 285307 - protein, 140 aa, Zea mays
  unsure (1)..(140): unsure at all Xaa locations
  Clone ID: MRT4577_23299C.1.pep
EXAGLTHPVSREYRRRRARQARASLLRRGDARYGRYVYDVAARAAAHTPPSSGLDAPAPSRTNPPRDYLFFAVHGFRMLLCLPLIRVPAAARPCSLFPLLATTPPLILSSLSLQLHDFFFFSPGRGPLFVFFFFFFFSLF

SEQ ID NO: 285308 - protein, 39 aa, Zea mays
  unsure (1)..(39): unsure at all Xaa locations
  Clone ID: MRT4577_2329C.1.pep
RSECHQIRQTCNTCSGERSHYHNQSQPPLQLNRLXQSKI

SEQ ID NO: 285309 - protein, 135 aa, Zea mays
  Clone ID: MRT4577_232C.1.pep
MAEKTFTYAEVSAHTTKKDLHMVIHDKVYDVTSFVDEHPGGEEVLLDVGGQDATEAFEDVGHSDEAREILEGLKIGVLKRQPGDPAPKTTSASSSGASASSSSGGVSVGLYAFLLLGAAAAYGVYQYLQVNAEKQ

SEQ ID NO: 285310 - protein, 104 aa, Zea mays
  Clone ID: MRT4577_23300C.1.pep
RGPKNKRQKKAGKNAFKKERHKLFSKDTKRGAGPGAETGAGPRGAPRGPPRDLAREPFDLKRREKKSGERKGKKDPRGKLSHAQNFQQKSPPKIKGKNPGGPKG

SEQ ID NO: 285311 - protein, 86 aa, Zea mays
  unsure (1)..(86): unsure at all Xaa locations
  Clone ID: MRT4577_23301C.1.pep
ACSRQQFNKIDSRVTALELAANIVHESTTIRQKLKHDIVWQQRVLYPCRQTRHKQNSKHILRIYAAAAWAAASRFLCSXGRWVDRG

SEQ ID NO: 285312 - protein, 52 aa, Zea mays
  Clone ID: MRT4577_23302C.1.pep
TDGLLTRTTDSTVVRGTKYIKWLNRHIESLYTTTRTRCAKKTYLLTNMFTSE

SEQ ID NO: 285313 - protein, 51 aa, Zea mays
  Clone ID: MRT4577_23303C.1.pep
WPIKYKRPLVNFYPCLHRRCSSKKVSTVLLLVTNARVSLLVHDSSAHNQPK

SEQ ID NO: 285314 - protein, 109 aa, Zea mays
  unsure (1)..(109): unsure at all Xaa locations
  Clone ID: MRT4577_23304C.1.pep
SKARXHIXLQFPFFSQQGNNNAXVPLNKTQKQKHTEPNNSIPHKLFFLSVLSIFAVSFAIHHHHPKPFPATCFIAPPPPLRPSCPAPLALLHPHPFPSSKGILLSASCG

SEQ ID NO: 285315 - protein, 93 aa, Zea mays
  Clone ID: MRT4577_23305C.1.pep
NNSVTHTASTPTLTVQTPVTSRSSATSLRPLADLAPYTGLPNKPTTTRRYLLLPTDSCRPRRPATLTSHRPPADHSQIDPLPSASALLSPSLS

SEQ ID NO: 285316 - protein, 37 aa, Zea mays
  Clone ID: MRT4577_23306C.1.pep
LLVKHTRRLDDRFGCHEIKQAIVNPKSTRSSISCPTR

SEQ ID NO: 285317 - protein, 66 aa, Zea mays
  Clone ID: MRT4577_23307C.1.pep
MAMAVDEHHCRSRELVRGCGSERLYQTVGIAGTISALFAYVIGVAIETWKALDGRENGQGIRAREQ

SEQ ID NO: 285318 - protein, 101 aa, Zea mays
  Clone ID: MRT4577_23308C.1.pep
PLARPRSRWSRRTPLGSTLLLLAAWTSNCIDAGEMRRGDTDSGAMPPRRKAKSIISLRGMLQRSAIAQQTLDSRVHRQDSCIVPQEHDDPARRRLGTGQAR

SEQ ID NO: 285319 - protein, 67 aa, Zea mays
  Clone ID: MRT4577_23309C.1.pep
ERKGRFLVPNFRIYSQDSYHGVVFQFHHNLTVYAVHATLLLGDNVSSNLDPLWSLPFAPLNIPLGQL

SEQ ID NO: 285320 - protein, 55 aa, Zea mays
  Clone ID: MRT4577_2330C.1.pep
TLSRPLAPARGGSSKGSRNSQNKWPQVFTSPGPFFFNWPPFLFHQPFYLKRVPLP

SEQ ID NO: 285321 - protein, 125 aa, Zea mays
  unsure (1)..(125): unsure at all Xaa locations
  Clone ID: MRT4577_23310C.1.pep
MTLKGRNGGRNKHGRGHVKYIRCSNWAKGCPKDKAIKRFWGRNIVDQAVGRDVQEAWGHEGYVLPKLNAKVNNWVXCAIHAHIVRVRSRENRRNREPPKRLRRRDDGPRPGKGPPRPGAAATEVP

SEQ ID NO: 285322 - protein, 54 aa, Zea mays
  Clone ID: MRT4577_23311C.1.pep
TLDRSQAISGLAFPKQDSGLTSRRFRQGNLDNFALNLAPYLSICSSEVSRGSFP

SEQ ID NO: 285323 - protein, 145 aa, Zea mays
  unsure (1)..(145): unsure at all Xaa locations
  Clone ID: MRT4577_23312C.1.pep
PLEARPVPGXKXXKKKKKKKKKKKKKKKKKKKKKKKKKKKKKKGFCPFFFWTPRGLGFEAQGPRKGKSGKLNQIFFLKMGNWGGQGFKKKKKKGPQGRGPSKKKGPPRGGEIQIKVFQTRHPRGGPRTPFPPKGGQLTPPPGRGF

SEQ ID NO: 285324 - protein, 90 aa, Zea mays
  unsure (1)..(90): unsure at all Xaa locations
  Clone ID: MRT4577_23313C.1.pep
TNXXXQTXNKKGAXRRKGHRKDHXEGXXXXXXGHTNSXXPXENXXKPRKXRKXQRETQTTKETKKTQTARRAHREDGRDTTARKARSREA

SEQ ID NO: 285325 - protein, 61 aa, Zea mays
  Clone ID: MRT4577_23314C.1.pep
PLRTLKVHALVGIVHTWLIHITELLSLEDGAPDNFHPDENSGNIRFPRQNNANKHHTSLCS

SEQ ID NO: 285326 - protein, 64 aa, Zea mays
  unsure (1)..(64): unsure at all Xaa locations
  Clone ID: MRT4577_23315C.1.pep
RPGLPLSPQCLLHRHQASMTTPDHTRVAPFRRDGRAPXXHPHPFNXXPPRXRPHPKRPPPGPAL

SEQ ID NO: 285327 - protein, 91 aa, Zea mays
  Clone ID: MRT4577_23316C.1.pep
MVQRPAAAGDRAGEGWSRVADQPAAAGGSSGGRWRDRRHHHQQQQELVLRRLLPINKAKACRFKRSCFSEEDDAASSAMLLLACVVCAPSL

SEQ ID NO: 285328 - protein, 57 aa, Zea mays
  Clone ID: MRT4577_23317C.1.pep
VAWAARRAAGDLLPGRAPGRESIAELATGSSEDARHLLTWCRPSGRHRRHLLNVDVL

SEQ ID NO: 285329 - protein, 75 aa, Zea mays
  Clone ID: MRT4577_23318C.1.pep
AQPKPPAFFSPPWPPPFYHWGFEAKKFGNPLFFLLTGGCLFFPFCPRGTRPLFFGIPSCARWVISPPPGIAGLFH

SEQ ID NO: 285330 - protein, 63 aa, Zea mays
  Clone ID: MRT4577_23319C.1.pep
ESRTDSMSKRVSRFSRVRSTWTTGSDGDTLVWSGWFEIECVSSAPFQSHELNFSFLLNFSYMN

SEQ ID NO: 285331 - protein, 60 aa, Zea mays
  Clone ID: MRT4577_2331C.1.pep
MGPEEKLEQKKLWKVNKHLDRFAKRGQAYGKWDKKKRGIRWGKKPVVLTEDLSKSKTIDK

SEQ ID NO: 285332 - protein, 160 aa, Zea mays
  Clone ID: MRT4577_23320C.1.pep
EKDVDGFHPLNIGKLAMKGRQPLFLPCTPKGCIELLHRSGISIKGKNAVVVGRSNIVGLPVSLLLLKEDATVTIVHSRTEEPEKIVREADIIIAAAGQAMMIKGSWIKPGAAVVDVGTNAVDDPTRKSGYRLVGDVDFQEACKVAGWITPVPGGVGPMTI

SEQ ID NO: 285333 - protein, 228 aa, Zea mays
  Clone ID: MRT4577_23321C.1.pep
MTSHYIPGGHLLSPLKENVLELKQKPKVMVKQEAPEFQAKVELHGDWGCTTSATLDNKDKCTKEIKSDEEKDKILIFRSSKIRVNKPSAVNKGTKPLQDVLDDTGSNLLPTIVNTEHTVEEPAKFTGAISDKMKGSKDGASKGHISGKNKNIKEEPSLDHGFSRKNRCDSDEYNGKPHASSCQLQNIPNKTSPLERDKGKVLHMEDEPSQYKSKENGDLFSADSMAVM

SEQ ID NO: 285334 - protein, 121 aa, Zea mays
  unsure (1)..(121): unsure at all Xaa locations
  Clone ID: MRT4577_23322C.1.pep
KKXXXKGGXFGRNRGVPSLLISKLRGLHENKGPNDVIQTGRQQTLPPKGRNPGAFQTFRSPFIWKPSLWQIPQTEVKGPPALPGWHFLCGSKKGSIPRWGGGISFLFPSWGTEKPEIPPML

SEQ ID NO: 285335 - protein, 265 aa, Zea mays
  unsure (1)..(265): unsure at all Xaa locations
  Clone ID: MRT4577_23323C.1.pep
MARGPKKHLTRINAPRSWMLDKIGGVFAPRPSCGPHKLRNSLPLVVILRNRLKYALNYHEVVKIVMQRTIKIDGXKVCTDNNMIXMWANGMYVKHLNDTGQTLGVILXSVKGRFILHKITXEESQYKLCRVKKAAIGPNKIPYVITHDGRTIRYPDPLIKANDTIKYDLSTGKITDFIKFEVGQLCLVTGGHSVGRIGTIVSRERHPGSFDIIHVRDASGNLFATRLSNIFVIGKQKTPLITLPKGKGIRLSIMEERTRRLSKRK

SEQ ID NO: 285336 - protein, 60 aa, Zea mays
  Clone ID: MRT4577_23324C.1.pep
GDGAGEEGGGGAGGRDKTSRVVQCQAALVGEEVDQYVSACLPRSGYSRTLTGRLSSILLH

SEQ ID NO: 285337 - protein, 67 aa, Zea mays
  Clone ID: MRT4577_23325C.1.pep
PIMKQTFSWRTENPSPRWATQSSGESTCSDSHTPARYDQAPHLRQKPPLPGASPVTYGGALAIHCDC

SEQ ID NO: 285338 - protein, 91 aa, Zea mays
  Clone ID: MRT4577_23326C.1.pep
FKENKFFHLNHLPPLAPFVFWKQGKNLFFTWKIGVHGAPFLGSNLLGLFNHRFGFFPPPFWQNQKLLPFFQLVFLNPPPCFYKKFFGGAAF

SEQ ID NO: 285339 - protein, 120 aa, Zea mays
  unsure (1)..(120): unsure at all Xaa locations
  Clone ID: MRT4577_23327C.1.pep
FPFNPQFPLNPGGYLQQQLFPFSRVGXAYFHQQQFFPFNQLAALNLAVYLQQQIFLPFSQLGAATRVSFLTQHQLLPFYQRFGGNPATLLXLQQLLPFVQLVLTNPAASSQQHIFGGALF

SEQ ID NO: 285340 - protein, 105 aa, Zea mays
  unsure (1)..(105): unsure at all Xaa locations
  Clone ID: MRT4577_23328C.1.pep
PKQFVPFNQLAAVHSHVYGQQQQLPPFSKIHGVSLAAFFTXPQLSPFYQHDAPNGGTFYRVXQLSPPTPLDLTNPAVLSHEPIMGGALGYISYEFQFNNKFFVKG

SEQ ID NO: 285341 - protein, 59 aa, Zea mays
  Clone ID: MRT4577_23329C.1.pep
IHHHQLDDTERSTAPSIERTYERWRPGLTVQSDPSQSMRVPPSTEQSADIKSGLVEHAY

SEQ ID NO: 285342 - protein, 98 aa, Zea mays
  Clone ID: MRT4577_2332C.1.pep
EAPSMESPEPVKPEQGFVWQEASEFEADTAGSTVERHKKAQLDRLDINVQIDDSYLVEAGDRQKRWQCRMCEKSYTSKYNLVTHILGHNGIKPHSCPH

SEQ ID NO: 285343 - protein, 65 aa, Zea mays
  Clone ID: MRT4577_23330C.1.pep
SRRRHKAEMKLGLSGSQRIAASMSNMLLIVATLASEGPGAGSSVSTGHCVMLQRYAVAGRSGILG

SEQ ID NO: 285344 - protein, 75 aa, Zea mays
  Clone ID: MRT4577_23331C.1.pep
LGGYQCMFGAKPISALILVYFCNLNVVGSAWHDYTDRSCLDLARGLPCWSLVMFAPGWSDPNRALGYFTDNDMIR

SEQ ID NO: 285345 - protein, 79 aa, Zea mays
  unsure (1)..(79): unsure at all Xaa locations
  Clone ID: MRT4577_23332C.1.pep
LLLPVAGFCPCAFLRVGLSFVRVLGXACGVWFFLLGXCGFFRFLFLRLGLLSLSCPSSSSFACWARSPXXPLLAXACVP

SEQ ID NO: 285346 - protein, 125 aa, Zea mays
  Clone ID: MRT4577_23333C.1.pep
AGRSGSQAAPAPAAAGKKKKKKEKRGEKAEAEADGLGLGVAVEKESSDPRADFRDSMVQMVLEMGLCDWDGLRGMLRRLLALNAPRHHAAILTAFAEVCAQLAGAAAPAAPPAHPSPPAPCQYRR

SEQ ID NO: 285347 - protein, 91 aa, Zea mays
  unsure (1)..(91): unsure at all Xaa locations
  Clone ID: MRT4577_23334C.1.pep
HGCAVKRGTGREFYSEHGASYYXRIMEKNQRHVVRPPTSEKCRERSNHLXLYTRLDSLPCRYESFWRDVARVKHEWRIWHGLQGEDLESAT

SEQ ID NO: 285348 - protein, 201 aa, Zea mays
  Clone ID: MRT4577_23335C.1.pep
MQPHEKVAVLKPVASRPFSSFWPFPKFLHDFNATCSPTITFPQESELIRPKATRLASLPANLPAQIAAAIDAGSDTMSEEVEEYAKHHTYRDHATAWQAARRNGERSRLSLDGYSWRKYGQKKVKGSEFPRSYYKCTHPSCPVKRKVETTPDGQVAEIVYSGEHNHLKPGKPCPPRKPLLSTSTDAVMCDTHGIDDMTPPE

SEQ ID NO: 285349 - protein, 53 aa, Zea mays
  Clone ID: MRT4577_23336C.1.pep
GAKNGPPAMFSMLGFFGQAMCPGKGPPENPFDPGAGPVAKKAWGNAPKFVPGN

SEQ ID NO: 285350 - protein, 94 aa, Zea mays
  unsure (1)..(94): unsure at all Xaa locations
  Clone ID: MRT4577_23337C.1.pep
MGAYKYVSELWXKXQYDVMRLVERVRCWEYRQYPSILRLTRATRTDKAXRTNSKAKQTYVVYRVRVRQXAWKRPAPTEIAYAETDHHSVTHLMF

SEQ ID NO: 285351 - protein, 90 aa, Zea mays
  unsure (1)..(90): unsure at all Xaa locations
  Clone ID: MRT4577_23338C.1.pep
NRCSGGWSREGKGEDNCNHFSHKHAERILDRSKSDIAANSDHMYETDGTLLKEMGMDAYTFSISWPTTLPKGTKQGGIXPDDIKYNRKPH

SEQ ID NO: 285352 - protein, 52 aa, Zea mays
  unsure (1)..(52): unsure at all Xaa locations
  Clone ID: MRT4577_23339C.1.pep
GGGVDKGAHDRQSQYLYIGVNAFKSLARHGXQESTVEEWALRCFAALLSEST

SEQ ID NO: 285353 - protein, 85 aa, Zea mays
  Clone ID: MRT4577_2333C.1.pep
MKLISRKVPKTLEDETVSLLPEDPEDMWHAYNLILPSDIIHAHAIRKVTTTSNTGSTASERVHTELAIKVKSTFFDPVISSLRVS

SEQ ID NO: 285354 - protein, 308 aa, Zea mays
  Clone ID: MRT4577_23340C.1.pep
MDGGRPEMRRTMTLSEQLSSTPDPAIRDFLKIPQDADVGGILHDEDSPSAVDAQGPRAGRTSGWKPLRDRLRLRRAAGAWQTPPNKPGAAAAHAPTNSGNLSNRYNYNPGEAAAAFSRTFSRAPSLRAPSLRATPTFSRVASTRLGPASSRSSSRRPATYDFRDLDERRHDADADDGGEEEDDEGEGEDDDDEGDEEDEKEEAPAAQMSLMALLEQTDSQWDDDEDEEESGGGGGARKKGEGDDDEDDGEGREEEMVHVCCVCMVRHKGAAFIPCGHTFCRLCSRELWVSRGNCPLCNGFIQEILDIF

SEQ ID NO: 285355 - protein, 155 aa, Zea mays
  Clone ID: MRT4577_23341C.1.pep
SRPGPKAVVLEGLRLHPPGHFVLPHGVQTDGADVGGYTVPRGAELNFLVAEIGRDETVWTKAREFRPDRFLDGGEGCGVDITGSREIKMMPFGAGRRMCPGYSLGVHHAEYFVARMVRDLEWRPPVDGVAVEMAEALDFTVVMKQPLRARIIARY

SEQ ID NO: 285356 - protein, 101 aa, Zea mays
  Clone ID: MRT4577_23342C.1.pep
MNMKLAARPSSGRHSRGCRPAVVPSAGKQMLLVRRHPPGSASWPTRATGGGGGGVPAGATAADSSGQAKEEEEEDRASRNTSSFEPSIWGDFFLTYSSPLA

SEQ ID NO: 285357 - protein, 89 aa, Zea mays
  Clone ID: MRT4577_23343C.1.pep
KKKKKKKKKKKKKKKKKKKKKKKKKKKKKKKKKKKKKGVLARAKLGWGYLGRPVPLPPPHWNIQTGETPPQKTTALILGFAGGPLPPRV

SEQ ID NO: 285358 - protein, 170 aa, Zea mays
  unsure (1)..(170): unsure at all Xaa locations
  Clone ID: MRT4577_23344C.1.pep
ERTMDDLVSVGIKRKVAEVAIHGFPILLGPKRINLEVRQLAXDGSPDLNRLLSALCLCTLSTQTSCSRPHVCDPCCDQDEAEIPEPMEEEEPLADVDADAGAAPVVVQAQPAVSVSMPSPSPLQPAQGHEEAAVLREPQPGLQQAAPMDVEEDFRQPQPQPGLHPRFWSG

SEQ ID NO: 285359 - protein, 415 aa, Zea mays
  unsure (1)..(415): unsure at all Xaa locations
  Clone ID: MRT4577_23345C.1.pep
ANCSQSQSQWKKGKLLGSGTFGQVYLGFNSENGQFCAIKEVQVIMDDPHSKERLKQLNQEIDMLRQLSHPNIVQYHGSELSDESLSICLEYVSGGSIHKLLREYGSFKEPVIRNYTGQILAGLAYLHGRNTVHRDIKGANILVGPNGEVKLADFGMAKHISSFAEIRSFKGSPYWMAPEVIMXNCKGYSLSVDIWSLGCTIIEMATAGRPSWHQYEGVAAIFKIANSKDIPEIPDSFSEEGKSFLQLCLKRNPASRASAVQLMDHPFVQDHPAVRAAKSSVLRNTPSSPADGRHTMSNRELPSRKIITPLKDIGLGMRDFTGFSTTVPSPHSSXPGRANMSTPVSPCSSPLRQFKQSNVRGMRSPPHPMLSPGLGNTVSYTQNQTRRNPAPAISDPWMDVGQMKLQSPNISPRRF

SEQ ID NO: 285360 - protein, 104 aa, Zea mays
  Clone ID: MRT4577_23346C.1.pep
TADLKKGGRGRSPGVFKGHPTNICSARGGGSTPDNRWGINKGAQDESYKTGDNFDWQPCCWWAPPPKGKIFTGGSSSGALFPFLPFNLSPKGGDHSNPRFGKGR

SEQ ID NO: 285361 - protein, 71 aa, Zea mays
  Clone ID: MRT4577_23347C.1.pep
PTPPTTMASIITTTPMRHQTGKALGSINRGTETRPKKPEKKKRETKSFSQAQQPPQNAILFSRGPWVGTPG

SEQ ID NO: 285362 - protein, 66 aa, Zea mays
  Clone ID: MRT4577_23348C.1.pep
QRRVLFFFFFFFFFWFFFFFFFFFFFFFLEQTNNSYNGLASKRKKNTLTTSTHPLPLRYPLSPPPP

SEQ ID NO: 285363 - protein, 180 aa, Zea mays
  unsure (1)..(180): unsure at all Xaa locations
  Clone ID: MRT4577_23349C.1.pep
MDICRNTSLSIRLTIGNLAAYYEGPHYLDXNQVSTLXNPGDHSQDQYXPFYLFDTDYSHQQQLLSSKQPAALNPDDHLPVKILLPVNQLDEQSRAFFXAHELKLAVYQQLAVNXASILQVQQWRAFVQVDLPKPAFYYQQHIIGGSPLTDRSLVAIQSSSWDAASLLPTTHHWGCPLLDR

SEQ ID NO: 285364 - protein, 132 aa, Zea mays
  unsure (1)..(132): unsure at all Xaa locations
  Clone ID: MRT4577_2334C.1.pep
DPKKESTPAPLMCINRGPALFGVPNGLCFVFPAWDWDFSKQSCQTLEPGFAPAPFRGGGPKSLYLAPPKPPKGDGPLNKRISSFFTPPSKRLGDFLKTPLKAFKKKKKKKKKKKKKKKKKKKXKKKRAAALE

SEQ ID NO: 285365 - protein, 67 aa, Zea mays
  unsure (1)..(67): unsure at all Xaa locations
  Clone ID: MRT4577_23350C.1.pep
AKCDCFCEIHELHYQKKVVGRLHLHDNFDYYKFAYRKEAQFLALVYRSKWAKXWTREWFYLTILPNL

SEQ ID NO: 285366 - protein, 55 aa, Zea mays
  Clone ID: MRT4577_23351C.1.pep
SESILVNVSSSITSHVSHGPVCSVFLAKLEAVDYNHLTHLSCVLHEGVNLLSHIA

SEQ ID NO: 285367 - protein, 93 aa, Zea mays
  Clone ID: MRT4577_23352C.1.pep
ASSISSHDSPNVHYTSYEFILAHFKNSLFQVHKTPTAYAKNICGVYVQYHHSTVSVVMHMNTMEYMYALIMAMIYNQIHSGTDILPRSLKARY

SEQ ID NO: 285368 - protein, 249 aa, Zea mays
  unsure (1)..(249): unsure at all Xaa locations
  Clone ID: MRT4577_23353C.1.pep
MIPVPQATELKDLFSLKGKVVVVTGASGPTGIGTEAARGCAEFGADLAITYNSRAEGAEKNAKEMSEKYGVKVKAYKCQVNEYAQCEKLVQDVIKDFGKVDVFIANAGKTADNGILDATVEQWNEVVETDLTGTFNCARAVGLHFRERKTGSLIITSSMSGHIANFPQEQTSYNVAKAGCIHMAKSLANEWRDFARVNSISPGYIDTGLSDFVXQDIQKLWHSMIPMXRDARXXRAQGAYVYFASDASS

SEQ ID NO: 285369 - protein, 265 aa, Zea mays
  unsure (1)..(265): unsure at all Xaa locations
  Clone ID: MRT4577_23354C.1.pep
RHWXAQGFIPDAGSDDTVEDTGRAYFKSLVSQSFFQIAHVDRTGEEHRYVLSEMMHDLASNVSGADCGCYLMGRQRYSVPVRVRHLTVVFCKDASQDMFQVISCGESLHTLIALGGSKDVDLKIPDDIDKRYTRLRALDLSNFGVTALPRSIGKLKHLRCLQLQGTRIRCLPESICELYNLQTLGLRNCYELEELPHDLKSLCKLRHIDLLMAPDDPRHKVCSLRCMPKDIGLLTNLQTLSRFVVSERSVVHPHRGGIGELADLN

SEQ ID NO: 285370 - protein, 212 aa, Zea mays
  unsure (1)..(212): unsure at all Xaa locations
  Clone ID: MRT4577_23355C.1.pep
MADEAKAKGNAAFSAGRFEEAARHFTDAIALAPGNHVLYSXRYSDALADAQKTVELKPDWAKGYSRLGAAHLGLGDAASAVAAYEKGLALDPSNEGLKAGLEDAKKAAAAPPRRGPSGPDAIGQMFQGPELWSKIASDPTTRAYLNEPDFMQMLREVQRNPSSISMYLSDPRMMQVLSLMLNVKIQRPEASEPSQSTPPPPPPQQQQTSPLQ

SEQ ID NO: 285371 - protein, 53 aa, Zea mays
  Clone ID: MRT4577_23356C.1.pep
KRDHKLELRTIQTTTRGDTDTGHALQKPKPTTKYTRRNNKQQHQKARYNPQTH

SEQ ID NO: 285372 - protein, 68 aa, Zea mays
  Clone ID: MRT4577_23357C.1.pep
SYPIWIGCLTARYPFDLNLRLEDLVKATPPSSQTGLRAPPVKLVKTVPLAVKPATSPSVNFSIQRSLD

SEQ ID NO: 285373 - protein, 191 aa, Zea mays
  Clone ID: MRT4577_23358C.1.pep
MAPSTTEDLVPEPVAATKDTTTLPERPGTTLNEAELQELAFTDKYSAPDVYINAKTDTLWFPWIGPIELKPLRMDNRTGTFVVGLRSAVAASLGRHRHRGTVTAVTMAGEWGYKEYDWVARPGDWVCENPGVIHTLSVEDNTDIVFTVSGTIEFLNDDDSLKFALDIFSFAKTYYDYCKEKGIKPNDTLWH

SEQ ID NO: 285374 - protein, 87 aa, Zea mays
  Clone ID: MRT4577_2335C.1.pep
VSASSPCPRRRGEPLSVPIVRRLIAPDHRTWWVAAIVRFVMSFRSAPTCPSSSSGDTSCPVLYMHACIWHPPVMACLRRQPLAFLLS

SEQ ID NO: 285375 - protein, 68 aa, Zea mays
  Clone ID: MRT4577_23361C.1.pep
LAGKKYSSLVGAGSLLSSDRTGCPAILPLQTQRPHIAPSLCEKRTDCLREPSIVEEADHSSRRRRQCL

SEQ ID NO: 285376 - protein, 34 aa, Zea mays
  Clone ID: MRT4577_23362C.1.pep
GLKKGELYCLFRNNELPMLQERGKDFVILGKIPF

SEQ ID NO: 285377 - protein, 69 aa, Zea mays
  Clone ID: MRT4577_23363C.1.pep
AFRSLVIPSHSCWLTDIVPELDLDGAGSAARAARLVLALDSSTALGAGGMRHFDLSREKVCLRIMLFKK

SEQ ID NO: 285378 - protein, 39 aa, Zea mays
  unsure (1)..(39): unsure at all Xaa locations
  Clone ID: MRT4577_23364C.1.pep
XPGDLYILYLYKPTTYILHFLITSNKNQLTFFTTIHYNI

SEQ ID NO: 285379 - protein, 38 aa, Zea mays
  unsure (1)..(38): unsure at all Xaa locations
  Clone ID: MRT4577_23365C.1.pep
TITLTMVIQRSHNDSMVVPYNSLHXDILLALHTPCTRS

SEQ ID NO: 285380 - protein, 137 aa, Zea mays
  unsure (1)..(137): unsure at all Xaa locations
  Clone ID: MRT4577_23366C.1.pep
NCIMVVVDKFSKYAHFIPLHHPFTALAIAHQFMDNVFKLHGFPQALITDRDRIFTSALSQKLFKLPGVKLRFTTAYHPQSVGQTERVNQCLETYLRCYTQACPSKWKRWLALAEFGYNTSYHAXLKLTPFKVLYGYP

SEQ ID NO: 285381 - protein, 404 aa, Zea mays
  Clone ID: MRT4577_23367C.1.pep
MSSKKNYYKEKLMRRKEEKKEEPETPRYRDRAKERREDQNPDYEPTELGSFHAVAPPGNDLRLADAHKISIEKSKYLGGDLEHTHLVKGLDYALLHKVRSEIEKKPEAEDGKDTKSRAAKEDQAVSFRTATAKSVYQWIIKPQSIIKENELFLPGRMSFIYNMEEGVTNDIPTTLHRSKADCPVPEEMVTVSVDGSVLERIAKIMTYLRLGSSGKVLKKKKKERDIKGKSNLASGDYGESVKPSQTNGSTLKHQSDMPPPPAPPPRNNNFNGKEKQPVPVSREDDDDIFVGDGVDYLVPNKEMSQSPVSDMDESPHNHQKQSNFTEPLYGPVPPSESAQAWQQPNTYDAAVQAQMAAAGYQGDWSSYVYAEQQLGYPEQYVQQSTQEYDVLADPSISQDPRFMT

SEQ ID NO: 285382 - protein, 101 aa, Zea mays
  Clone ID: MRT4577_23368C.1.pep
VRSAQGKPENRELGRHQDSPLPPTAPDQLFLLEEVRERKFDGFARTIQKAWRRHVAVRKYEEMREEASNILLNKKERRRNSINRNFVGDYLGLEERPSCVS

SEQ ID NO: 285383 - protein, 119 aa, Zea mays
  Clone ID: MRT4577_23369C.1.pep
LLSEPTTSFPFYLWIFVKNRAMSLNRICSLYISLQAYYRILGSKPNGFKDIVRPKWLHSIVTISVFRFSFSHLGDIGLQSGANINGFRLNQTSSSVALLQISPDLTFWITNLHDCGSYD

SEQ ID NO: 285384 - protein, 51 aa, Zea mays
  Clone ID: MRT4577_2336C.1.pep
DLKLHYLVIAFLQKDCFEVYALVPGLLREEVRKYGAIHVESRVLKLFIDLR

SEQ ID NO: 285385 - protein, 65 aa, Zea mays
  Clone ID: MRT4577_23370C.1.pep
IFSTHKQCTLGCVSKSKDKSFFGAFDLTGVTAPNITTSFTYDFCFKQFIAVIFNPYCFREKVSLC

SEQ ID NO: 285386 - protein, 101 aa, Zea mays
  unsure (1)..(101): unsure at all Xaa locations
  Clone ID: MRT4577_23371C.1.pep
KKYKKKIKKKKKKKXKKKKKKNNKIKKKKKKKXKKKNRNIKRNKKRKKKKKKKKKKKRKKKKRMKEEKKXYIKESKKKKKGKKEKKERRGKRHXIGWDRKN

SEQ ID NO: 285387 - protein, 97 aa, Zea mays
  Clone ID: MRT4577_23372C.1.pep
PALTLTHILTFNQTLILNDLLISTIELITYTSSIITYFILFQTLNHDISIITFIHPHIFYTFLIIHKHHNFTIHTYFLTHLISYYIYQTIFLKIIYT

SEQ ID NO: 285388 - protein, 42 aa, Zea mays
  Clone ID: MRT4577_23373C.1.pep
SCPSYLKICDWPLNLSVFPPLSSLSLTSSVEKPAENKKHGPS

SEQ ID NO: 285389 - protein, 83 aa, Zea mays
  unsure (1)..(83): unsure at all Xaa locations
  Clone ID: MRT4577_23374C.1.pep
TSTSTINSECSTAPIVSLLTPXPSPALNQAWENPILHPYTIQHAVTDGILSLSPLIIPQSXRLLHEFPLVHGQAQNIQVQQLP

SEQ ID NO: 285390 - protein, 173 aa, Zea mays
  Clone ID: MRT4577_23375C.1.pep
EMDKSIPLHVQVNDESCFAVRRKCDEGFRLGLEATKDKLLACVPKIRLGLEATTWLTTTSSTSSTAPPTFEACRRPPPAYKAASSGSTRIILSPDSMSYCDFVWADWLGSRGSVRGQGRGSWTGAGRTPCRRWSRTSEGMCCTVGATTRGFRAGAGDDGRRQRGSEQQIASES

SEQ ID NO: 285391 - protein, 113 aa, Zea mays
  Clone ID: MRT4577_23376C.1.pep
SARGRHTAAYGRSKDGPQVPGISLIHTRLLGVHAGGVRSVPLALAVTLCECATEAPSKTEPYPCDIPDAVRPETCDPIRNRYLHPARMTARCGALGPNLSKARCYKRKAWASR

SEQ ID NO: 285392 - protein, 59 aa, Zea mays
  Clone ID: MRT4577_23377C.1.pep
MCGGAILAELIPSAPARRGVTPGHGRGGKGRRTAANDDDDFEARFPDFDEDSEEEPVCA

SEQ ID NO: 285393 - protein, 65 aa, Zea mays
  Clone ID: MRT4577_23378C.1.pep
KLLLTKVLHSDVCKSSCAMHLYPSVPIFLRQARLMGPRPALPSGLDPDSAFAVRVQSQALAGPLI

SEQ ID NO: 285394 - protein, 129 aa, Zea mays
  unsure (1)..(129): unsure at all Xaa locations
  Clone ID: MRT4577_23379C.1.pep
PGRARCRHSGSLPGVGSYCVGGCVRTGRSPASGLLPGWRRRYAICRCPWPWFAGCRKKVVGSSPLSRDRDRLPSRGFAPVERRGIWSACAWGACGRKHSCRGASSGSRIDRREXGHSHCFPSTRQXNKK

SEQ ID NO: 285395 - protein, 93 aa, Zea mays
  unsure (1)..(93): unsure at all Xaa locations
  Clone ID: MRT4577_2337C.1.pep
SSRLTSGTSTKVSTAPLPRPSTASKVCPTCPSKTTSPKRSSTRTVLLWTRSANPSLAXSXSTSSSCRTALSRTTITPTRLSSSTRIPTSSSAP

SEQ ID NO: 285396 - protein, 72 aa, Zea mays
  Clone ID: MRT4577_23380C.1.pep
LFPCVGVTGLDYTRSMGPFLVCASRPSFWCDRTLPFGQIRLVVCKLFFTHSPCVMRHSRFRLNNSVSSKTPP

SEQ ID NO: 285397 - protein, 61 aa, Zea mays
  Clone ID: MRT4577_23381C.1.pep
LRSRSILLLDHTFSYHARLHLKAEVPVTVYYTGTHVTCVFEDLRMMKATNTHQGNLRQHRY

SEQ ID NO: 285398 - protein, 102 aa, Zea mays
  unsure (1)..(102): unsure at all Xaa locations
  Clone ID: MRT4577_23382C.1.pep
IIYSDCRSQRNPLNTTRVRLDAFFIVALKMNVTARHTXGVDGXKPGPPPHKPAAVHMPYPVELTHQERLPRSVLQTAPMHLGPKGPVPAPVHKPRGRCHYPN

SEQ ID NO: 285399 - protein, 246 aa, Zea mays
  unsure (1)..(246): unsure at all Xaa locations
  Clone ID: MRT4577_23383C.1.pep
RDNCSYAKIRPLTVSFILSFIGFFLPESVDDGRVXFQGAMSFVYIWDEXMHIAQAAEFSSSDSPNLYIVSWNDHFFLLKVEHDAYYIIDTLGERLHEGCSQAYILKFDKNTTIHKVPGEKKPCSPDSSGPMKDSSGSENSTTDQDSGNDTEEEVLVSKGKESCKEYIKSFLAAIPIRELQADIKKGLMASTPLHHRLQIEFQYTQSSPKETASATQLLTMEAPFEFSWPEPPPTMEVTLTPAVSVV

SEQ ID NO: 285400 - protein, 46 aa, Zea mays
  unsure (1)..(46): unsure at all Xaa locations
  Clone ID: MRT4577_23384C.1.pep
GLLTEACTGCNHLFXRLQENHMGCTVNVAKILNFIQLKQVLIYVWG

SEQ ID NO: 285401 - protein, 56 aa, Zea mays
  unsure (1)..(56): unsure at all Xaa locations
  Clone ID: MRT4577_23385C.1.pep
LRLASRGTAAWYAAFEQAGAHXPSSQAALIMPIASPYSILLSAYNSTLLTIHNHKI

SEQ ID NO: 285402 - protein, 66 aa, Zea mays
  Clone ID: MRT4577_23386C.1.pep
ILFWKANLARPSTYYNPSLKPCGALPCLLTTPTKMPPSLIQDTTMISLTVRGSIHAQKKITRVIVD

SEQ ID NO: 285403 - protein, 293 aa, Zea mays
  unsure (1)..(293): unsure at all Xaa locations
  Clone ID: MRT4577_23387C.1.pep
LGTSRPAGSWHLDXLILRHDLSAMLQEVIRRPLLCLRKELYNRMEWRIIIICLVCSPTIFMEMRSLLHFWLLATGLGSVLELNNALVSSALDILLKPMSWGISIELGQRFPFSHAYFPSQQSDLLAILTGPLSYKGFLDLVSYISALVHLDNTRTRCSSQKNLQLQPSKGLVKYNSAWYMIISFPIWFSYATALLFHREGSQDYLSETLSKEITAESISDVSLVQRAAFYLSWLLCPYNHDQREMLSNNILEISHCWARNNKKCVSYPSTVNNRRKLRIPTAADSEKMCQSTL

SEQ ID NO: 285404 - protein, 102 aa, Zea mays
  unsure (1)..(102): unsure at all Xaa locations
  Clone ID: MRT4577_23388C.1.pep
DPRAXRKQIYAILTQEQNGHRPTEAEVRESLGTKLGRLKEQARDMASRHPVVGAVAVIAVSARGAYFLCAWAAPVVGVMKAPGSGGVLISRAAFLLKKEREL

SEQ ID NO: 285405 - protein, 59 aa, Zea mays
  Clone ID: MRT4577_23389C.1.pep
MGGAQLVGRWVESYTGMSPDNIKGLLLALSSSLFIGASFIVKKKGLKKAGAPGIRAGEG

SEQ ID NO: 285406 - protein, 124 aa, Zea mays
  unsure (1)..(124): unsure at all Xaa locations
  Clone ID: MRT4577_2338C.1.pep
SAYRPFKHIPKCFLRDLFQKHFADNREEKVALVKGITAKEGFELTPLPQEVFIIWGEFDQIYPVEKAHKMGGKLGEKATVKVIPGXGTGHLPQQQDIKLFNRXLLDFLLQPAAASTSNGSAAAK

SEQ ID NO: 285407 - protein, 69 aa, Zea mays
  Clone ID: MRT4577_23390C.1.pep
SYSRLSLSPSASLLDGLLRSHQVRRHLQQVGLCVLVHRLLRSMSERRLSGFIQNECSECRISERPTGSD

SEQ ID NO: 285408 - protein, 48 aa, Zea mays
  Clone ID: MRT4577_23391C.1.pep
THWAHIIPTNQHGQRTVGDRTGQATLALASLTVPMNLYQAITYGNVTS

SEQ ID NO: 285409 - protein, 40 aa, Zea mays
  Clone ID: MRT4577_23392C.1.pep
GKLDSPISTGTVYSRLDRSVRPHQFPTRIGQGPRRNFPFS

SEQ ID NO: 285410 - protein, 119 aa, Zea mays
  unsure (1)..(119): unsure at all Xaa locations
  Clone ID: MRT4577_23393C.1.pep
MHLHRPVYHGSGHGRACDVYHYTRQLRLLLLHLGEGAGMMKDYXEPGTLAPSGLXAGCIAYTMVIQGXEPGADIRXRKALRCITISEHWHVLXIIGIYDEPLTPGHCNMAVERLEDYLH

SEQ ID NO: 285411 - protein, 78 aa, Zea mays
  Clone ID: MRT4577_23394C.1.pep
AKALDLIWEVWASEERIFVRRAVKFYVFDLTVLSVSSVLLLSDVPALLHQAFRRWVIGVSLGVGQVAQVVKREIASGH

SEQ ID NO: 285412 - protein, 139 aa, Zea mays
  Clone ID: MRT4577_23395C.1.pep
MHWRSGCKSYFLTLTCQEVLLLLLFLSLKLLHVHISKNGMGVLLNSLTGATGNGVLGEAILDQSDELVSNALNHRKRNLVLEHDGRNGSVASYRGVVSDEDRVTNPGHARKDSAESIWSDLSSLRGSELSIPGVSSFLW

SEQ ID NO: 285413 - protein, 127 aa, Zea mays
  Clone ID: MRT4577_23396C.1.pep
LMKGSRPLVSAALYMLEVVELTFTFCSSVYPTEIRFHTERYGIVALIQTCLVRAFMLDGVYIFYDSGLEGISSAPFLERLELLDCKRITGAGVSFVAPRLSSLTISGEGVQGPATDSMFGNTVYRNI

SEQ ID NO: 285414 - protein, 704 aa, Zea mays
  Clone ID: MRT4577_23397C.1.pep
MATSAAAGSRRKAPSPPKHRHDGTSPLPLGMDWSPPPKRWEGRNTIWPHNPQTGWSYCVMMPSWITQTPETGVTADSFLKSVVFYRIHVGIQSSEGFSSIHGILRRFSDFLKLSSDLKSAFPRKDVPSAPPKHAFLRINSSRLLLEERRHALEEWMQKLLSDIDLSRSAPVAAFLELEAAARSYFQERNGRPSEVGPSAKSSTKSSSHSDGPASGSLAESNEINQGLTRGSSLTGATGNGVLGEAILDQSDEHVSSALNHRKGNLVLEHDGRNGSVASYRGVLSEEDRDSYPGHARKDSAESIGSDLSSLRGSELSVPGASNSLWDGAVVDGHVSQTEHLTGLDMHLLYDMDAQVILPNDKKQKLTRLLITMQRRIGTAKTDMEDLIARLNQEGAVKEYLTTKVKDLEVELEATKQKGRETLQQAILTERERITQMQWDMDELRRKYSEMESNLKTEHNEKTRAESERTTASGENETLLEELEIKQKEVESLKQQLVEAEAKSKADKKVLVKEVKSLRNSQTEMKKVLNQYLEEKTDLERVINRDKQRSARTKLSRVKILHECRLLRERLQDCSAKFLAEEQDNFTIDPSSLPDALDLLATSDNRIRLLVAEAQLLARDDEQGSSDGGDDSDSRSSLTMSSEDAKVTDEDTTKMLSDLLIDNAQLRLRLNAVIRNAVNTSVKPEKEGSGEVLPKKTVLNWLLDR

SEQ ID NO: 285415 - protein, 91 aa, Zea mays
  Clone ID: MRT4577_23398C.1.pep
RIPVAPRPPSVRKRRRHALVDLKIARTNSAQSIVIQMKSWTCPRLNGRFPKADHVYLTSPPWGDYHFIVGDISIPTCFGAVTTTLSLIFNH

SEQ ID NO: 285416 - protein, 55 aa, Zea mays
  unsure (1)..(55): unsure at all Xaa locations
  Clone ID: MRT4577_23399C.1.pep
KEEPKCRFAGEIKKEQHPSVGLNLHLLCCCFLGKYCFDFKIGLVISALKXTQIFF

SEQ ID NO: 285417 - protein, 57 aa, Zea mays
  Clone ID: MRT4577_2339C.1.pep
GKGGRHYFELNGLSHELLAIGMGLLLFHGFAFFSGSLSHHELSKILVAYYHIIRGCS

SEQ ID NO: 285418 - protein, 63 aa, Zea mays
  unsure (1)..(63): unsure at all Xaa locations
  Clone ID: MRT4577_233C.1.pep
SQIILAPRPSGSLIGHPLGARESSRGKVARRASGVPEATENTSGAAPGXEQEERVEVGGGSPP

SEQ ID NO: 285419 - protein, 65 aa, Zea mays
  Clone ID: MRT4577_23400C.1.pep
NIISNRIKFKYEQIISVPFTSFCTIYILNRRRTPFHLNRQQIILQFLLYRMITKVTCLRTRESFR

SEQ ID NO: 285420 - protein, 143 aa, Zea mays
  Clone ID: MRT4577_23401C.1.pep
TLFAGDFLEEETLLGWFNPPFPTGKDSPVVKKTKPFFEWVQNPEFFHEEGEKKKRDAALLFKGSLDKINSKSFFCLFGVNKASFFLGSIGLGSKFKNRYCWAAQQTLSGWLGLGSAPFGFGSPGLLSSCGAPPKIKVAWGGFF

SEQ ID NO: 285421 - protein, 72 aa, Zea mays
  Clone ID: MRT4577_23402C.1.pep
MIAFDRACGLGLYCGVLAVLRGGRARKTLCKVAWESFVVCFLVYRYIMEVCLLKCDDIWERGRGLGFLFNIY

SEQ ID NO: 285422 - protein, 73 aa, Zea mays
  unsure (1)..(73): unsure at all Xaa locations
  Clone ID: MRT4577_23403C.1.pep
ITIIRIEFNSNYPNGLXFEFETKRXSDDLKDGVLCNGIQGREHRSGFSRLASSCTQLRVQGCLLVACWLTVGR

SEQ ID NO: 285423 - protein, 100 aa, Zea mays
  Clone ID: MRT4577_23404C.1.pep
DHAQGYHIKGRYADEILLAPVYIRVLAQNINYGAHPDYSIDKSKNALCVRFSVDYREVDARQWELERRSHLRVVVLCYRRHDCSASHQGILEEQVYHQGQ

SEQ ID NO: 285424 - protein, 60 aa, Zea mays
  Clone ID: MRT4577_23405C.1.pep
AYQILMAYYSPSLSAFVYHLVHCNGLADIKRFIRVYGKYRAQYLVILVYLEVVHPLPHSN

SEQ ID NO: 285425 - protein, 118 aa, Zea mays
  Clone ID: MRT4577_23406C.1.pep
GCFVSSDPRRLDLILISTTMRKGDLGHPAGRRLRHLLLPPPRRATSPSASRDTTSPTRTSPSSTKTTDCPPALDSDVSDIRKARGICRYISTPNDDHQLSHHGLLDADSHYYEVLAES

SEQ ID NO: 285426 - protein, 89 aa, Zea mays
  Clone ID: MRT4577_23407C.1.pep
STLSAAGQRSTRDDRPSVLVISTKNRAPEPGPGPRPGEVEASKSGYGAGLRDWVALVEGLRDARDGVPSDVLHRCRWRGDQASQAQSRQ

SEQ ID NO: 285427 - protein, 93 aa, Zea mays
  Clone ID: MRT4577_23408C.1.pep
WGGKIKTCHFFFFLGPRRFKLFMAQESREPQKFYQKGFPGWVCRVNLNQLFKGVSGGILGFPFREPCKKFLFQRGFLPISKRKPPFLSPNFFF

SEQ ID NO: 285428 - protein, 153 aa, Zea mays
  unsure (1)..(153): unsure at all Xaa locations
  Clone ID: MRT4577_23409C.1.pep
APNDQTAFLFSMPNRNPIFQPPEPPRPSPFPSSXVKKKWAQNLSLASICYGRPLFLLGALWKWKSKPPASKNSILGVKSNPVLIIGSVFLLKFGLGSPPVFVKKFFPPPPLSLRVWAKICCCPPSFTGVFSRVSVKIWASPLPVLGPIQFVSP

SEQ ID NO: 285429 - protein, 162 aa, Zea mays
  Clone ID: MRT4577_2340C.1.pep
QNWFDNFLLRFHQVMDFLSSLVILKRITELIKWKSTLHWGPWRFSKFSFANQSLGYYSHESLTLQKTPRVLQNLTRGPSSTLNSSRGEEKGGGAYRRRDCSGEVVEDEGEVAGITTVCGTPSEMAGVGRSTRAGGDARRRRGDRPGHGKIVQLDGSGRSTGC

SEQ ID NO: 285430 - protein, 324 aa, Zea mays
  unsure (1)..(324): unsure at all Xaa locations
  Clone ID: MRT4577_23410C.1.pep
MILLQSPSRFLLQILQDRVLSGEKGMDIDCHTVEFDDVRYHIQFSMRNPKVMVLSVALPLPPPEAILYDGLPLGAIEAIKAAYGPVVQILDPPKDGFDLTMKINLTKLPLDEEQRNTILTQIASIREVVLGAPLKLLLKHLASKTVAPNVNNLVALVHRPNESFFLAPQADKVTIVYPMRFQDSIDIVLATSFLQEFVEARRTAALNNVPSCMWSPVPPLELKGVSADALNANAGFVTFVVYPRHVEGKKLDRTVWNLLTFHAYVSYHVKCSGGFMHTRMRRRVESLIQXALDRAKSDAEKLKKLVHGGSFKRLSLKNEGDSRF

SEQ ID NO: 285431 - protein, 77 aa, Zea mays
  Clone ID: MRT4577_23411C.1.pep
KGSFHSKWKDWKNFVLGPFEFCPLLARKRDFLGNLTGIFLRFKFWGKKNNVPGFKRRAKKNVCFPPGFAKKKKNAFS

SEQ ID NO: 285432 - protein, 68 aa, Zea mays
  Clone ID: MRT4577_23413C.1.pep
SVTVMNQQNSSMMSVDVDHHELDKEADESHHDQADGSAHGAHESENPWPDAWAHAWTYAWPDVWADAW

SEQ ID NO: 285433 - protein, 69 aa, Zea mays
  Clone ID: MRT4577_23414C.1.pep
NRKPTGERAETSRQSKATERKESVIEQAQESGKRKRILHTRWRIYINAAGSAGLPYGKRTVSKTQLMWS

SEQ ID NO: 285434 - protein, 85 aa, Zea mays
  unsure (1)..(85): unsure at all Xaa locations
  Clone ID: MRT4577_23415C.1.pep
MSIILFYIITNELVELLVALVNGGDGMQIAMSGCYAGPMFNTLAGLGTLLLXLIWALVMLPRGDMQPNKILGVGLIALYSNFLFI

SEQ ID NO: 285435 - protein, 66 aa, Zea mays
  Clone ID: MRT4577_23416C.1.pep
PMITATSIEMAMKLYEVLLMENGKEKVLSGQIGVTRWPPLPSQKRGAPHQLLRAARRSRGVLYKKK

SEQ ID NO: 285436 - protein, 56 aa, Zea mays
  unsure (1)..(56): unsure at all Xaa locations
  Clone ID: MRT4577_23417C.1.pep
AGSVVFADVLFRWLHTDVCVEIMAYQWGSCLGYNANQXTRDGAYSAAQLEDWVSLK

SEQ ID NO: 285437 - protein, 100 aa, Zea mays
  Clone ID: MRT4577_23418C.1.pep
YSASSPVRRVRSAADQALHGQDQHLQQAVRRMGPSGSGAALCYEGHRDAAANHGRLRRGHIHLLAKNFSHRRRRSQPLATLPYLTALHAVLAQTLGPAVG

SEQ ID NO: 285438 - protein, 20 aa, Zea mays
  Clone ID: MRT4577_23419C.1.pep
YIQSIIYVRIRILTQYSQMI

SEQ ID NO: 285439 - protein, 416 aa, Zea mays
  Clone ID: MRT4577_2341C.1.pep
MRRAAVAATTTTTRMAAEEMRRASASTATAEMPASPAPAQAGSRWARVWPRALRWIPTSTDRIIAAEKRLLTIVKTGYVQERVNIGSAPPGSKVRWFRSASDEPRFINTVTFDSKENAPTLVMVHGYGASQGFFFRNFDALASRFRVIAIDQLGWGGSSRPDFTCKSTEETEAWFIDSFEEWRKAKNLSNFILLGHSFGGYVAAKYALKHPEHVQQLILVGPAGFSSETEHSSEWLTKFRATWKGMLMNRLWESNFTPQRVIRGLGPWGPGLVQRYTSARFGTSSTGELLTDEESALMTDYMYHTLAAKASGELCLKYIFSFGAFARKPLLQCASDWKVPTTFIYGQQDWMNYQGAQQARKDMKVPCEIIRVPQGGHFVFIDNPSGFHSAVFYACRNLLSVNGEEGFTFPDGLISA

SEQ ID NO: 285440 - protein, 57 aa, Zea mays
  Clone ID: MRT4577_23420C.1.pep
VKYAAMLGLTGGAMKFTLFADQKKRLVQRLTATGIINAINRLVIKLKNVAEITTLLY

SEQ ID NO: 285441 - protein, 99 aa, Zea mays
  Clone ID: MRT4577_23421C.1.pep
RAPPRVFWVIFSNLRAGEKKPPLFFLYHRKKGRQIGAPPKGIPTLKKYQGRPKSVQARPPPGVLLNPPKPAPAPKCCWSPRSWGPFCPFFRIQILVFFF

SEQ ID NO: 285442 - protein, 197 aa, Zea mays
  unsure (1)..(197): unsure at all Xaa locations
  Clone ID: MRT4577_23422C.1.pep
MLAALCRAGDLATARRLFDGMRAGEQGGEAGAFPNVVTYTTMIRACCARRLADEALSLFKMMLADGVRPNRITYNTMVQGFCQAGRMELVKEVFGMDSFKPDTCTFNTLMAAHCREGRIQDAKKVFDQTMELRVRRDSASYSIVTRALCENGEFGRAEELVDSLLEELVXQPLVASYNPVFKYLCENGKAKKAKKAR

SEQ ID NO: 285443 - protein, 140 aa, Zea mays
  Clone ID: MRT4577_23423C.1.pep
ARSWRALASCRSGAWRPGAALAAVVRVALALGVAVGAVAACFGCGAAAPRLPSPGLMVVFALLQWFSSVFLCVGFRLFPLVLPPLVAGCGASRVWLVARVWLSPCRWLLGVAPCHVALVCVASMAWLSRLFFPARRRAVV

SEQ ID NO: 285444 - protein, 220 aa, Zea mays
  Clone ID: MRT4577_23424C.1.pep
MAAAVESVVVVHNVAKRHNVGTLARSATAFGVAEVVVVGRRDVSAFGSHGATSHLRFRHFVSLALARAYLKDERGCDICGVEITDDAQPVTAHPFRRSTAFLFGNEGTGLSQKECEICDFFVYIPQYGGGTASLNVTVAASIVLHHFGVWAGFTERGREGNKFVVAERPQGHSRGLYCTDSVEAVVEERKMRKENACDVLEENGCSHLQESNGLDLMFAD

SEQ ID NO: 285445 - protein, 48 aa, Zea mays
  Clone ID: MRT4577_23425C.1.pep
AYIRVVRPAKTCHIKRRNHNCMKTPALNSTTVHYGLIQCILERGKKGF

SEQ ID NO: 285446 - protein, 113 aa, Zea mays
  Clone ID: MRT4577_23426C.1.pep
MVEASPESGAAATGGASSTAAVRKGKSCKGCLYYSSVLKSRGYNPICVGIPRSIPQVPNYVVDEPKEEATAQGHDLRRFRYGCAGYSMFVDNRNSWTGLRGALDWSLQVLRRI

SEQ ID NO: 285447 - protein, 186 aa, Zea mays
  unsure (1)..(186): unsure at all Xaa locations
  Clone ID: MRT4577_23427C.1.pep
FACSLPSPQPSGRPHSFPSYFGAVRRTPGLPANLVPSSHLEGPNRGIRLWLSGLGYSGPLNEPIGNLLAAAEIPIFKWXFPSAASAPESGTNAFCMPPWFDIHELHMDSRSPIEYTEVLMAVENVNSMIYRILCYAIPPENICVWGFRRSGALSLSSVLIYPEKLRATAAFIVRSCIPDVSDSEDF

SEQ ID NO: 285448 - protein, 88 aa, Zea mays
  Clone ID: MRT4577_23428C.1.pep
WGATWQLFLWPWCYNCKPAGPVKLGIKWLVPSMLPCFFGMGGRRTYFGRKFMHPCVPAPQPMGKFQICPGHMKVLLFVAQQKCFSPPF

SEQ ID NO: 285449 - protein, 68 aa, Zea mays
  Clone ID: MRT4577_23429C.1.pep
GTGPPSSFFFFFFFFFFFFFFFFFFFWNGLNTNFSSTQKSFSLKTYIYKSFYIKPKKNPIPSPQGIKH

SEQ ID NO: 285450 - protein, 71 aa, Zea mays
  Clone ID: MRT4577_2342C.1.pep
LSNRTHATSTFTSTQATTRTVKLALTSQSNNFNSFPLPLLPDASCHCLELSGHQHLTLSAYTPQLFNISKA

SEQ ID NO: 285451 - protein, 202 aa, Zea mays
  unsure (1)..(202): unsure at all Xaa locations
  Clone ID: MRT4577_23430C.1.pep
MVEASPESGAAATGGASSTAAVRKGKSCKGCLYYSSVLKSRGYNPICVGIPRSIPQVPNYVVDEPKEEATAQGHDLRRFRYGCAGYSMFVDNRDGQGGESEGKTLLPYCRGLELLVDSRLVERKPSATEQAPAHVAKDAAYHPLSPTRTTETSELVEAGXFLDRFKRSAGLVASGVAKNLNKTANYIKENIQDMYTDRRPPK

SEQ ID NO: 285452 - protein, 108 aa, Zea mays
  unsure (1)..(108): unsure at all Xaa locations
  Clone ID: MRT4577_23431C.1.pep
SRPTLPPTPPSSAPFFFFPSAVLPXGVLSYGGWTASSYHLPFLHGLMLVCPLLLLPPILLLLILINSDQLILHFYNLNYYLSILNIQIYIFNCFEPIILSCYFIFFIS

SEQ ID NO: 285453 - protein, 93 aa, Zea mays
  Clone ID: MRT4577_23432C.1.pep
FVSPYPYFCTPLFSKNKRRFFCLAHRFPVYSVSKNTKCFPLPPKRCFFVNMANTVFSNKFFFISPLFCFLVVHKIETLLYLANFFLFQKIYII

SEQ ID NO: 285454 - protein, 98 aa, Zea mays
  Clone ID: MRT4577_23433C.1.pep
PSPVGALALRSSTLPPLQILRLLRQSLWHRLAQLLFIRVSLEFTGKPGAASPDLRSLRAQIGGSVSQCAQSCIDRLIWRPLKNQSFRMRLPLQILNKL

SEQ ID NO: 285455 - protein, 182 aa, Zea mays
  Clone ID: MRT4577_23434C.1.pep
MGMILKINLMGVPLQVDDLFFNIDRKKQRKRGCFVCGEKGHFRDSCPTMVEHKKGRGKGKALTSVKTWDDSSSEEEPPRTRSHRSSSRSSRKCLMARGLLEKFETFANLNCELSTKIAQLESSAPSTATDDGLIKKNEKLKAKLSSSQEAIENLLGKMEILSINNNELTIKPENIGSTQGHL

SEQ ID NO: 285456 - protein, 42 aa, Zea mays
  Clone ID: MRT4577_23435C.1.pep
MTTAAFPDNDAVFPKLRCGTFNWPRPRVSLAPEDVETWIRGT

SEQ ID NO: 285457 - protein, 59 aa, Zea mays
  Clone ID: MRT4577_23436C.1.pep
GESPSPLYFAPLLRRAFCSALLCFSPPGVSGLFYIVDYSWGTPKFFPIFLYCTSSGHVL

SEQ ID NO: 285458 - protein, 195 aa, Zea mays
  unsure (1)..(195): unsure at all Xaa locations
  Clone ID: MRT4577_23437C.1.pep
MHPSGGALSVPPGFRFHPTDEELLYYYLRKKVAYEAIDLDVIREIDLNKLEPWDLKDRCRIGTGPQNEWYFFSHKDKKYPTGTRTNRATTAGFWKATGRDKAIFLGSGSRRIGMRKTLVFYVGRAPHGKKTDWIMHEYRLDEDNVEVQEDGWVVCRVFTKKSYTRGVNPAEMAGYDDDELLHXSRFHLPPPAQCI

SEQ ID NO: 285459 - protein, 86 aa, Zea mays
  Clone ID: MRT4577_23438C.1.pep
PSIGLVTGHMTIALNTMQVAGVSPSLGYHNAYRLEHMWISIPLPCWCRINRRAESLWPVPTVSCIQPPRYRAFIPPDRASKRLEPN

SEQ ID NO: 285460 - protein, 83 aa, Zea mays
  unsure (1)..(83): unsure at all Xaa locations
  Clone ID: MRT4577_23439C.1.pep
SVSYYTGFGAAALLLLAGRAAAFWCFGKLVRGLRGKFRGTDQSVGVANQLQHRASISQVRDPKLHDDLETLGGCDXLFACRLF

SEQ ID NO: 285461 - protein, 50 aa, Zea mays
  Clone ID: MRT4577_2343C.1.pep
LAKKKKKKKKKKKKKKKKKKRKKKKKKKKKKKKKKKKKKKWGGPFLRNQI

SEQ ID NO: 285462 - protein, 126 aa, Zea mays
  Clone ID: MRT4577_23440C.1.pep
PTRSHTLVQTRVFRSRLLQPIPSSQIRMGAYHGDDSMSRALLSHVLHRPPHFSYTWSGDAARGGLLASGIHPLSRLNSSAVEAFPGPTEDAPAPQARKRRLISGVQPTRSGHLRNYLGANPNLVGL

SEQ ID NO: 285463 - protein, 82 aa, Zea mays
  Clone ID: MRT4577_23441C.1.pep
TTDLPPRSNRLRADIPSRRLLVFSRAQIAIHFRASRNRRSNIGDQVSKLFKSYKIEDPEHIFGEDEEQVVHEEVYNEEYELI

SEQ ID NO: 285464 - protein, 145 aa, Zea mays
  Clone ID: MRT4577_23442C.1.pep
MGKGQPRGLNAARKLRNHRREERWADLSFKKRLLGTAYKSSPFGGSSHAKGIVLEKVGVEAKQPNSAIRKCVRVQLIKNGKKVTAFVPNDGCLNFVDENDEVLLAGFGRKGKAKGDIPGVRFKVVKVSGVGLSALWKEKKEKPRS

SEQ ID NO: 285465 - protein, 573 aa, Zea mays
  Clone ID: MRT4577_23443C.1.pep
MGYEESKKHLLSLSYPELQCLCKRYNLPAKKTHSQLASSLASLLEASPSPAPPPVQLANMKEASTCNHANNKRGPYNGRDDGKPLVHAKHQKGDQTPVDETSKKGIDTGTSIPPVSMNHGRPEYHGHLSSDLRTAHNLQSQSDVGIATNTTNLEFVGKHDCSPANVIDQICPPIIQKYPSNGNGQASTKFGRMNDNTEKGCRLSDKISANAAAVQFSVMSDEGIDLLVDLNSSSATWAKNFMAEMHITPPSEHGNFSSFISSLSTKDDHSTASPSGNIIVDIQNKGAENIVPSTDSSLASDVGESSRSVLYPVDTTTVNSVSSTSTVAGTPVELSGYQEGAPVVCSSCLTADVQNNVTSDMPGASDNEVLPPEPADVFLQSERITAPAVCGSVQPIGNKCTMSSGDEVRSGSNEDSCPKSSGKQTGDETLMENEPVKAVAVEENIGRDDSLSISYQLACKTVAELPVTDAQSPASSSGHFIAGNFDNTHPTSSATSDNAINSLTSKFGAELAQSHDSTDKKGQNDAEEVEELESMTPAAYSEPPRNIQLSLRSASAKVKPSTLPRRSARLLPK

SEQ ID NO: 285466 - protein, 191 aa, Zea mays
  Clone ID: MRT4577_23444C.1.pep
MAVGFAGSGGGEDQQRYGGRVTAFAALSCITAAMGGAIFGYDIGTAGGVSSMEPFLRDFFPDVHRRMQAGAGVGNYCKFDSQLLTLFTSSLYVSGLLTAVLVASWFTERHGRRPSMILGGVAYLGGAAVSGGAVNVYMAILGRALLGVGLGFANQAVPLYLSEMAPARYRGAFSNGFQFSLCLGALAATVV

SEQ ID NO: 285467 - protein, 87 aa, Zea mays
  Clone ID: MRT4577_23445C.1.pep
PPSYPSIILRLHVLGLSCSSYYLSNIVSIKFYFGKGWYLYFIDSSVVVQAPIPDVAELPELFQLKCLSPALEARPHLNGNNTSIPRI

SEQ ID NO: 285468 - protein, 129 aa, Zea mays
  Clone ID: MRT4577_23446C.1.pep
GVVPSFPFFWLLGNKKHLFLYRKGFQKTHNFKKNGDLLRPPKLPKVRTSLPRLGSVLPLKQCKLRPQNLHLGGLFKKAHPSWVARSKRHARGWDPQDNMTSPRNIEAPGKMNPMTPDITPPAKPLQGKG

SEQ ID NO: 285469 - protein, 76 aa, Zea mays
  Clone ID: MRT4577_23447C.1.pep
IFTLSEMIMEQASYRPAHSLECSGYGGVKNCEHGHHWHLILWTEQTWWLWERVITSRDTRTPTPMQWYASRARGRE

SEQ ID NO: 285470 - protein, 92 aa, Zea mays
  unsure (1)..(92): unsure at all Xaa locations
  Clone ID: MRT4577_23448C.1.pep
EFLIDDVLRLAGGGSKIRIGFDVXGGAANFAARMRERGVTVFTTVLDSAGKPMNEFVAARGLFPLLLSPAHRFPFYDGVFDLVHVGTTALAE

SEQ ID NO: 285471 - protein, 117 aa, Zea mays
  Clone ID: MRT4577_23449C.1.pep
FVHGSPGVLEGFFSPLMSATKADDGEEAGDGEQEVHATKVAQIGTGGRARLLAANKAEVRSGLEPGREGSSNGFEGAGLGLRRRRPGGGWHVQEVEVAEGTPSRRARSLQRRWFEGR

SEQ ID NO: 285472 - protein, 62 aa, Zea mays
  Clone ID: MRT4577_2344C.1.pep
PSPWCFRSTKAWLGKASFRFGRKRRGSRRPSISRLRRRIRLPIHPPRGLPLTNPCYAVKFIC

SEQ ID NO: 285473 - protein, 73 aa, Zea mays
  Clone ID: MRT4577_23450C.1.pep
DRSSPIGLVETRHVRRTGYNQTHSIIECRTVARTRPVVPVLSKRAEQLLMCLHSPYGISHPGEVHTMPGWDIS

SEQ ID NO: 285474 - protein, 33 aa, Zea mays
  Clone ID: MRT4577_23451C.1.pep
VNQGKTSRLGYRDTNGTCWRGSKLGGVSCGPSR

SEQ ID NO: 285475 - protein, 133 aa, Zea mays
  Clone ID: MRT4577_23452C.1.pep
FHWVLRLPVFVFSASLEGFFSPLMSATKADDGEEAGDGEQEVHATKVAQIGTGGRARLLAANKAEVRSGLEPGREGSSNGFEGAGLGLRRRRPGGGWHVQEVEVAEGTPSRRARSLQRTWLREVGNRSRPASR

SEQ ID NO: 285476 - protein, 79 aa, Zea mays
  Clone ID: MRT4577_23453C.1.pep
NRSYGYLAKYRGCVSPSSSACGVRGRPDTHRGLSAVRAALVRVIAICYSRSSLAHRSGQAPSSPLVSDEPVSCLQCARQ

SEQ ID NO: 285477 - protein, 58 aa, Zea mays
  Clone ID: MRT4577_23454C.1.pep
KGVFWPEPECYYSGFFIFGFYNLAYFFCGGFHYRGIKKMGLGSRCSIATRPAPIKIME

SEQ ID NO: 285478 - protein, 135 aa, Zea mays
  Clone ID: MRT4577_23455C.1.pep
QYWRSTHWTPSLPHGVKRDDRADFSFSAAQDNATTTQQIFYVNGPTSKGLGRDLTYEVLVLPVVGTYSHGDQTLRGRTLRSRYAERSEQPPEYDEGSPTRLLGRSPHGNVLNKGNQLQNLESLGDPLDRWESGYF

SEQ ID NO: 285479 - protein, 48 aa, Zea mays
  Clone ID: MRT4577_23456C.1.pep
RVAFNYPIRCIFSIYFTHRGCLLADYTMSYVTDWAIGALTSHRHQFAS

SEQ ID NO: 285480 - protein, 278 aa, Zea mays
  Clone ID: MRT4577_23457C.1.pep
MEGPPASAGRGAPSLEGPPACACVLSAMGSWEKRKRERGQGAVIRKGRERWSAVARKPRSRMERNAIEGSRDCSRMERSAAGGQVEGGVTAAKGFKAAGIYSGLRAKGEKPDLALVACDVDATVAGAFTTNVVAAAPVLYCKHVLSTSKTGRAVLINAGQANAATGDLGYQDAVDSADAVAKLLNVSTDNILIQSTGVIGQRIKKIGGVAIRIGGMAKGSGMIHPNMATMLGVLTTDAQVSSDVWREMIRMSVSRSFNQITNCLPEKLATAPPSPKNE

SEQ ID NO: 285481 - protein, 498 aa, Zea mays
  unsure (1)..(498): unsure at all Xaa locations
  Clone ID: MRT4577_23458C.1.pep
PTRRPASNDNTPARLATLPPSCLRAPRPAAPAADVAPVRPAPPLPHXLQPRPFRMNSRXQLRAXVVVCSVASTEGFISAAPILLPEGPWKQVEGGVTAAKGFKAAGIYSGLRAKGEKPDLALVACDVDATVAGAFTTNVVAAAPVLYCKHVLSTSKTGRAVLINAGQANAATGDLGYQDAVDSADAVAKLLNVSTDNILIQSTGVIGQRIKKEALLNSLPRLVGSLSSSVQGANSAAVAITTTDLVSKSIAVQTEIGGVAIRIGGMAKGSGMIHPNMATMLGVLTTDAQVSSDVWREMIRMSVSRSFNQITVDGDTSTNDCVIAMASGLSGLSGIQSLDSIEAQQFQACLDAVMQSLAKSIAWDGEGATCLIEVTVSGANNEAEAAKIARSVASSSLVKAAIFGRDPNWGRIACSVGYSGIQFDANRLDISLGVIPLMKNGQPLPFDRLAASKYLKDAGDAHGTVNIDISVGSGGGNGKAWGCDLSYKYVEINAEYTT

SEQ ID NO: 285482 - protein, 157 aa, Zea mays
  unsure (1)..(157): unsure at all Xaa locations
  Clone ID: MRT4577_23459C.1.pep
ELSSYHTHTHTHTHTHTEHRPLNGLRDAASAPSHWPGRHRPPPGVSHCSRSRXRRRGRXTSXPRAGXTRTARRSXPXAPGCTGXTTPRRXRXPXRXXPSRRARAEPGGRRGRTTRRARARRARRRRRPTRAXRRPRGGRRRKKXQRGPGTRGGGAGE

SEQ ID NO: 285483 - protein, 154 aa, Zea mays
  Clone ID: MRT4577_2345C.1.pep
MRRAAVATTTTTTRMAAEEMRRASASTATAEMPASPAPAQAGSRWARVWPRALRWIPTSTDRIIAAEKRLLTIVKTGYVQERVNIGSAPPGSKVRWFRSASDEPRFINTVTFDSKENAPTLVMVHGYGASQGFFFRNFDALASRFRVIAIDQLG

SEQ ID NO: 285484 - protein, 293 aa, Zea mays
  Clone ID: MRT4577_23460C.1.pep
MWQRSRVLDGRGHMRFGSGRVEDEMALTRQRTVRFHDERAKATIPIHQKQHGLAASRLGLGSSGKNKVFVAGDDLWYNKIIDPSSDFILTWIYVFRVSCFIALFMDPLYFYVPEIDYRQTFHCVRKDTRLAIIVTVFRSIVDLFYVIQMMIKFRTAYINPSSNLGVFGRGDLITDPKEIAKQYLRSDFVVDLVASLPLPQIIIWSVIPAIKYSSSEHGLAAQHAWRRLRRRKMAKDLSLRESFSSTGPYEGDGDDASSPEQSITLRRGAGSIIRELPKFRKPSEPDFSAEHDD

SEQ ID NO: 285485 - protein, 77 aa, Zea mays
  Clone ID: MRT4577_23461C.1.pep
VRCRLAVERLPRVVPWISCSWVSRRVWVLGESALMRHLLGLLGVLALLTFQPSRPVMLLRRLQVACRTAADAAPDAW

SEQ ID NO: 285486 - protein, 68 aa, Zea mays
  Clone ID: MRT4577_23462C.1.pep
TAGPRRGRSRSASRRTTPTGCWTPPRQQFRRFLKAPFGRACLLLPGGPRFQKKGQKKKKAGWLGREGE

SEQ ID NO: 285487 - protein, 155 aa, Zea mays
  Clone ID: MRT4577_23463C.1.pep
IRHEATSSNSLVPGGWRPTRLPPPCTLSAPKPSSIPSARHPPLPWRLPLGSQPPPWELISLELGSPAPSPISSVSPSLYRPRRLLSSGPWRPSSSPFARPCSSAPVHPFHGCVVPFLIHGAPMPFPHLRQLLYPRLTSSRDAGLGHQQLTQEALQ

SEQ ID NO: 285488 - protein, 564 aa, Zea mays
  Clone ID: MRT4577_23464C.1.pep
GCVPIIVDLFYVIQMMIKFRTAYINPSSNLGVFGRGDLITDPKEIAKQYLRSDFVVDLVASLPLPQIIIWSVIPAIKYSSSEHGNDMLLLVALFQYILRLYLIFSLNDKIVKITGVFAKTAWHGAAYNLLLYMIASHVLGALWYLLSVDRQIACWKNFCDETDCHTRYLYCDVKPDSMWNGTSVFSTCNAKNSTKFDFGMFQPLLANKTPNESFLKKYIYCLWWGLQNLSCYGQTLTVSTFIGETLYAILLAVVGLVLFAHLIGKVQTYLQSITARVEEWRLKQRDTEEWMGHRQLPHELRERVRRFVHYKWLATRGVDEESILSALPTDLRRDMKRHLCLYLVRRVPLFSQMDDQLLDAICERLVSSLRTPTRPPTRPGDPVTEMLFIIRGKLESSTTDGGRTGFFNSITLKPGDFCGEELLGWALVPKPTVNLPLSTRTVKAVLEVEAFALQADDLRFVASQFRRLHSRKLQHTFRYYSHHWRTWAACFIQHAWRRLRRRKMAKDLSLRESFSSTGPYEGDGDDASSPEQSITLRRGAGSIIRELPKFRKPSEPDFSAEHDD

SEQ ID NO: 285489 - protein, 150 aa, Zea mays
  unsure (1)..(150): unsure at all Xaa locations
  Clone ID: MRT4577_23465C.1.pep
FRFARFAYRLSSKASMLPISGGSTSTSFDRTLWFPRAASTDYLDRSMVGDYSXHPMRLGKHGEHLQLQWDCXDQNLPKNDDQEVIKTRMKGFQLKCNPLHTYSEVFRLDRFREYDLIHGRXDILATLGALSVEWITGVNWQNDPKVEIFD

SEQ ID NO: 285490 - protein, 75 aa, Zea mays
  Clone ID: MRT4577_23466C.1.pep
KLGHGKMTTGTVRRAFIRAGQYIRQDDHYQHVLLPNGKLERRGQSKPSSARLFSPHLCPGFTSWRWHCFRAPSSL

SEQ ID NO: 285491 - protein, 98 aa, Zea mays
  Clone ID: MRT4577_23467C.1.pep
FTSVKCVITEYRYDQGYYVHERCMQKNMANTGTIENIMVLLLWKKKETEPADLVVKDSTRCTPHLFQDSCLITIFETGSCSFFLFVILCWVYQTKRVS

SEQ ID NO: 285492 - protein, 34 aa, Zea mays
  Clone ID: MRT4577_23468C.1.pep
AKMIQAWLSLGAHLVGVWSEQEPMINAGDSPAYA

SEQ ID NO: 285493 - protein, 56 aa, Zea mays
  Clone ID: MRT4577_23469C.1.pep
MDRLQYKYIIPQKKKKKKKKKKKKKKKKKKKKKKKKKKKKKKKRGGRPKGSNLTYP

SEQ ID NO: 285494 - protein, 57 aa, Zea mays
  Clone ID: MRT4577_2346C.1.pep
SEWLTKFRATWKGMLMNRLWESNFTPQRVIRPEQHKKDAHRGLRRGYGGVFVTSQED

SEQ ID NO: 285495 - protein, 80 aa, Zea mays
  unsure (1)..(80): unsure at all Xaa locations
  Clone ID: MRT4577_23470C.1.pep
MQHFQEDVDLMKSLNFDAYRFSISWSRIFPDGEGRVNPEGVAYYNNLXNYLLRKGITPYANLYHSDLPLALQNKYGGWLN

SEQ ID NO: 285496 - protein, 290 aa, Zea mays
  unsure (1)..(290): unsure at all Xaa locations
  Clone ID: MRT4577_23471C.1.pep
PERTTDXTAYHDHWNPMVGPSDVRPMQTMQPADFHHSHWAHVPHSYAQPNSNNEQPGIPFGTRATRVDGDSQRRISVVSPSYFSNGSRPPSVPPLMPQFMRAHGSINEQYQQNSSSSLFAGAHRSGGMRPAPTPLPENPTFSLFPPGSSGHSSMETDDAGGSQFYAWERDRFAPFPLMPVDCEISWWTSQQQSHSTSEPSSAPRRLFGQWLGVGRSSPENRPPEGSSYRQMMPVDCETSWWSSQHQSHSTSEPTSAPRRLFGQWLGVSRSSPENRSPEGSSYRQMHSPRM

SEQ ID NO: 285497 - protein, 47 aa, Zea mays
  Clone ID: MRT4577_23472C.1.pep
PRVRPLILDLVPHHSIYHSRSLNIQDVEQQHHLHCLHHWYRHDYRKG

SEQ ID NO: 285498 - protein, 64 aa, Zea mays
  Clone ID: MRT4577_23473C.1.pep
ETQRPHSPVIKPRFHSGPRSGAWPLLFGSHWEAHWPWIISSCTPGVLPACLLSWTAVCKKVTKT

SEQ ID NO: 285499 - protein, 170 aa, Zea mays
  unsure (1)..(170): unsure at all Xaa locations
  Clone ID: MRT4577_23474C.1.pep
MDPVSXWGLTPLAGADPEIYDLLEREKRRQRLGIELGRGENFTSFAVMEALGSALTNKYSEGMPGARYYGGNDVIDEIENLCRSRALAAFHLDAASWGVNVQPYSGSPGNFAGYTALLNPHDRIMGLDLPSGGHLTHGYYTAGGKKISATSIYFESLPYKVSAATGYIDY

SEQ ID NO: 285500 - protein, 156 aa, Zea mays
  unsure (1)..(156): unsure at all Xaa locations
  Clone ID: MRT4577_23475C.1.pep
MDPVATWGLTPLAGADPEIYDLLEREKRRQRRGIELIVFENLTSFAVMEALGSALTNKYSEGMPGARYYGGNDVIDEIENLXRSRALAVLRLDAASWGVNVQPYSGSPANLGAYTALLNPHDRIMGLELPCGGHLSYGYYTVGGXKISDTSIYFES

SEQ ID NO: 285501 - protein, 86 aa, Zea mays
  unsure (1)..(86): unsure at all Xaa locations
  Clone ID: MRT4577_23476C.1.pep
SCACYAPVPFARRGERTLVVPFPLLNSLNHLETTQLFKLASLYLESGVDRQGXQSGPWPPHIFKPLIPNVKDRKIEKIGWAKXVLY

SEQ ID NO: 285502 - protein, 131 aa, Zea mays
  unsure (1)..(131): unsure at all Xaa locations
  Clone ID: MRT4577_23477C.1.pep
GXGPPPVVPPSXARSXGRGPSPCRFLGPSAPCPPXSSPGPSAXXGGGWAPXGPPSRPXXGPAFGVPXFSPSSLPPVCGSXCKKNPLSSHPFLATLVKKKIYGPEGVACAPINKINNQFHRRLGCFGPQNFF

SEQ ID NO: 285503 - protein, 84 aa, Zea mays
  Clone ID: MRT4577_23478C.1.pep
RECVFYCTAALAYVCVLPMPSKKKKNKKFFLRQKNCSFVQKKKKKKKKKKKKKKKKKKKKKKKKKKKKKKKKKKKKKKIIRGSI

SEQ ID NO: 285504 - protein, 62 aa, Zea mays
  Clone ID: MRT4577_23479C.1.pep
NQKRFPPGPRGFKLLIKTPNGWAQSGLNIICCKKRKTNGFLKLGFPLGLKGKCNENWVFPKV

SEQ ID NO: 285505 - protein, 124 aa, Zea mays
  Clone ID: MRT4577_2347C.1.pep
EESALMTDYMYHTLAAKASGELCLKYIFSFGAFARKPLLQCASDWKVPTTFIYGQQDWMNYQGAQQARKDMKVPCEIIRVPQGGHFVFIDNPSGFHSAVFYACRNLLSVNGEEGFTFPDGLISA

SEQ ID NO: 285506 - protein, 85 aa, Zea mays
  Clone ID: MRT4577_23480C.1.pep
KKNGFSNIYHVLDEGKKKLLIRAFDQFCYKMGLGFEKRGHKMLPSNHRCPASQYNISPTLARGRVIKFWLPETQKASPLSAMCFP

SEQ ID NO: 285507 - protein, 57 aa, Zea mays
  unsure (1)..(57): unsure at all Xaa locations
  Clone ID: MRT4577_23481C.1.pep
NTSNGYNSQGQSLTPSNIFSAQNLRXXRTLVIFDARNAFYRKVPRIQHMKSLSSIVY

SEQ ID NO: 285508 - protein, 51 aa, Zea mays
  Clone ID: MRT4577_23482C.1.pep
FGHNIIFNGSHGIVFGTWLTKVTSKCRIAYLRLSKGHEFNLLRFQNLTCKR

SEQ ID NO: 285509 - protein, 208 aa, Zea mays
  Clone ID: MRT4577_23483C.1.pep
MAEAAPPKLLYIAVADGGGRRAFRYTRPVLQSTLQLMGCKARHAFKISKKVFSVMRSEFLDASKSDRAIKEENAPSLGIGEDANMVNTEIPDASSSSMPFELYMTQTTILISREKFLNIVCDALSSYKYVGPNQKADLLLACRIKEKKESVTVLLCGTSGCGKSTLSSLLGSRLGITTVVSTDSIRHMMRSFADEKQNPLLYASTYHA

SEQ ID NO: 285510 - protein, 794 aa, Zea mays
  Clone ID: MRT4577_23484C.1.pep
MEPDRVAAGASSSPQPSPAPAMFLPGQTRDHERGAVDCADPGGDLNPAPPPSPQQATVEDAAVGGDVEQEEPKKEAMAGVGEALRSFMEEFGDQGEDSIILSPRLQEICTPDRPTALRFLGKKYNNLMERYKKQVVKCSEECDPRYNGLKKKYTDECAERRRLYNELIELRGNIRVFCRCRPLSSDELNRGCLSVVEIDPSQESELQFVPSEKERKPFKFDHVFGPEDDQGTGKTFTMEGVPENRGVNYRALEELFRTSEKRSASVAYTFSVSILEVYNEKIRDLLDESNDQSKRLDIKQNADGTQEVHGLVEAPVYNIDDVWEKLKFGAQNRSVGSTNSNELSSRSHSLVRVTVRSEHLVTYQRSRSHMWLVDLAGSERIAKTGVEGDRLKESQFINKSLSALGDVISALASKNSHIPYRNSKLTHLLQSSLGGDCKTLMFVQISPSSMDSGETLSSLNFASRVRTVEHGPAARKQADPAGSLKLKQMTEKLRHEEKENAQLNQSLQLMQLKYASRENVFRTLNEKVKDAEQACRNYQQRIRELENELGNEKRASRDSARSSRPPLVPTRQKQPHGRNAPPSGPSRWRLKAPTIHNKENIPVTMNKSNPGDDPNKAVGRARRVSLTPVIRQIPIQPKRRSSIAILPSVREHLSVLNEKRAASRLSQANMARRSLGAFGLNLGPGTPLAGHGGPVDATPDGAKFRRFDLGSSSSKFTSPPPNVTPQRKMGMAPAGGPPNAAKLCFSIQKRVTPAHVRAKPGMGIFDPALRENMVVGRTGNALRVLNGKRRQSVV

SEQ ID NO: 285511 - protein, 43 aa, Zea mays
  Clone ID: MRT4577_23485C.1.pep
MEVQTPPKGSPKFNSRAFFLKRLNWKNPGFTQFKPFAENPPFP

SEQ ID NO: 285512 - protein, 59 aa, Zea mays
  unsure (1)..(59): unsure at all Xaa locations
  Clone ID: MRT4577_23486C.1.pep
HLFPGLIISXVCSSLSPRVFXXGTSLQXXYXYFPHXPLYFLQNXXXSXRXXXSPPPPPP

SEQ ID NO: 285513 - protein, 101 aa, Zea mays
  Clone ID: MRT4577_23487C.1.pep
QSSSGREAKRVVIAFSSSALSYPQHPCLCFSWILTMTFRRQFFIITARNVSLRLEAPPIPIDAFQRKRIKTMALWSWWLELPRIFLYCTPTYSREAQRMQV

SEQ ID NO: 285514 - protein, 112 aa, Zea mays
  Clone ID: MRT4577_23488C.1.pep
LLWSDPDDRCGWGISPRGAGYTFGQDISEQFNHTNNLNLIARAHQLVMDGFNWAHEQKVVTIFSAPNYCYRCGNMASILEVDDCRNHTFIQFEPAPRRGEPDVTRRTPDYFL

SEQ ID NO: 285515 - protein, 49 aa, Zea mays
  Clone ID: MRT4577_23489C.1.pep
FVCYALDLLFCFSFFFFFFFFFFFVANRTWHIYIFQIADTTLIQATTSS

SEQ ID NO: 285516 - protein, 45 aa, Zea mays
  Clone ID: MRT4577_2348C.1.pep
RIASRSWLYRAILYCSISMVAALRCPASVRVSCPAASGLAKVRHA

SEQ ID NO: 285517 - protein, 93 aa, Zea mays
  Clone ID: MRT4577_23490C.1.pep
KILPTRVQIRVIKTTSPHIDSPESCASYHKSTLAYREDTGDYTQNKPCTIVTMPPTPPIRTQGHLLAFTLRPLATPAQNHKLRFLCTARQILT

SEQ ID NO: 285518 - protein, 75 aa, Zea mays
  Clone ID: MRT4577_23491C.1.pep
GECLAKRSNGAGTSHWPTCLSPEGVIFLSAQSTIWTGNGYRFRDYPVRPYSSRPPKTDTFVSHLPTHIHFCQCSQ

SEQ ID NO: 285519 - protein, 473 aa, Zea mays
  Clone ID: MRT4577_23492C.1.pep
MLTSYNTNASYIQHLQKNNGQQPVTAPRNVSKVKFGTRAEPAPKVEAEPVTKVKAQRVGNVEATTQPVLNVKAQPPAKVVTQNITSVQKTKAKKSKSEKPTKAKKVQAITYFGLIWKKNKNDKDDGSEFRANDVILKSKDGIGSSIKPKCCLCDKAYSPEFLYVRCERCKNWFHGDSLQLEEDRIGELVGYRCCRCRRRAIPPCPHSDNYVKPEPEFSEQTVATSSVSTMLSSGKTSASADQDPLLASYGIVEPIGEETGDVDLSANTASIAPGSSQKLSIRRALAKTSGYLDQAGKSVNEYYVQNQNTPPGNGNINFSHTNEISFSEADSVGASGLLGWDFSRGTAYAAPPGFTSNRQQNRTSRGSFVPDECEREPQTYFSFTELLEADDAQLDDNAFGIATGLQGDANGSGSFVQRGVGFGGTSFMAEDGASNMNVPTNGPTPEEVACHNGTNTQPPPDPRCSVRDLRTHR

SEQ ID NO: 285520 - protein, 111 aa, Zea mays
  unsure (1)..(111): unsure at all Xaa locations
  Clone ID: MRT4577_23493C.1.pep
RVEQDLILNYINXLSERFSRTVAQSVRAXGSRASLPXDIAMTIGRTKXALTIXHYILQAGEGHARHTHNXLTVMDMPPPRAPTSILGDVPMGVYHTVSHYGKLTAGSAEQG

SEQ ID NO: 285521 - protein, 38 aa, Zea mays
  Clone ID: MRT4577_23494C.1.pep
YVSSALAEAGRNPESISLTLLRLVWGSSVLDLVDAILV

SEQ ID NO: 285522 - protein, 72 aa, Zea mays
  Clone ID: MRT4577_23495C.1.pep
PPPPPPPAPPGLLLPIILPSADSLLGWVEWWRRGSGAGGEDDGGLEEGSPGLRRRERRGEQRAESGLRTCAD

SEQ ID NO: 285523 - protein, 111 aa, Zea mays
  Clone ID: MRT4577_23496C.1.pep
DWSRPAGAGIPNPSAAQTNTAPPPQLCPTESFYSEDSQDAPDGSPRRLRSALRRGRPRGLRGGAGVHGARVCSGAGTGRWRGLRSGLRCGRGVVRTAVPPYDGPDAVEVSY

SEQ ID NO: 285524 - protein, 132 aa, Zea mays
  Clone ID: MRT4577_23497C.1.pep
TIPLTQLSTSPVVTVITHEYRQLQFQQKKINFSISVLALGSTIAKLCRHHCSQYPTCPHERHRLTSLSHTPKGDIFRCPAPPVHRRFTGFFKDPFAIAKHNNPLHLFFSYKITPCRYLSMFHLQISKHISHF

SEQ ID NO: 285525 - protein, 62 aa, Zea mays
  Clone ID: MRT4577_23498C.1.pep
AVRLLRLISLTADTARCGPGYYARLQLSSALYRARRQAETRHRHWPKHLTIPATMPTRDEWS

SEQ ID NO: 285526 - protein, 81 aa, Zea mays
  Clone ID: MRT4577_23499C.1.pep
TGSKLETATTAPTMWTSTTPPETMLRKKLLIYGEIPVADFMTSARAQCRANVREACDGIVLILRHLSSMHWPSLYNALTGK

SEQ ID NO: 285527 - protein, 44 aa, Zea mays
  Clone ID: MRT4577_2349C.1.pep
RGVCCGEIQLGVGWVFRVKSLLVPGLLIAFRWHYSRVLALRVGV

SEQ ID NO: 285528 - protein, 104 aa, Zea mays
  unsure (1)..(104): unsure at all Xaa locations
  Clone ID: MRT4577_234C.1.pep
RPPVVKGRPQEGRFGLALPGRVLFGPGLGGVFVSGNLLGPLVQSVFFYACKAFPSQXIGRPALFEPPGGSPGGDGPPQSHIPMGNLLKLGHRARGIFSPLGGTY

SEQ ID NO: 285529 - protein, 49 aa, Zea mays
  Clone ID: MRT4577_23500C.1.pep
TFIPLHIFSIISPKFNSLFSFFQLNKLIKPFRFPTYSSFTTSTFYQMSF

SEQ ID NO: 285530 - protein, 69 aa, Zea mays
  Clone ID: MRT4577_23501C.1.pep
TLMTDCTSLCCKHHCPASNRKRYSFGGLAGTRTRAPSTQGPSKGKAQSHIWAWHEREINRLYGSGREVS

SEQ ID NO: 285531 - protein, 112 aa, Zea mays
  unsure (1)..(112): unsure at all Xaa locations
  Clone ID: MRT4577_23502C.1.pep
KRAIQFVDWXPGGFKSGFKYQPPRVVPGGDLAKGQRSVGLISNSTSFVEGFSRIAHKFHLMFPKRAFGPWYVGKGIXKVSFFXAREDQGALEKGPQEVGGEFYEGGDGVQGN

SEQ ID NO: 285532 - protein, 102 aa, Zea mays
  Clone ID: MRT4577_23503C.1.pep
AHRHAEMQTRPWRGRGMTTNSSSNYSSRTQRVADKNRVAELATSTKETTTTLLLKMIVITEVEDRRTRRDRSCKQIFDYILKHGKPSKPHSELRVAPDDLVE

SEQ ID NO: 285533 - protein, 136 aa, Zea mays
  Clone ID: MRT4577_23504C.1.pep
MARPKQTARKLTGGKAPPKQLAPKAARKLAPATGGVKKPPRFRPGTVALREICKYQKSPELFIPKMPFQRLVREIAQDFKTDLRFQSSPVPALQEAPQASLVGLFEDTNLWAIPAKGVPIMPKDIQLARRIRGERA

SEQ ID NO: 285534 - protein, 130 aa, Zea mays
  Clone ID: MRT4577_23505C.1.pep
QGWPEAHGQRMPPWHAPENSGAGDDGRGAAGNGDSYMFGVPGPRQGLDHLQGQLIFSQGEPLQSSGGGWPSSSARAWLDPLVAIHQPSTMSGQVGFGHLVGAGNGFMGFLAPPAQRLQSEDEQGSEAMRE

SEQ ID NO: 285535 - protein, 124 aa, Zea mays
  Clone ID: MRT4577_23506C.1.pep
GSAEKVFTAKQCTSRILHAMVSFSVQIERNWHQNYVLAGCLSTIHSLTHAKKKDAVLEQNATQQLPTYLLQFTVARALHLALQVQLPAGGPGHHLGAGLGRLLRRREHGARAADGAGGARAEPS

SEQ ID NO: 285536 - protein, 105 aa, Zea mays
  unsure (1)..(105): unsure at all Xaa locations
  Clone ID: MRT4577_23508C.1.pep
MASLAAVSVKPVDVHGLAGNSISGTKIDVAWSSXLSLTCTADMPEETRXADYTEYFDLNXVCNNTEQXDXLYGSDWPSHYNSLQSKIFLTIWDALPWRSLLTRVP

SEQ ID NO: 285537 - protein, 62 aa, Zea mays
  Clone ID: MRT4577_23509C.1.pep
VRPGVPDPLLGFFANLHREHSLQDLIADARNLHHLWHPDGPDYYYQTKRACEHARWTTRTCS

SEQ ID NO: 285538 - protein, 56 aa, Zea mays
  Clone ID: MRT4577_2350C.1.pep
MCLYIVISLFQSKPQYTAIPLLVRAKTSLVSPRNVTEYHNIPFPAETHSFFRVSER

SEQ ID NO: 285539 - protein, 101 aa, Zea mays
  Clone ID: MRT4577_23510C.1.pep
RRTLRFFLKFLPFLYYPTRHLGSLLDVGRCYLPAAHSTPQCATPTRAVPPPGGARLLCLCPSLVAVASSQHRANASPTSQRSCQGREQGFLVAAGQVLRRA

SEQ ID NO: 285540 - protein, 211 aa, Zea mays
  Clone ID: MRT4577_23511C.1.pep
GYPTLSAFIELVSQFDVLDESTMKDERFALVAAKVINPTMFDQVLRNFTPDVPAGTSARPRQEDAQEFLSFAMDRMHDELLRLNGNGSNSKEGMVVSSDDDDAWETVGRKNKSAIMRTQSFVPSDLSAIFGGKLQSVVKAAGNKASATVQPFLLLHLDIFPDAVQTLDDALHLFSTPESLEGYRTTAGKAGVVTARKSFKIHELSKIMILH

SEQ ID NO: 285541 - protein, 113 aa, Zea mays
  unsure (1)..(113): unsure at all Xaa locations
  Clone ID: MRT4577_23512C.1.pep
CIHCFAHQLHLVLXNIDCVWFFYQFFFLLNIVRVSCKHHGMLQTVRLEIIIKSLECGQIESGSRLNQEMGLPRPGETRWGXSHYKIVCNIIVMYPVICDVFITLGDDTTTKSD

SEQ ID NO: 285542 - protein, 101 aa, Zea mays
  unsure (1)..(101): unsure at all Xaa locations
  Clone ID: MRT4577_23513C.1.pep
ELSIFYLSTVLTTHQFYXHERDFNFVVFFVDNRQIVSFSLDKTIKLWNTLGECKYTICGDLCCSNGHNGWVYCIRFSPNTFHPTIVFGSCDXTVKVWNLTN

SEQ ID NO: 285543 - protein, 84 aa, Zea mays
  Clone ID: MRT4577_23514C.1.pep
YPAVSSHDIVDQTAHSEPHALGNPLRSRFVTSTMIKLQSSPSHSILVLLQRTMLPSKVEDTTLITAHAALPLVAPAEPLCQTLK

SEQ ID NO: 285544 - protein, 96 aa, Zea mays
  unsure (1)..(96): unsure at all Xaa locations
  Clone ID: MRT4577_23515C.1.pep
MAPGADYQEVGYCSQEVRSFAPSCLRRHCGGGHQHLHKENFEDVDTVSRAGADHHHHHGHHGCHIFVVRETMVXEDINTCSGEVHERRESFLTMAN

SEQ ID NO: 285545 - protein, 72 aa, Zea mays
  Clone ID: MRT4577_23516C.1.pep
VWELHSNLFHPTNLCTYLFQQLTLSKSPDQNLLNHMGYAGTTPDTELKYLSDDRSTKWQPHTLLPLSVPLTE

SEQ ID NO: 285546 - protein, 217 aa, Zea mays
  Clone ID: MRT4577_23517C.1.pep
LQAPSDSAHWLLLSLPCLSLTSSLDKAATDPPLSQSPLVDSSDCVFVLSSSSPANIAWASLSDEEARRSFSSRSSSPAASSVGAIYPLFLLTGNDTNTNFAFKGNQAREGRRLALKRHYQLEEPEMEQAKASPQDGRETGVLGARTAPNKKNGGRRRREEINTVRVETERGCRMSGVDGAAQGRETEVAGSFANRRCCAFLCAAGLRLSSLLSKERT

SEQ ID NO: 285547 - protein, 69 aa, Zea mays
  Clone ID: MRT4577_23518C.1.pep
VPGSFLSFAGYYQLPFYPLFCSVTFPLSYFFSSVSNIILLPTYSSLIFLFHLILLLLYYTINIHCINIL

SEQ ID NO: 285548 - protein, 149 aa, Zea mays
  unsure (1)..(149): unsure at all Xaa locations
  Clone ID: MRT4577_23519C.1.pep
IRHEADFTNMGFDLNTLIQATEDLSCLESPFTEXEVNSIVASLPSGKSPGPDGYNTNFMKXCWSVISSDFHALCNSFYDETIXMHSINGSNITLLPKKXSPRSVNDYXPCXLVNSSAKLLTKILANRLEKVITKLIDADEYGLIEGRGI

SEQ ID NO: 285549 - protein, 137 aa, Zea mays
  unsure (1)..(137): unsure at all Xaa locations
  Clone ID: MRT4577_2351C.1.pep
MQLFLDCDVRDYIYHGEKIGLXTSQPIKPLXYSDAGXVHLGKXEGMVELFAMEAMDKSVMVNRNKDHRACMARAIYSLLDPPFLPKLYTSFXQTPTHACVITEFCSAGEVFELLRMLAMELFREESAKPYAAQVVIV

SEQ ID NO: 285550 - protein, 68 aa, Zea mays
  Clone ID: MRT4577_23520C.1.pep
AQQVTEENFEKGLIYPPFSNIRKISAHIAANVAAKAYELGLASRRPRPKDLVKFAESCMYSPIYRNYR

SEQ ID NO: 285551 - protein, 98 aa, Zea mays
  unsure (1)..(98): unsure at all Xaa locations
  Clone ID: MRT4577_23521C.1.pep
MSRRYDSRTTIFSXEGRLYHVENAMDASGXAVSGLGILAADGARLGGEKKVTCNLLQIYRSAEMMIKIDSHLASAVAAIXSDAIILINTDRLHAQRSM

SEQ ID NO: 285552 - protein, 74 aa, Zea mays
  Clone ID: MRT4577_23522C.1.pep
RVAQTSRLARPRRGGSDDSNNHARRLQCSSQVAFGVLNPTPAPPPFVMYPEISMEGTQAQDTVITVTQYTVPIL

SEQ ID NO: 285553 - protein, 154 aa, Zea mays
  unsure (1)..(154): unsure at all Xaa locations
  Clone ID: MRT4577_23523C.1.pep
MASQQHAWAEASSFSSCLKNIVRLSSGFEAALDESIKNCKALAHVVEQKEADRMAMSEAISAFYRIFGLDDVPSGSSPXSRLRALGGHVRSRLRGALHHDVRRAFAVLASHYDVDLERVSEGYCLPDDEDAALAEVXRLDAAAEGPGAALASFL

SEQ ID NO: 285554 - protein, 80 aa, Zea mays
  Clone ID: MRT4577_23524C.1.pep
PQARRRNPRQSPTRTYFRRREGGRVRGPRRRLARRKFKSRHSRAPTFEIEASPDASVAGVKRIILTPLGVGGGTGRTSKC

SEQ ID NO: 285555 - protein, 158 aa, Zea mays
  unsure (1)..(158): unsure at all Xaa locations
  Clone ID: MRT4577_23525C.1.pep
SNTVSHATSHFALYDTTPSYDHLRVFGCVYYSNTSATAPHKLSPRSTRCLFLGYSPGHKGYRCLDLSSHLIIISHHVVFDEDVFPLAGSSXPTDLDSVLESAPSTHPSQAPRLAPLPAPCASSTPSCSAPSTPSMPHVVSTPRSHVXACATSGTIDPA

SEQ ID NO: 285556 - protein, 278 aa, Zea mays
  Clone ID: MRT4577_23526C.1.pep
VPAEPPTLGFPSLQPFRRLSPLSNLLRMPALLAARHGVCARPELLRAVMLQLAVELRFPSSHALAAPFSSLLALAAPCSPMELGHISISQQALCSQRLSVAARSSCLASLSARSPGGSRPCCSLSPAPPWRSPGSPRAQASAHPCACFFPMASSPILCSFPWPSCVAASSSLLLCPAIHGARLKLLPARRAPASLLPSSSSCPSPVVYSFSARRRGRRCCIPAGRQDPVEPRGGGAGGWRAAFVIQQRPTPSPNFSFQLASLYPHAELGPVHLATLGL

SEQ ID NO: 285557 - protein, 66 aa, Zea mays
  Clone ID: MRT4577_23527C.1.pep
PSRSTSSRPSAGSKSTIWTGVRFPACMGAIVPLDLLLIECIHNPFRIIPMSCSVFMLQAYHSSHPP

SEQ ID NO: 285558 - protein, 76 aa, Zea mays
  unsure (1)..(76): unsure at all Xaa locations
  Clone ID: MRT4577_23528C.1.pep
PSARPRWSTSWPWPGPGPENHHPTACPRPVPALARRTLMTKGRAARAAVAGCSPPVTPRKDTTKEGTAXLQQRSGR

SEQ ID NO: 285559 - protein, 200 aa, Zea mays
  unsure (1)..(200): unsure at all Xaa locations
  Clone ID: MRT4577_23529C.1.pep
PPPXRAPPPPPPPXPPPAPPPRPPPXPGPPXAPPRARPPPAPPPXPPPPPPPAXPPXPXPXAGPXXAPXPPRSPRRXAAPXAGSGRPRSSPCRPAXXXGSCSCACSGPSGGGARWSAGCGGGAPAARRRGPALRSRSCACCPPPPAARPCCFRGLALAGSAGRVLCLCLFLSLGGCSPAVARRASSPPPAPPPVCVCVCV

SEQ ID NO: 285560 - protein, 94 aa, Zea mays
  unsure (1)..(94): unsure at all Xaa locations
  Clone ID: MRT4577_2352C.1.pep
DPERRPQQARPPGTREAXPXQGTXXXPSXKXXTXGDXGTXKTTXXKRXXTGEPGGRXEPTIXXEGXPGGGTXNRXKNRAHRRDTAGXEKRGGPR

SEQ ID NO: 285561 - protein, 68 aa, Zea mays
  Clone ID: MRT4577_23530C.1.pep
GGGLGGLLSFLSVLQLLAGTSCCRELSSFGTVCALKLYLWLVGTFVVVIRLDLVIVGGFNVIAATGHP

SEQ ID NO: 285562 - protein, 263 aa, Zea mays
  unsure (1)..(263): unsure at all Xaa locations
  Clone ID: MRT4577_23531C.1.pep
MKSTTLLLPLYTAALAAAVSSPQDHQAVLQDQQQVTIAEPDEYLIELSPGETRWVTENEKWELRKQNINFFDITHNKELGTLNRKVSAESVKFPEKPIHQKAIDPLLKELKKENMRAHLETFTSFHTRYYKSHYGAESSAWLLSQVNKTLVDASAINATVKPFPHPWGQSSIIATIPGKSDKTIVIGAHQDSINLYFPAFLAAPGADDDGSGTVTILEXLRVLLQSPEILAGEAENTIEFHWYSAEEGGLLGSQQSSKSMSTQ

SEQ ID NO: 285563 - protein, 92 aa, Zea mays
  Clone ID: MRT4577_23532C.1.pep
RTRGRTRGLENGYLTDDGVFCSGLSNSSSGKFSKLSRMARSSYSSSDLLQSSSTDPSISSSISMVSSSLRSSSLPELGRTSASSSSSSSLPS

SEQ ID NO: 285564 - protein, 94 aa, Zea mays
  Clone ID: MRT4577_23533C.1.pep
RGGPRGGGIPKTPKGERGQKKFKVLGFKIPGEKMKRKKPIPRKNGKNNPPKFWGIAPKVKFLIRLGWVGKSGGGFLGPPKKERFKNGDPLRGVQ

SEQ ID NO: 285565 - protein, 81 aa, Zea mays
  unsure (1)..(81): unsure at all Xaa locations
  Clone ID: MRT4577_23534C.1.pep
MVQCHLSLLAFRVFTFFAIVXVVQFIQFSLHYIIFILFFIFLYVIFFFFFFFFFFFFFFFFFFFFFFFFFFLKKNVFLNLY

SEQ ID NO: 285566 - protein, 117 aa, Zea mays
  Clone ID: MRT4577_23535C.1.pep
RRRMVLTACIRSLSTRLSAPPVTEPCLDLRVAQAASALPSSSWYAIARFSVVAAIGRSLAAAFYLSFLSIKSEDRRPRQCEAPPTGHPVQCRRQRHHRSKSGEQSSGRRAAMRSQAS

SEQ ID NO: 285567 - protein, 194 aa, Zea mays
  Clone ID: MRT4577_23536C.1.pep
MVYCTHCADYCPSIKDPDKGYICCGTCGKVLDQEVYTDEPTFVKDNTGQSRLAGSILASIESGYSISHQRTLDKGRDEIRQIVNNLHVSGGETVVSKAYRFYELAVDRNFTRGRRTSHVAAACLYIACRQSKKAYLLIDFSDYLQISVYVLGAVFLQLCQVLLLADHPVVQKLVDPSLFIHRFTKCLLEKRDNA

SEQ ID NO: 285568 - protein, 101 aa, Zea mays
  Clone ID: MRT4577_23537C.1.pep
FFFFFFFFFFFFFYVFFACSLLGKRIFPLGSHIAGAKYSFFLSCNNFGKHDRLRGNLKCNEGPTKVFPIIIKIFPPPFQKRCCGAQMKVQAAFFFNDGLKN

SEQ ID NO: 285569 - protein, 75 aa, Zea mays
  unsure (1)..(75): unsure at all Xaa locations
  Clone ID: MRT4577_23538C.1.pep
HSNWSVALIXLIASWCTLIIWSLLILTGAGLNDQRGEENNYFGRCCYVVNHPVLFAGAVLGLPMLALGIVYYVPL

SEQ ID NO: 285570 - protein, 116 aa, Zea mays
  unsure (1)..(116): unsure at all Xaa locations
  Clone ID: MRT4577_23539C.1.pep
RAERRWPTASPGGGSEGHGARRRRTGPGASGEDXGCGGAQEEAVRGCAVRRRRLLSRDHVMVMVVVMMVVVIHRSLAAWFQLRSRNVQRRDLVFSAACKLAHRCIRARGGILAVVS

SEQ ID NO: 285571 - protein, 642 aa, Zea mays
  unsure (1)..(642): unsure at all Xaa locations
  Clone ID: MRT4577_2353C.1.pep
MSVPGQCSSQPQFITSVGRSNRSNGPGTPLIESIDVDQIVIPEKNSWKNLFSYIGPGFLVSIAYIDPGNFETDLQAGAQYKYELLWIILVASCAALIIQSLAARLGVVTGKHLAEHCRAEYPKVTNFVLWILAELAVVACDIPEVIGTAFALNMLFRIPVWCGVLITGLSTLMLLLLQQYGVRKLEFLIAFLVFLIATCFLVELGYSKPNAPEVVRGLFVPELKGNGATGLAISLLGAMVMPHNLFLHSALVLSRKVPRSVHGIKEACRFYTIESAFALTVAFLINISIISVSGSVCGSGNLNPEDQANCSDLDLNKASFLLKNVLGNWSSKLFAVALLASGQSSTITGTYAGQYVMQXWNLYLISVLVRKLNGRLFYDAYYSRHLMLIRSNQAFACLQHXCLAVRYEKYRKXLVHNSXFAMNKLGLMSFSANLQGSLGQLDCREKGQIXGFLDLRMKPWIRNLVTRSLAILPSLIVSIIGGSSAAGQLIIIASMILSFELPFALVPLLKFTSSKTKMGQHTNSIFTAVLTWMIGSFIVVINTYFLITSFVKLLVHSGLTTISQVFSGIFGFLGMLIYIVAILYLVFRRNRKSTQPLLESDAELAVSGSSADAGAECSLGHLPREDISSMQLPQQRSASDLD

SEQ ID NO: 285572 - protein, 87 aa, Zea mays
  unsure (1)..(87): unsure at all Xaa locations
  Clone ID: MRT4577_23540C.1.pep
MYSITARLQYYTILRVLVSVNMQVLFVPSIFGVPFTLMSIDNMGQIAXSLGCTASSDNTFVSVISICSYAGRVLAGYASETALDRYR

SEQ ID NO: 285573 - protein, 89 aa, Zea mays
  Clone ID: MRT4577_23541C.1.pep
RTITFIYYTAHNNPIDTITVWFIALGVLALAASATFTHTIGRCDIQPPPPGHLPKTVHLPPPVHLPPAMHVEQTDHLSSPFHLPPAVHV

SEQ ID NO: 285574 - protein, 187 aa, Zea mays
  unsure (1)..(187): unsure at all Xaa locations
  Clone ID: MRT4577_23542C.1.pep
GDPPDHEGRNQAAAQPGQRRXRRGPSKESAPRXNETTAEAQSTRPRRTPSRGRRRARARKQKGAQQXTPKENAQRDXTHTDTTGEAATAAHQTEXAGNEEGKGESNRAPARHNQPERRPDGSKPDKGAXTHXXXTTDERTPKEKDTDAQRRHPPRPTRQPKGTKEGGTNPEGXKDDRNXNNGGQENG

SEQ ID NO: 285575 - protein, 122 aa, Zea mays
  Clone ID: MRT4577_23543C.1.pep
WEGCWSRLEAAGPEGGGGGGLGPPLSFAPVLGSEMFGVPAGISHKREGTPRCGPAQLILNRAKRPVAVVWRFGLSVTLLELPFMFLAPSWFCGRTCVVKVKPGPFKNLNPWNIWHGMCLFAV

SEQ ID NO: 285576 - protein, 193 aa, Zea mays
  Clone ID: MRT4577_23544C.1.pep
PRVNSLAVPQKKASLQQDPKHPKTKKSAASKSGFDMYTEQEHSPTSLRAERQIEEVKIEEESCHLEGFVLEPNLEVVCALEVPKNFKSNKLLRNAESKENEHVGVGSPTGRIAVEAASDVVLNMSAEEESREFKKSKIMTKQSLTTGSEKRDNKIVHGKPDKQLTGKSSAGFSLNQKSLTGSGQHKMDSSADT

SEQ ID NO: 285577 - protein, 88 aa, Zea mays
  Clone ID: MRT4577_23545C.1.pep
VLDIDYTRYLFYLTTRNIINRLRSWYENGDRKNRSEGFFWGNKYEGTLHRRSIIYINFVPRPCPNRLGLGSHHLEGTFFFCFWPTRIT

SEQ ID NO: 285578 - protein, 67 aa, Zea mays
  Clone ID: MRT4577_23546C.1.pep
IVENSSYCLLCSLTLWFVFSRYSSEKDFTIVRSMVMTNHSCLLHYIDVIFTQDLNNVWLVTYTPLYI

SEQ ID NO: 285579 - protein, 123 aa, Zea mays
  unsure (1)..(123): unsure at all Xaa locations
  Clone ID: MRT4577_23547C.1.pep
VKFKSTVTISFTFSGSGPGLIPRFRPSFRXLGXVVLPLLKPSLRRRSLTGVFAAEQEPILRVIVRTLVHTRRPPEYAGGTNNSALKFVFNHGIAQGGAXSPCQVLVCEKVGDSFGVSAMVRDF

SEQ ID NO: 285580 - protein, 68 aa, Zea mays
  Clone ID: MRT4577_23548C.1.pep
TAQLPPPTPVAVFMCHSCPIGDSSYLGNVLSSIPFYTYKVIKHVNRPSPSCLVSPIIYAWSEYTSGFC

SEQ ID NO: 285581 - protein, 65 aa, Zea mays
  unsure (1)..(65): unsure at all Xaa locations
  Clone ID: MRT4577_23549C.1.pep
MADGEDIQPLVCDNGTGMVKAGFAGDDAPRAVFPSIVGRPXSHGVMVAWAEDAYVVTSSSRVYLI

SEQ ID NO: 285582 - protein, 144 aa, Zea mays
  unsure (1)..(144): unsure at all Xaa locations
  Clone ID: MRT4577_2354C.1.pep
LKGNGATGLAISLLGAMXHNLFLHSALVLSRKVPRSVHGIKEACRFYTIESAFALTVAFLINISIISVSGSVCGSGNLNPEDQANCSDLDLNKASFLLKNVLGNWSSKLFAVALLASGQSSTITGTYAGQYVMQVFGTYTLFQF

SEQ ID NO: 285583 - protein, 90 aa, Zea mays
  Clone ID: MRT4577_23550C.1.pep
AFGSLALGMMSAASDCSSVARFKQLLQGVTQPSRAVSRDAPVERSVSPVCERSCSLGRAATVIRRLRASRECLSGRVCVQIPRVCGCSSR

SEQ ID NO: 285584 - protein, 114 aa, Zea mays
  Clone ID: MRT4577_23551C.1.pep
INYLLEMGLSKKDLCSMISRFSPLLGYSIELVMKPKLEFLLRTMKKPLKAVVEYPRYFSYSLEGKIKPRFWLLQSRNIDCTLTEMLAKNDELFAEEYLELGGLLEKPVQSSIGG

SEQ ID NO: 285585 - protein, 98 aa, Zea mays
  Clone ID: MRT4577_23552C.1.pep
PLREPKPKLCSPCTPARHQRCCSSSRACRKTLHIFGCKPSKTQASRCFHRIQAPNIIIESMPFLFFLLGDICKPFTTNLQTIAPGTPTHGQYTPAGRK

SEQ ID NO: 285586 - protein, 138 aa, Zea mays
  Clone ID: MRT4577_23553C.1.pep
MPLRHMLLQARQRWSQPPPRLSELLHVFRSLSILPSGASATPPCRSPTQIQLPQTLPCSDANPLGVGFHIDVVDDDLWPASFGFSSDPTPGDQCLDTFQEHGEEHMHDSDDEIDDMRHRKQLFYKLDRGSKEFEEYNL

SEQ ID NO: 285587 - protein, 174 aa, Zea mays
  Clone ID: MRT4577_23554C.1.pep
MAFLSTNALMSVPITAAAAPRHRRSLVVVRAAAVKSNEHLQEEQASVADGARGRRRAMVLLAATAAVTGSSVAICRSARAAGVTTLSGQYVKIENVKDPYVQGVGEWAVKEHNRQTGESLQFAEVVSGMEQVVAGTNYKLNLATKDPTSSYQAVVFDPLPNSSKNRQLMSFKSI

SEQ ID NO: 285588 - protein, 168 aa, Zea mays
  unsure (1)..(168): unsure at all Xaa locations
  Clone ID: MRT4577_23555C.1.pep
LTQERDNDSRPIKGGADIEXCIASRAEACMSLSGSMXIAECMDKVEPDGVLSIESSSPFETTVEXEKGMEIDRGHISLLFVHTLEKSIVEIENCKDLITDHKITSIEEILPILEKTTQVRAPLFIIAEDITGEALVTLVANKLPGILNVAANTAPEFGDRPKAATQDI

SEQ ID NO: 285589 - protein, 84 aa, Zea mays
  unsure (1)..(84): unsure at all Xaa locations
  Clone ID: MRT4577_23556C.1.pep
YVKIENVKDPYVQGVGEWAVKEHNRQTGESLQFAEVVSGMEQVVAGTNYKLNLATKDPTSSYQAVVFDALXLHQKTXLMSFKSI

SEQ ID NO: 285590 - protein, 47 aa, Zea mays
  Clone ID: MRT4577_23557C.1.pep
GKRSLPVSPPPFRAQKKKIKPWLLRDQTLDLLSRMYNLLPSKKRPSC

SEQ ID NO: 285591 - protein, 128 aa, Zea mays
  unsure (1)..(128): unsure at all Xaa locations
  Clone ID: MRT4577_23558C.1.pep
QIGVLPRDQPGFPLVKKVVGNKFXPLLQALGLAPEIREDFYFPFKKPGPFGKLLERNGKAQAPKLGLFLFXGGVPPLARYSKGTKKLPPPWRFESPPGGPLGAKGIPPKGLVFGPYGLVLESKFGNPC

SEQ ID NO: 285592 - protein, 84 aa, Zea mays
  Clone ID: MRT4577_23559C.1.pep
MRWRRGNSQHQHEEVVTPTSRSGRRRGNGDTPVPVGTPRGSPGAGKALTPTSAWRAADQLAKVAIMRKSMNRVSDLHGFENARF

SEQ ID NO: 285593 - protein, 126 aa, Zea mays
  unsure (1)..(126): unsure at all Xaa locations
  Clone ID: MRT4577_2355C.1.pep
MSVPGQCSSQPQFMTSVGRSNRSNGPGTPLIESIDVDQIVIPEKNSWKNLFSYIGPGFLVSIAYIDPGNFETDLQAGAQYKYEXCCFSLMFPLLLWIIPCASCAALIIQSLAARLGVVTGKHLAEH

SEQ ID NO: 285594 - protein, 53 aa, Zea mays
  Clone ID: MRT4577_23560C.1.pep
LTYCEAAVRFFTQKNISFTKNGKRSTKKKNSVGLAPVHLASPVKLIAPRCTPN

SEQ ID NO: 285595 - protein, 121 aa, Zea mays
  Clone ID: MRT4577_23561C.1.pep
VCKQFDEDELCHDTGTLEGLAGLLDRTNALSSGKVVIPDNAGEGGVTRIWIAHGEQDGITSYPASKRLFSALQVKDKEFQSYAGCYHRLHDEPSPDKDAFRDDVVNWILARATDPWGEDSA

SEQ ID NO: 285596 - protein, 43 aa, Zea mays
  Clone ID: MRT4577_23562C.1.pep
EFKGRTDLILKILHLRLILIQHRGRKLIFKFGLKKLITLLSLK

SEQ ID NO: 285597 - protein, 39 aa, Zea mays
  Clone ID: MRT4577_23563C.1.pep
SRLFSVGVSQCHVVDQHITLSIRTQTWSVVYCMSVTQGV

SEQ ID NO: 285598 - protein, 143 aa, Zea mays
  unsure (1)..(143): unsure at all Xaa locations
  Clone ID: MRT4577_23564C.1.pep
TRGGPSRPAKEXEKPTPRIFPHKNASTRRGKNPRAPRRDLGRWREVQGATKRDAGGNLERPARGEEAMQGAAAAEKTIGTPLNKPNRDGGPPKDRTPKKGRAKGLPRTRPKTQNPRGNGTRGPREISGQKGHPTKRKEKKKRG

SEQ ID NO: 285599 - protein, 71 aa, Zea mays
  Clone ID: MRT4577_23565C.1.pep
PSDKKLELLFFVRSGHPGAHPAQGHGESPLLPLPRGDQATLLPVHWQHQPGPLSAHSQQAVRDRDCHGQRP

SEQ ID NO: 285600 - protein, 186 aa, Zea mays
  unsure (1)..(186): unsure at all Xaa locations
  Clone ID: MRT4577_23566C.1.pep
PGCXXSTSRXATANMGYYLQKTYYKTASLISNSCKAVAILAGHTTEVSVLAYEYGRNLLIWCMQGLAFQLIDDVLDFTGTSASLGKGSLSDIRHGIITAPMLYAMEEFPQLQEVVDRGFDNPANVEIALDYLQKSRGIEKTKELAREHADRAVKAIESLPDSDDEDVLTSRRALIDITERVITRTK

SEQ ID NO: 285601 - protein, 222 aa, Zea mays
  Clone ID: MRT4577_23567C.1.pep
MRRIRAPLVQAPLPPIRSMAPHLPAGLLCPAPPLPFPRRRKLFPTQSISRPDPIRPTPARPELLRPKSGHPRHVVEFLVQPHLAAILPRSASPFYFVQFAIPLEHALSSSAPVWFHGGQPNPFSMATNRPAPFPWCARRLVLRPRQLPPAATPLLGSLSRQRAPLSAPDHSSREPPMAFVSPTLAPSIVVNLAQQPRRQFAQPRGSPLRRALGVLDVMPKQQ

SEQ ID NO: 285602 - protein, 75 aa, Zea mays
  Clone ID: MRT4577_2356C.1.pep
RHYVGLVYVETMRRLGPRLLGEMALLGCIYTGEGIAVSLLRIVSCLSMDTWTGTRPSYWISFRPHLMVKAQTWLR

SEQ ID NO: 285603 - protein, 428 aa, Zea mays
  Clone ID: MRT4577_23570C.1.pep
MSWRWTLARRVATLAAIGGGGAQAQRLLSTSSAGGGTGLLGRHYIPLASQIRSKVVGCRGAALVSSRWLHEAQYQVRQDGASRAQEQQDPFELVADELSLLANRLRSMVAAEVPKLASAAEYFFKVGAEGKRFRPTVLLLMASALKFPLSESTEGRVLSILADKLRTRQQNIAEITEMIHVASLLHDDVLDDADTRRGVSSLNLIMGNKLSVLAGDFLLSRACVALAALGNTEVVSLMATAVEHLVTGETMQISTSREQRRSMEYYLQKTYYKTASLISNSCKAVAILAGHTAEVSVLAYEYGRNLGLAFQLIDDVLDFTGTSASLGKGSLSDIRHGIITAPMLYAMEEFPQLQEVVDRGFDNPANVEIALDYLQKSRGIEKTKELAREHADRAVKAIESLPDSDDEDVLTSRRALIDITERVITRTK

SEQ ID NO: 285604 - protein, 469 aa, Zea mays
  Clone ID: MRT4577_23571C.1.pep
LASFWDRLQPPSRLTRDLLWGLVLGVTVSISSTTLALLTQSWRRKQSIAKIPPRPIEVRSEEVVDGVIGLIGNTPLIRINSLSDALGVEILGKAEFLNPGGSVKDRVALRIIEDAEEQGLLHPNTGSVLFEGTVGSTGISLATVGRAKGYDCCIIMPDDVAVEKVQVLEKLGAKVERVRPASIVDEKQFVNLARARALAFGKVDITDSTHGHPHGEDLVVTAQPDDIGTGEDDDVVVPSSPTMIIRDKVASLIDATVSHKPRGFFADQFENQSNYWAHYDGTGPEILRQTGGNIDAFVSGAGTGGTIAGTGQYLKTHVPGIQVVLSDPEGSGLFNKVRYGVMFDSKESEGKKRRHQVDTVVEGIGINRITHNFALGLDMIDDAYRVSDEEAVAMSRWLVKHDGLWLGSSSACNLVASVRLAKRLSSGSRIVTILCDAGSRHQSKFWSDEYLSRNGIAHDSDLVSRLLDA

SEQ ID NO: 285605 - protein, 127 aa, Zea mays
  Clone ID: MRT4577_23572C.1.pep
LLFWGLAKSISLVRCFTPLHPGKILGAFPFYILLRPLPLFPLLAFCLKGPDRSPFPLLPILIADWDPPCTGSLSPARVGFTRYVPGTLATSLAPVPCAFFLFFFASFAVFPLYPLNWGLPFGFRFRV

SEQ ID NO: 285606 - protein, 150 aa, Zea mays
  unsure (1)..(150): unsure at all Xaa locations
  Clone ID: MRT4577_23573C.1.pep
TIFVSGKPFYYTEVXLQQLIKYFGGGRGLNLEKDIETGISSGYAFCVYQDLYVTVIACAALNGIKKGDTTLTVRRANHGDSLPMPEQESILLQAHXQVQMHKLWYHLGGALPTKVVCLTQAVTPYXLIDDDEFYDLFDDMRQERRKFVPT

SEQ ID NO: 285607 - protein, 49 aa, Zea mays
  Clone ID: MRT4577_23574C.1.pep
MVADRLRLALLLSACLCSAWARPRLEPTIRLPTERAAADERKEDATGTR

SEQ ID NO: 285608 - protein, 92 aa, Zea mays
  unsure (1)..(92): unsure at all Xaa locations
  Clone ID: MRT4577_23575C.1.pep
SQTGPKPRTRGDQNGEAPTRHETPILGGGDNASQXDTQREAASRETRKTQTERAHNYNTAPDDEPTTSPSSGKEPTHATEAKPAAAQEAERA

SEQ ID NO: 285609 - protein, 73 aa, Zea mays
  Clone ID: MRT4577_23576C.1.pep
RRARCNAAASSSSDALRCVTLAKSGLTSSLCAALCAIVETRALVDVTPRASLVGKEPKLMACMRDTSQPGCSL

SEQ ID NO: 285610 - protein, 100 aa, Zea mays
  Clone ID: MRT4577_23577C.1.pep
LHSHETFCVYVRCSRTQSTQADVRSAVPRTATATRNLISAGRADEASSLSTDTRASVSLRRTISEACSPTLSVIAEGGTGMAVCNASETVRAYCLVVTRN

SEQ ID NO: 285611 - protein, 139 aa, Zea mays
  unsure (1)..(139): unsure at all Xaa locations
  Clone ID: MRT4577_23578C.1.pep
AVAPISPSRREHDSDSSDSDDETLLLVNLLTLNIEARRLHRRWSGLSRRVIRRDHFAGENLIHHHYFGPNPVYPSHVFRRRFRMSRPLFLRILQGLQRXDTYFTQRVDATCMPGLGPLPKVCAAMRILAYGLPSDARDE

SEQ ID NO: 285612 - protein, 238 aa, Zea mays
  unsure (1)..(238): unsure at all Xaa locations
  Clone ID: MRT4577_23579C.1.pep
LGTSRPALPPALRAAAAATSLSAGRQLHLLALRSGLFPSDAYCASALLHMYHHCSRPLDARRAFDEIPTPNPVIVTAMASGCMRNNLVYTTLSIFRSMVASGSAGVVDEAAALVALSASARVPDRGITGGIHALVSKIGLDGQTGVANTIIDAYAKGGGPDLGAARKLFDMXMDRDVVSWNTMIALYAQNGLSTEALGLYSKMLIVGGDVRCNAVTLSAVLLACAHAGAIQTGKRIHN

SEQ ID NO: 285613 - protein, 187 aa, Zea mays
  unsure (1)..(187): unsure at all Xaa locations
  Clone ID: MRT4577_2357C.1.pep
MAAVLRRAVAQCWASSSSSSPATFGLRRFLQEQPAFRPAVPPDRFMPLADRIRDLGVGVAFPRINLDGLVPPAPAPXPAKREPDAALPAASLTVEEARKVLRATQMEAARARIRESGAGAVPYADFLRLCCDAAGPDAGPSVARALDESGSVIVLGKTVFLRPDMVRFSPPVSLSIYYCSFQIHSPA

SEQ ID NO: 285614 - protein, 51 aa, Zea mays
  Clone ID: MRT4577_23580C.1.pep
QAGLIRDAFLEAELWRLNPSSSSDSSRVANRVRVNDQPHLVGSRRCWLLID

SEQ ID NO: 285615 - protein, 117 aa, Zea mays
  Clone ID: MRT4577_23581C.1.pep
SSGNNAEYAGVCLLQPYADYMKSFRENMADFLDAGVVVDIEVGLGPAGEMRYPSYPQSQGWVFPGVGEFIVSSLSKNKYSSVFFYCKTKGDSSPSVGQRQTSLGPCVGFCWKQSQKK

SEQ ID NO: 285616 - protein, 89 aa, Zea mays
  unsure (1)..(89): unsure at all Xaa locations
  Clone ID: MRT4577_23582C.1.pep
LSXGGQNGWVSHMTMLLNSCSSFLCXIYLQMRQLTLSTLFPPPAGRKTAARAFLFCYFMFGFIYLNRREAEETFHSAGGQQTRNAKTFM

SEQ ID NO: 285617 - protein, 178 aa, Zea mays
  Clone ID: MRT4577_23583C.1.pep
PKARENITAELKLGCLSVGILDSSCGMVTPLFDTTIANINLATHGRFETLNAVLICSIAASTFNRHLEAWEPFVEPFDGIFKFETYDTSEHPPSKVGKRIRVAATSPLNANLSSANLELLIETLVSWRRQIDLENKSSTKSEGPLENMKKADDSSYSALNEDDFQRVVFENKLGCDVY

SEQ ID NO: 285618 - protein, 101 aa, Zea mays
  Clone ID: MRT4577_23584C.1.pep
YNACLNTMATRIATVFASLREFPRVHYRVARTIDASTLTTLRDLVPTKLAASLWNSLVRFKSTIPEFPQTETCELLIDDRSIDQIAPIIHEWTYDAMCHDL

SEQ ID NO: 285619 - protein, 119 aa, Zea mays
  Clone ID: MRT4577_23585C.1.pep
MGTLGAGRHVTYGAEVSAVADKGRLKKITGVKAKEMLLWVTLHEICVDDPPTGKLHCKAIGGLSRSFPVEAFEAEKDGDAPATAPAAEEAESKAEEKADKEVSSADPAVVHAEALAAKN

SEQ ID NO: 285620 - protein, 153 aa, Zea mays
  Clone ID: MRT4577_23586C.1.pep
GERTQAFFRMAGDGCMRIFYLKALGTGRERSASFFLSRRLGGPGGRFHPKNEQGLGENPGGPKHRRGQTQWWTDLFPLGEPLGGAPRSDQPLYGKNFWAPPLRLLISGILGVLQLAGPLANWFKGQEILFADLFGREVEPGKYGIGPDGFPLF

SEQ ID NO: 285621 - protein, 142 aa, Zea mays
  unsure (1)..(142): unsure at all Xaa locations
  Clone ID: MRT4577_23587C.1.pep
HVSYGAEVSAVADKGRLKKITGVKAKEMLLWVTLHEICVDDPPTGKLHCKAIGGLSRSFPVEAFEAEEPAXPEPAVSFPGXEEEGDKNPEQEAAAEKDGDAPAAATAPAAEEAESKAEEKADKEVSSADPAVVHAEALAAKN

SEQ ID NO: 285622 - protein, 198 aa, Zea mays
  Clone ID: MRT4577_23588C.1.pep
PPASWWGEASQAAASLLPSASRMFIILAGAGGASSRGSASHVGQRPTSFSSIRGRRGVHQPREGGELRLRGAGQVQALTAAACLALGLGGPVAASDAASCRLVGAWLSIHHTGDGRAVRGSATPTASPAPPAIRGTVQDVARCGSGGSVLGWSSPHSVGGQERGPFVRRWPWSSVLRWWLPLAEVVASTAETIRATCR

SEQ ID NO: 285623 - protein, 103 aa, Zea mays
  Clone ID: MRT4577_23589C.1.pep
DMITRGRSTWDASSSRTCTGVPTYPPGHGPLLLFTTYYCVVSSVALYSLLLFTATTSSRPTNSREAQTSNSIQNNHPRIMLYMYPLLFFSLSFKLAAVICYLK

SEQ ID NO: 285624 - protein, 92 aa, Zea mays
  Clone ID: MRT4577_2358C.1.pep
GHSPLAGARPRPRPPKKPGRQAPPQQRGRITFPPRGKKHFRNTAGPSALRQRSGKRSPPGPPEGPPFKPWWGHPVKGERTRFLRVGGVPRGA

SEQ ID NO: 285625 - protein, 219 aa, Zea mays
  Clone ID: MRT4577_23590C.1.pep
MTLTIPDEVRAKAEVYVGDAAGQEKTRLLLQETGLPSGLLPLRDIIECGYVEETGFVWLRQRRKVDHYFAKAGRHVTYGAEVSAVADKGRLKKITGVKAKEMLLWVTLHEICVDDPPTGKLHCKAIGGLSRSFPVEAFEAEEPAPPGAGGVVPRDAEEEEKEEGDKNPEQEAAAEKDGDAPATAPAAEEAESKAEEKADKEVSSADPAVVHAEALAAKN

SEQ ID NO: 285626 - protein, 397 aa, Zea mays
  Clone ID: MRT4577_23591C.1.pep
MDSVNDGDQSNGHYGHANQGLSQGLGAFGGGRSCPFLRDGRNSSLGRAARDRSGTCQPPVTNQGTACQISCIVDTSELRKIADPLLDCLLADWETRHSSMFHQSSRIFIDPCCLDMRMDLGGFGPQSSNWLGISTASRDWNGLQLWPPINYLKQFLTPCRDLGYLRVNLSGFSLPSGMVYGGATTVKIFYQRRRKTTAGNKIATINDDDNVEAHALRLGLDVDVTAVTPSDPPSDVEGAADTPSETISRFHGPLLLEYNGTTRRADADSTVPLRPEVVASDDSSMQNFGDSCESSLDPSSSMESRRRSFMAKITMAPSQLLAAPVLPKRSRGATKYGTALRRSRRVAGAGVEFNMQDLENRATKQVMRTLKVITENACINQQAVFFSNTQESCVSLY

SEQ ID NO: 285627 - protein, 110 aa, Zea mays
  Clone ID: MRT4577_23592C.1.pep
QTRERGTSPKPKKVGKGRASPSTRRGNPGQLNEKRRKKRANGPPKSKPKGAPGGRKKAKTAPKGGWRKAKKILHLGWFLIEKKIFFFFFFFFLFFFFFFFFFRQKTLLLN

SEQ ID NO: 285628 - protein, 76 aa, Zea mays
  Clone ID: MRT4577_23593C.1.pep
NKRAHEDGTNGEFIGAWLLLSTRELLSTKVRLRKIPDLNLLHQSPIYQPTFLTFLMAQRYRFYNMSYILSIAFRFP

SEQ ID NO: 285629 - protein, 45 aa, Zea mays
  Clone ID: MRT4577_23594C.1.pep
SSTRTIIFIHFNQPHQRFQNHPMTPKNIRMQHSKILRKHQMILKD

SEQ ID NO: 285630 - protein, 264 aa, Zea mays
  Clone ID: MRT4577_23595C.1.pep
PRISAIKIDNCHFLYSLESRFHCALTRYQHFCSPEKKELVVGERGTVEVWTSRTKVMYDIYCSSWHSMHAPFSACRLCASQVHAGSVLVPGCPHAKDLVHAGTTGLPVPQQGHASGLLPAPPPRGAARSCHCVPGAASAWKTAQRGWPLLKATCAEEAAACCAVRRPRAPTWPRAAPSAGHARRWGLAPPVPRAPWSPYWLHARHGRRASLGLCARNGAARRRAEAAAPGQLTLLRPRRRGHSRSPTSEVSGSEPPWRVEPAPA

SEQ ID NO: 285631 - protein, 82 aa, Zea mays
  Clone ID: MRT4577_23596C.1.pep
WSSTLPCQSMSSGRHSLVARVVGVVVVLVPAGSLIPRIASGGRRSVLLCVHDFICLRPLSNRFTCRCVARWSRMSIKLACLC

SEQ ID NO: 285632 - protein, 47 aa, Zea mays
  Clone ID: MRT4577_23597C.1.pep
DEPHVRLSVGVRIKSPVGQVVFHAGNNRRIRHPPLCRYRKVRSLGYG

SEQ ID NO: 285633 - protein, 281 aa, Zea mays
  unsure (1)..(281): unsure at all Xaa locations
  Clone ID: MRT4577_23598C.1.pep
MAFRLSNNLIGVLNFVTFLLSVPILGAGIWLGHRADGTECERYLSAPVIALGAFLLAVSLAGLVGACCRVTWLLWAYLLAMFVLILVLFCFTVFAFVVTNRGAGEAVSGRGYKEYRLGDYSNWLQKRVENTRNWDRIRSCLQDSKVCKSLQDKNETVAQFMSSSLSPIESGCCKPPTSCGYTYVGGTDWTPVTTNSTDPDCKTWSNDASALCYNCQSCKAXGVVATFQRNWKRVAVVCIVFLVFIIIVYSVGCCAFRKHRRDNAYRGRVGGRVRLIHHRVV

SEQ ID NO: 285634 - protein, 49 aa, Zea mays
  Clone ID: MRT4577_23599C.1.pep
GKQNVLIPGSLALSWGDKSFTGFYLWGWLIRRKFLDYPQGGFSRTPPRG

SEQ ID NO: 285635 - protein, 47 aa, Zea mays
  Clone ID: MRT4577_2359C.1.pep
MLYAIFIRQRSHPAQMCTTPSPTPSDATVPLDLIQRHALRLEHSCIG

SEQ ID NO: 285636 - protein, 68 aa, Zea mays
  Clone ID: MRT4577_235C.1.pep
LAPSTMAIASSILCIVHIKNYEANYKEYNAICQIITFLGQYRTHELHTYDLLAIIGQSVESESASMLM

SEQ ID NO: 285637 - protein, 73 aa, Zea mays
  Clone ID: MRT4577_23600C.1.pep
MDLFGAKPSPTIFTRWSANAIFADPICHANGAKQYLAQWYGMPAAFSHSETLAWKLIKDTETEVEYVQKQKIG

SEQ ID NO: 285638 - protein, 143 aa, Zea mays
  unsure (1)..(143): unsure at all Xaa locations
  Clone ID: MRT4577_23601C.1.pep
YLSALFALVVSATIAFIMATRSLGPRAVIPHAGGRASIXFGHPLXQAYLLQLALAGRVWPQPIAHFQQQXRGHVTIQXTIGTHQRQHWLPSMSAIEWENPVVYLEHQEKASNPLDLANIVAYQLQHQLQQFIPELSELAMANP

SEQ ID NO: 285639 - protein, 130 aa, Zea mays
  unsure (1)..(130): unsure at all Xaa locations
  Clone ID: MRT4577_23602C.1.pep
NCEGPFKPVKFFFLGRPPRKPVVFLKLKGAPNPPFPGGGLFFNKRFTGAFPPHPFFFYTFRVPPPFVPAPPPSNKKKKKIKKKKKKKKKKKKLKKKKKKNKKKKKKKKKKKKKKKKKKKKXKKKXKKKGG

SEQ ID NO: 285640 - protein, 115 aa, Zea mays
  unsure (1)..(115): unsure at all Xaa locations
  Clone ID: MRT4577_23603C.1.pep
VKPACLGRSFPGAGVETSAEXSRAADPTQLCRWHAELREEEKGVGLGMGRERASRRRIRCRAASRVPEDRGHDMEKXKLMNLILLGAXAIPTGGMXGPYGDFFEPGGSGNGDGGN

SEQ ID NO: 285641 - protein, 170 aa, Zea mays
  unsure (1)..(170): unsure at all Xaa locations
  Clone ID: MRT4577_23604C.1.pep
AHSSEPSPTQPAQEAHREXPVQSHTPHPRYKSQPPVDIPLTPPPCAPAPAPAAHRSPEPXYKYKASPXGPPGHGGSRSAPSAVPPPPPPGAXAAPPPPCPLPTSPAAEAAPAPRPASPPRTWTYPSSSSTTPPSSCRRTPVVAVRSAQAALGARRRRSGRARTGSRSGRG

SEQ ID NO: 285642 - protein, 309 aa, Zea mays
  Clone ID: MRT4577_23605C.1.pep
PRVRLSDHIEQRLSERLEQDRQQRASASGKVAEEVPGVKGLTVRVVSSAERLLQVQPRFRGFFKQGKYPGEFPYKSKAILLFQKIEGVDVCLFAMYVQEYGSDCPPPNQRHVYLAYIDSVKYFRPEIKSATGEALRTFVYHEILIGYLDYCKKRGFVSCSIWACPSTKRDDYVLYCHPTVQKMPKSDKLRSWYQNLIKKAIKEGVVVERNTLSDFFLQPTNECKANISAACLPYCENDFWPGEAERLLEKKDDNASQKEETQVGRLLRVAKRDDRKGNLDDILLVHNLGERMRTMKEDFIMLCLQQFCK

SEQ ID NO: 285643 - protein, 88 aa, Zea mays
  Clone ID: MRT4577_23606C.1.pep
EFPHMPDVQVGRQTENRTKRGLRTGTSQDLNISNPSFPPDQGQGPRRHCRPNLTYPLYSSQGIPYDTCCAWSIGSWITAPSYGTAFYI

SEQ ID NO: 285644 - protein, 82 aa, Zea mays
  Clone ID: MRT4577_23607C.1.pep
PHHKRKPKPPPTTALLGRTCRICIRELNEWQRMFQVTEGTSLGHDHSATTEASATRVKKLAPITPPSCKQGSCRPVCRIINC

SEQ ID NO: 285645 - protein, 103 aa, Zea mays
  Clone ID: MRT4577_23608C.1.pep
PGCSHHRSALMWAADASADSGLYDKINTDGTVRTQYDAWVHDVAMLTLDRSSGAGFNFKEQYTDGDDSVQMKLILGNFVDNGSCLYLSSGDGDGHDEIDMEFM

SEQ ID NO: 285646 - protein, 58 aa, Zea mays
  Clone ID: MRT4577_23609C.1.pep
ILFPPRASAWSYANTIIALEPGEMKSKQLESSVETETEVRKEKKKKSKAITEDETEAQ

SEQ ID NO: 285647 - protein, 177 aa, Zea mays
  Clone ID: MRT4577_2360C.1.pep
MAAVLRRAVAQCFASSSSSSPATFGLRRFLQEQPAFRPAVPPDRFMPLADRIRDLGVGVAFPRINLDGLVPPAPAPAPAKREPDAALPAASLTVEEARKVLRATQMEAARARIRESGAGAVPYADFLRLCCDAAGPDAGPSVARALDESGSVIVLGKTVFLRPDMEKIQRKGAVLKR

SEQ ID NO: 285648 - protein, 91 aa, Zea mays
  Clone ID: MRT4577_23610C.1.pep
ANNHLVCCSSWSKLDNAPKPLKCLVKNTPRPQIELRICVEENTLRDGPQHLLNLVPTAAPPAWSFLELPSFGPHGSPGVVEHNCSVLDCTA

SEQ ID NO: 285649 - protein, 108 aa, Zea mays
  unsure (1)..(108): unsure at all Xaa locations
  Clone ID: MRT4577_23611C.1.pep
HFXXPFFTSKLXNXXKPPHISPSKXXLPPPXXSHFSSTXXXTNXXXXXXTPSSXXLTPPPPXXXXQKKISPPPSSXXXKKKNIFFLIPXXXINXTTXXPXXPXXPXSI

SEQ ID NO: 285650 - protein, 63 aa, Zea mays
  unsure (1)..(63): unsure at all Xaa locations
  Clone ID: MRT4577_23612C.1.pep
PSLYFEKKTPTTGGILENFRGGLTFGIQQGHHXFVTTDPSSKTDYDVHSIQSIGCPKYTLFKP

SEQ ID NO: 285651 - protein, 67 aa, Zea mays
  Clone ID: MRT4577_23613C.1.pep
PRPFTSCWCLLLRSLSWVLTCMMSIITSLSAWSVLVLPVRVFTMLCLLLRRCFRVDKGSISLCVCAL

SEQ ID NO: 285652 - protein, 143 aa, Zea mays
  unsure (1)..(143): unsure at all Xaa locations
  Clone ID: MRT4577_23614C.1.pep
FHQGHQLLLVVLANLGRYSQQQQSLPLSQLAALYYASYQQQPLRPLMQLXPGAYSHHFIPFSHLAAWLCHAYTQQHHLLPFSQLAGVRWATLLLYPQLSPFCQQAAPIAGILSQLQQSLPLGGAIVDKVSXFSEQTIFGGALV

SEQ ID NO: 285653 - protein, 235 aa, Zea mays
  Clone ID: MRT4577_23615C.1.pep
MTLTALGLGLALLAAASPCLGLGSSGSGSGGASVPSVVTEAFFDGIRSHARDGCEGKNFYTRSAFVSAAGAFPGFAHGGTEAEGKREIAAFFAHVTFETGYFCYINQINGRGQVSCDSGVKQWPCAPGKQYYGRGPLQISWNFNYGPAGQSIGFDALGDPDRVAQDPVISFETALWLWMSSAHQVVPQGFGATIRALHGALECNGNSPATVNARVGYYKEYCKQFGVSPGNNVTC

SEQ ID NO: 285654 - protein, 71 aa, Zea mays
  Clone ID: MRT4577_23616C.1.pep
MNCVGDLSTGSAGIGLLQFCNLNTFRTKFILGFLDLMGLSGPEYFNEHTSIAGYGPVHTHSRWFNDILNVI

SEQ ID NO: 285655 - protein, 95 aa, Zea mays
  Clone ID: MRT4577_23617C.1.pep
VSSTNIIKCIDMAPNSNSCDVSGYNICFTVPSSRTRILATSIICTVHLTSYIFTVYSQVHIFKAVYVVSILPTGRLCISPLAHLSAAISKNPVSF

SEQ ID NO: 285656 - protein, 53 aa, Zea mays
  Clone ID: MRT4577_23618C.1.pep
CSIWLHQIPFFLPPKINTTLEVYFVNLQRKNRGIGRYVCNCAIHFKPIFCPLL

SEQ ID NO: 285657 - protein, 124 aa, Zea mays
  Clone ID: MRT4577_23619C.1.pep
SVRNFVEKGPAAPYQSSSSYLTQQLSSNMALRAAASSSSCASGYSVQTKFTSLRPLPPSVVPSHAYSAPPRGPATVFHPSAPPVPYPASNSGGPGSSGAVLEIESVRWSVVGSKPEGSERLRSC

SEQ ID NO: 285658 - protein, 288 aa, Zea mays
  unsure (1)..(288): unsure at all Xaa locations
  Clone ID: MRT4577_2361C.1.pep
MAAVLRRAVAQCFASSSSSSPATFGLRRFLQEQPAFRPAVPPDRFMPLADRIRDLGVGVAFPRINLDGLVPYADFLRLCCDAAGPDAGPSVARALDESGSVIVLGKTVFLRPDMVVKAIENAIPVXTXLPAAAAAEIDPAWEEELRAMEAEKAEIDRAAAARVRRELWCGLTYLVIQTAGFMRLTFWELSWDVMEPICFYVTSMYFMAGYAFFLRTKKEPSFEGFFESRFAAKQKRVMRARGFDLRRYEELRKACGVAASPPLQARTPCASAGAARENGHCHSYCHCH

SEQ ID NO: 285659 - protein, 179 aa, Zea mays
  Clone ID: MRT4577_23620C.1.pep
MAQRTAAAASSSASGYGVQRPPGLSLTTAQTKFTSLRPLPPSVVPSHAYGAPPHGPVTVFHPSAPPVPYPASNSGGPGSSDAVLEIESVRWSVVGSKPEGSERLRSCKRAAEMDADVSVALLKKPLTVAAAAAARQGLDMLLPVAETGSEFRGSTRPEPEAQPRPSGTSTTPICVDDEP

SEQ ID NO: 285660 - protein, 67 aa, Zea mays
  Clone ID: MRT4577_23621C.1.pep
PEAWGDAWADPWAATEISAPPPIKKVAKFDTWGEFQNPPPPRIFLPKLGPKPFCGGHVFLGVPPKAR

SEQ ID NO: 285661 - protein, 317 aa, Zea mays
  Clone ID: MRT4577_23622C.1.pep
GPSRPAGLEFDEAKRSCRKRLDGHNRRRRKPQPDTMSSGSFMTSQQGLFSSAGTRLSSFPAPRPEPSWSGVIKSEDSSYYTHHPVLSNRPHFAGTSTSPAYSKEGRRFPFLQDGDQVSFSASGAGTLEVSTVCQPLLKTTAAVAPPPPESSKMLAPVLDSDCALSLLSSPANSSSVDVSRMVQPAERIPMAQPLVPGLQHHQFGVSPVPDWFACSQAGSGAVPTRRRVRLPPGRGERAAQHRPGAELRRGGHEMNYHGIFHVGGDGSSDGTSPSLPFSWQKLAFRFKRPAVYRFSCTSGHRTSSLFFPRFSNLFSAP

SEQ ID NO: 285662 - protein, 194 aa, Zea mays
  unsure (1)..(194): unsure at all Xaa locations
  Clone ID: MRT4577_23623C.1.pep
AAGRTSPAAGAPRRRPTRPRKAGASRSSRTAATSSRSAASTRARARGRSSSRSLPRPRCASPSSRPPXAAAPPPPPESSSSNKMFSDGLAPAVLDSDCALSLLSSPANSSSXSTWAGWSSTSPRSTSPWRSPSSPAASSSSSSTTRSAAPPPGSPAPRPAPAPSPPAVSPAPRAWRASSSTPCWCRAPTVAATT

SEQ ID NO: 285663 - protein, 119 aa, Zea mays
  unsure (1)..(119): unsure at all Xaa locations
  Clone ID: MRT4577_23624C.1.pep
QXPTHKHKARRQAERAWIPTTGGSVSPARSSPALVDLTGQGYVLPTLVSRTRSRGRRGDHGGGGGGWRRRVRPVDSRTSLETCCGPARAAKPAGAPTSPPRAVVHLLVVSHWCRRWWSV

SEQ ID NO: 285664 - protein, 124 aa, Zea mays
  unsure (1)..(124): unsure at all Xaa locations
  Clone ID: MRT4577_23625C.1.pep
AHAGRQGRERRRPPRRGGGPAASESPGTEQDKREKSGGNGAGQAXGPTGGGXARKGPDREGGGXDSAKPRREAGNXDTXPXNEPGPEEGAKQXRGRNXRPSTEGEKHXXEXDRSXXTANTPTKT

SEQ ID NO: 285665 - protein, 78 aa, Zea mays
  Clone ID: MRT4577_23626C.1.pep
LWVFFKKIKGVLKSLARFLKKKEVFQKIFPIFCRKNLREGIFVRALLRVIPLGGGRGRWAHADIKGATGKGGGFSKSY

SEQ ID NO: 285666 - protein, 99 aa, Zea mays
  unsure (1)..(99): unsure at all Xaa locations
  Clone ID: MRT4577_23627C.1.pep
PAMTLVSNADSRGEYLTGGLVVXASKCQAGPSLSVKEECSPPVLLYLPVQWSQCYDSHPSCPASWLSLSSMVRACCLVMYKEPIGSDAFHSRSGAFTSS

SEQ ID NO: 285667 - protein, 85 aa, Zea mays
  Clone ID: MRT4577_23628C.1.pep
LLIECRIRKHHILYGEVCGAKCGKSRPPVLAKYAGLLSGFQDVRASRSVKFVMSCMLAMVDLLIKVSLNHQAGAGSQMVIALVIG

SEQ ID NO: 285668 - protein, 64 aa, Zea mays
  Clone ID: MRT4577_23629C.1.pep
YGPQCCDHGLKCGGRPKLWTTVDGCKERTGAVDLKKLSREICRVHWNILSIQDDVCVAADHLIS

SEQ ID NO: 285669 - protein, 305 aa, Zea mays
  unsure (1)..(305): unsure at all Xaa locations
  Clone ID: MRT4577_2362C.1.pep
MAAVLRRAVAQCFASSSSSSPATFGLRRFLQEQPAFRPAVPPDRFMPLADRIRDLGVGVAFPRINLDGLVPPAPAPAPAKREPDAALPAASLTVEEARKVLRATQMEAARARIRESGAGAVPYADFLRLCCDAAGPDAGPSVARALDESGSVIVLGKTVFLRPDMVVKAIENAIPXXARVRRELWCGXTYLVIQTAGFMRLTFWELSWDVMEPICFYVTSMYFMAGYAFFLRTKKEPSFEGFFESRFAAKQKRVMRARGFDLRRYEELRRACGVAASPPLQARTPCASAGAARESGHCHSYCHCH

SEQ ID NO: 285670 - protein, 28 aa, Zea mays
  Clone ID: MRT4577_23630C.1.pep
GGPAGPHLFLVPIYFYYPKERLSSAKLS

SEQ ID NO: 285671 - protein, 65 aa, Zea mays
  unsure (1)..(65): unsure at all Xaa locations
  Clone ID: MRT4577_23631C.1.pep
THSTTSVNVPFFSNIKDIFSVFFYDDIDILKGSCGKSLEPFPQGXFYSNALXELKFYKNPKHKVT

SEQ ID NO: 285672 - protein, 55 aa, Zea mays
  Clone ID: MRT4577_23632C.1.pep
HGAQLASQAQRPRGRAEVGWRAQGTQPRHLLPPPPSPPSERKDGLGLSHGPTPLP

SEQ ID NO: 285673 - protein, 418 aa, Zea mays
  unsure (1)..(418): unsure at all Xaa locations
  Clone ID: MRT4577_23633C.1.pep
MDPYKHRPTSGANSGYWTTNSGAPVWNNNNALTVGQRGPILLEDYHLIEKLAQFDRERIPERVVHARGASAKGFFEVTHDVSQLTCADFLRAPGVQTPVIVRFSTVVHERGSPETLRDPRGFAVKFYTREGNFDLVGNNMPVFFIRDGMKFPDMVHAFKPSPKTNMQENWRIVDFFSHHPESLHMFTFLFDDVGIPLNYRHMDGFGVNTYTLISRDGKAHLVKFHWKPTXGVKCLXLDDEAVTVGGTCHTHXATKDLTDSIAAGNYPEWKLFIQTIDADHEDKFDFDPLDVTKTWPEDIIPLQPVGRMVLNKNIDNFFAENEQLAFCPAITVPGIHYSDDKLLQTRIFSYADTQRHRLGPNYLMLPVNAPKCAHHNNHHDGLMNFMHRDEEVNYFPSRFDPTRHAEQYPIPPRVLSGC

SEQ ID NO: 285674 - protein, 63 aa, Zea mays
  Clone ID: MRT4577_23634C.1.pep
ADLTSLPDSKPNRSLIKKYQDSSTANRRRRHSLLQEMENNVTIFVSLEGNISSIPNSIGNDSK

SEQ ID NO: 285675 - protein, 53 aa, Zea mays
  Clone ID: MRT4577_23635C.1.pep
VLRRPASCISAGPSQGSYAFKRAYLHTRHRRRWKGTSRSTTTHRIVQGPIMDP

SEQ ID NO: 285676 - protein, 83 aa, Zea mays
  Clone ID: MRT4577_23636C.1.pep
RVVKPAGPQGHILNVADRVLQNSSQASEAHFYDVMRGLKYVTVVPGFVDEAVQHVACRRQSHSQFSPSGVYELTYHLRDVVKS

SEQ ID NO: 285677 - protein, 59 aa, Zea mays
  unsure (1)..(59): unsure at all Xaa locations
  Clone ID: MRT4577_23637C.1.pep
MSSPTCPEEEFLLTWRKXHXTFKDTCEELGSHPPKEDTILRAVIPARQSEAACILHLAT

SEQ ID NO: 285678 - protein, 216 aa, Zea mays
  Clone ID: MRT4577_23638C.1.pep
MRCRGDPAIAAAAIGVLCVASAVLLGLVDGATEGEEPTTQLLNGFTAAHAAGAPAPFQPVLYAPSGAFALGFLRVGAGSLDLAVVHLPSSFPVWRATLARLGNWSRAATLTFDGGLELTGHDGGVLWQTLGAAGDVVVLLNSSNLVVRRYEKTLPEWESFRHPSDTLVLGQNFTASSPPLVSANRRFALRLGKAYMALHMEFYGGQTAPTYWRHTA

SEQ ID NO: 285679 - protein, 106 aa, Zea mays
  Clone ID: MRT4577_23639C.1.pep
PIIFAQNPFLTQKIEGNGTRPGSRKNRGQQGPKGWVSLNQSTNTKMGGFLKSLCGPLKKPGGLSNTPGWVTGLPGGQLPTQGGSSDKGPERPFCPQGNRTFCQKLS

SEQ ID NO: 285680 - protein, 198 aa, Zea mays
  unsure (1)..(198): unsure at all Xaa locations
  Clone ID: MRT4577_2363C.1.pep
MEKEEQPSKPWECFFCCCLVFDGNTQVVKAIENAIPVXTPPPPPAEIDPAREEELRAMEAEKAEIDRAAAARVRRELWCGLTYLVIQTAGFMRLTFWELSWDVMEPICFYVTSMYFMAGYAFFLRTKKEPSFEGFFESRFAAKQKRVMRARGFDLRRYEELRRACGVAAAPPLQARTPCAGAGAARESGHCHSYCHCH

SEQ ID NO: 285681 - protein, 34 aa, Zea mays
  Clone ID: MRT4577_23640C.1.pep
VVVLLCRIGARVLAMGSSLPPRGGAAFFLGNIGW

SEQ ID NO: 285682 - protein, 92 aa, Zea mays
  Clone ID: MRT4577_23641C.1.pep
VLEGTMNGDTRILAIKNCGSTHLLQALTVTLQHHTQLSTDLTPYMGITYPVDATMKSTTRHPSLDSAPRYCSIITHLCFRARNSKAKYIYHQ

SEQ ID NO: 285683 - protein, 59 aa, Zea mays
  unsure (1)..(59): unsure at all Xaa locations
  Clone ID: MRT4577_23642C.1.pep
MSLKRSEFDYRVAARSLNDISXLDPLKIGSDIISSAKLLIXTLRSQRNCQWLHHPPLIA

SEQ ID NO: 285684 - protein, 88 aa, Zea mays
  unsure (1)..(88): unsure at all Xaa locations
  Clone ID: MRT4577_23643C.1.pep
GVAXXSSGTTSSCTGAXSSXGXSTGISSSNGDASAPLPALVQTXFLFNGXLVGXXHAFMVLQWAVPTGXXAVVXRFWRCGVDPNXSAS

SEQ ID NO: 285685 - protein, 54 aa, Zea mays
  Clone ID: MRT4577_23644C.1.pep
PTLSYLYLLFLMHNSYTIGRLPKKKGNTHYTNTIWKNSFKIYTESNLILIKFTS

SEQ ID NO: 285686 - protein, 51 aa, Zea mays
  Clone ID: MRT4577_23645C.1.pep
GAVFRGLFFFFFSFFFFVPVQSLAPLEQTHIRSTTHTVQQNKYITGWKRLI

SEQ ID NO: 285687 - protein, 94 aa, Zea mays
  Clone ID: MRT4577_23646C.1.pep
YVCVAIVQKFTKLYFSECTWMRGVECLDGEAGSSRQEETMMESGFPLYPMESRFSASPFSCDFGIPAQFPFMEGMRCCWLAHRKAEPLAVKACD

SEQ ID NO: 285688 - protein, 106 aa, Zea mays
  unsure (1)..(106): unsure at all Xaa locations
  Clone ID: MRT4577_23647C.1.pep
GSPGSPWINGPSVLKNPTVVSVAGGLQKTPARVAFFWGIQMGHSVFLYSPPQSGIKXNVDIFGWFIPEDLMAGFYEINQVGLLPPEFVVLPQAGSNPLEGFWVGEI

SEQ ID NO: 285689 - protein, 103 aa, Zea mays
  Clone ID: MRT4577_23648C.1.pep
KRFPLRVGGTFVLDPLTLAGGPPNGVFFGPIKGPWVPPFWGAPPPGGKGPNFLGFLFPPSLSNPHPLIFFFPSPRGWVFSGRGSKNPNSLWGFWGPPFGDQLN

SEQ ID NO: 285690 - protein, 118 aa, Zea mays
  unsure (1)..(118): unsure at all Xaa locations
  Clone ID: MRT4577_23649C.1.pep
IXHEAPRLGGRKAPXRGSHLAAMSGACVLLLPRGLPFSTAIGLGLEWRSTRARNSLRWGGALIWADGVSNFDKAREGDRAQVTRGIGKLSGGGEEFSRRIGVSAQTPMLXAEDQPWRR

SEQ ID NO: 285691 - protein, 70 aa, Zea mays
  unsure (1)..(70): unsure at all Xaa locations
  Clone ID: MRT4577_2364C.1.pep
VEPLHRFLPPFGVVLQSFLHAAPAGXLPALMAAQVVHLLTSMWGLQLQQPGXCPCSXAARGVFPSGSYVL

SEQ ID NO: 285692 - protein, 95 aa, Zea mays
  Clone ID: MRT4577_23650C.1.pep
YHTKKRRAWHRQTIMCLGSRLALTHYTKHVPYTQNRFVAAIYQQDHHISISSLLSISTLIMGSLLSALHRNEVATNLVYEVGLTNYAACLSAPGP

SEQ ID NO: 285693 - protein, 77 aa, Zea mays
  unsure (1)..(77): unsure at all Xaa locations
  Clone ID: MRT4577_23651C.1.pep
LLPQANQRIIDSVATRLHFPPERVISNLANYGNTSAASIPLALDEAVRSGKVXPGHSIATSGFGAGLTWGSAIMRWR

SEQ ID NO: 285694 - protein, 46 aa, Zea mays
  Clone ID: MRT4577_23652C.1.pep
PRMMSVPLALAHRPWIRCASRYHLSPARSLLSSSGSKGKSARSDQS

SEQ ID NO: 285695 - protein, 89 aa, Zea mays
  Clone ID: MRT4577_23654C.1.pep
ELHFQILKKNKKKKKKKKKKKKKKKKKKKKKKKKKKKKKKVTFPCRRGGGGQFLPPAGPYLWPGANSNPFPFPGNIRSRGKKGIPWGSY

SEQ ID NO: 285696 - protein, 65 aa, Zea mays
  Clone ID: MRT4577_23655C.1.pep
WSRSMISARSSWFDKDPFTSPTQPPLPPLHSLSAQHSLSQPHPSRLNSSTTITPSITAITERGRI

SEQ ID NO: 285697 - protein, 243 aa, Zea mays
  unsure (1)..(243): unsure at all Xaa locations
  Clone ID: MRT4577_23656C.1.pep
FGTRIRREASPSGRTNRRHKAKAPPARRHARLHLPLLPISPAGDWCLPPQPSSGGDXAAFDAYFRAADLDRDGRISGQEAVAFFKGSGLPQPVLAQIWTYADKNRTGFLGREDFCNSLKLVTVAQSGRELTPDIVRSALFGPAAAKIPAPRINVSTAGPQTNSVASPPNATRALGSGQQNPAVRGPQVLPGASSNPQVRPPQPPNANTVPXVQGVASRPPVGGGPSGLNHTSSTTTNLATDWF

SEQ ID NO: 285698 - protein, 82 aa, Zea mays
  Clone ID: MRT4577_23657C.1.pep
RPEVGVQPWGQGVHSLPLRTEHLQLFILRHNCPLTERLHSEGHHGSGGKLPYPSCLASGPLHHRPAHRDLMGATIKSGTKAL

SEQ ID NO: 285699 - protein, 310 aa, Zea mays
  Clone ID: MRT4577_23658C.1.pep
MASSSAVEPSFRLSDRERRSSLGLRFTVLLMHVVFVGAVFILDPTLDWRIHEEPWYIGLYGVLVLLTLVQYFYTAGSSPGYVIDVMRAGSMMHATFVNTAALSKQSNSRNGNTNSPTSHAQLQKLSAMTPTSWAQMVVDLYPPGSNSRDWTCTHCRIVQPPRTRHCHDWITSFLWYISEETILCIWTAALCIESLCLDVDKAWWKDFVGVILLAALIFILIFLLLLWLFHSYIAVTNQTTYEVARRKRIFYLRGVPERVHPFSRGICRNLYDFCCSSQKGYILEAVPPREELEARAARYTCRDVICCRCC

SEQ ID NO: 285700 - protein, 69 aa, Zea mays
  Clone ID: MRT4577_23659C.1.pep
EHRWASAYKSASMHALLLLQGIALEYDKHHDGDPGACVGVSPLKNNEVHEMVFIQYVCHTKFLIYYALY

SEQ ID NO: 285701 - protein, 336 aa, Zea mays
  Clone ID: MRT4577_23660C.1.pep
MASSSAAESSSRLSDRGFYAARRSSLGLRFTVLLMHVMFVGAVFILDPTLDWRIHEEPWYIGLYGVLVLLTLVQYFYTAGSSPGYVIDVMRAGSMMHATFVNTAALSKQSNSRNGNTNSPTSHAQLQKLSAMTPTSWAQMVVDLYPPGSNSRDWTCTHCRVVQPPRTRHCHDCDKCVLQFDHHCIWLGTCIGKKNHCRFWWYISEETILCIWTAVLYIESLRLDVDKAWWKDFVGVILLAVLIFILIFLLLLWLFHSYIAVTNQTTYEVARRKRIFYLRGVPERVHPFSRGICRNLYDFCCSSQKGYILEAVPPREELEARAARYTCRDVICCRCC

SEQ ID NO: 285702 - protein, 661 aa, Zea mays
  unsure (1)..(661): unsure at all Xaa locations
  Clone ID: MRT4577_23661C.1.pep
MLSATALLLFLLLLVSVIALLVSSNHGNHNTGTKSKKKRPPGPWRLPFIGSIHHLLTSQPQATLRDLAQKHGPVMYLRLGQVDTVVVSSPAVAQVVLRDKDINFASRPYPYLLATEIIGYGGHDFAFAPYGAYWRALXKLCTLELLSARKVRQLAPIGDSETMSLVKEIRRRSCSRGRRRRPRLGAGRDVLPVVSRVVGRSRSSVLPGAVQEEWLHGVCAPVAAPARRRAQPERRQKFVFLSASSDGFGHRSQKGRGSAVDVEGGVRAHEEPGSHGQGPSRGSIWCFIVSMGFLDLGLWGFFIERRSSLGLRFTVLLMHVMFVGAVFILDPTLDWRIHEEPWYIGLYGVLVLLTLVQYFYTAGSSPGYVIDVMRAGSMMHATFVNTAALSKQSNSRNGNTNSPTSHAQLQKLSAMTPTSWAQMVVDLYPPGSNSSHLVLGTAMTVINASFNLIITAYGLEHALAKRTIVVFGEFLMWYISEETILCIWTAVLYIESLRLDVDKAWWKDFVGVILLAVLIFILIFLLLLWLFHSYIAVTNQTTYEVARRKRIFYLRYIAVGATQFVTDRSMTPVLNLHLNNSSTDLRFASHAKLSAVRFKESDRTEDIVPNSRTAHCWALLIKSYDLQLDEVRPLLGMPASEVKDANFCRKSHGLHKLPRLD

SEQ ID NO: 285703 - protein, 96 aa, Zea mays
  Clone ID: MRT4577_23662C.1.pep
MPLMGLGVCGSLCQGGDENDGFDYAYGTGCQRCNHCSGEDDVMEEDFQEFQEYDEFLAWVSGKPPIGCLCRPCVSTFLFRTLIIVKDYVDGSDIMM

SEQ ID NO: 285704 - protein, 98 aa, Zea mays
  Clone ID: MRT4577_23663C.1.pep
GALGWQGVQLALPTDVRRGGGGRRGTAEVAGARRSRLGHAGRCTEDCRPHLRAERRGGGSGSSEKVRTDVSVINGLLDGPPNKSPYQTFFFSFLFLFS

SEQ ID NO: 285705 - protein, 651 aa, Zea mays
  unsure (1)..(651): unsure at all Xaa locations
  Clone ID: MRT4577_23664C.1.pep
MQRPGRLQRSGSKRGLEPTGGGDDDDHAPKRPRVPALASVIVEALKMDSLQKLCSSLEPILRRVVSEEVERALAKLGPARIQGRSSPKRIEGPDGRNLQLQFRSQLALPIFTGGKVEGEQGAAIHVVLLDANTGCVVTSGPESFAKLDILVLEGDFSKEEDEDWTEEEFESNIVKEREGKRPLLTGDLQVTLKEGVGTIGELTFTDNSSWIRSRKFRLGLRIAPGFCEGIRVREAKTEAFPVKDHRGELYKKHYPPALKDDVWRLEKIGKDGAFHKKLNASGIYTVEDFLRLLVRDQQRLRSILGSGMSNKMWDSLVEHAKTCVLSGKHYVYYARDSRNVGAIFNNIYEFTGLIADDQFISAENLTDNQKVYADALVKKAYEDWMQVVEYDGKALLSFKQKKKTVTTRSDVASASTSXLLHMVRPIHRNSXSLPAKAGQTSSAGTMNEADGTRNAYNANGNQSARYAANTQSIPANVGMQYDGSAVSPEIQFSGSSLQSQSSRGSNMLALGPPQQHQSFEFPALGQPVQPTGLNPFEEWPQQQENRGGGVDDYLMEEIRMRSHEILENEEMQQMLRLLSMGGAGTSLAEDGFNFPPYMPAPSPNVSYEDDRTRAPGKAVVGWLKIKAAMRWGIFVRKKAAERRAQLVELDD

SEQ ID NO: 285706 - protein, 126 aa, Zea mays
  unsure (1)..(126): unsure at all Xaa locations
  Clone ID: MRT4577_23665C.1.pep
DPRGRTPPPPGPGPNAKARSKGHEPRGKSKAEPQAQXKEXKAERARQRGAKDTGGAPNKRPKSKGGRTTNARGXTDNAQKQKTAPREADKKKKGXPARXRPKKTXRANRRRXNKHQRXXETEREKK

SEQ ID NO: 285707 - protein, 51 aa, Zea mays
  Clone ID: MRT4577_23666C.1.pep
DEVRGERSDLDKRSWPNDNDGRRLAGGSQIPRTQNYEKRWTMAAEAVTKRT

SEQ ID NO: 285708 - protein, 55 aa, Zea mays
  Clone ID: MRT4577_23667C.1.pep
REGHEASPLLRGGPLPSILKNLWAQIKWEHLCTGKIRMVSIFFFSSRVKWSFSFL

SEQ ID NO: 285709 - protein, 69 aa, Zea mays
  Clone ID: MRT4577_23668C.1.pep
ASMTEQSTAHRHSLDAGNAAKGNLLPVLGRGVHVSRHDPRIRLTREVWTEERCTRKGVLLLNTTQCRGL

SEQ ID NO: 285710 - protein, 124 aa, Zea mays
  unsure (1)..(124): unsure at all Xaa locations
  Clone ID: MRT4577_23669C.1.pep
PGFPLFPAGGLFFYSFGPASFPPGKPAFAPTPFILVCPPLWAPRPSPLRSRFFGGGPGARLPFSPGGPLGPGSPQALIRPPLGKVGPPPGPDQKYQEKTKKKNQKKKKKKKKKKKKKKKXKKXK

SEQ ID NO: 285711 - protein, 79 aa, Zea mays
  Clone ID: MRT4577_2366C.1.pep
KKLRLSVELSSFPSRRTVYPNCLRNQTQPKLRFGLTHFFGLPMNDVCILDHYNLCTYVRIYIYNLRFEELKKSVRQNKP

SEQ ID NO: 285712 - protein, 57 aa, Zea mays
  Clone ID: MRT4577_23670C.1.pep
HKFNLLCAVLHRVDCENTVVTQLNLLAEHIPFSRCRNIEKARTDRAFQQMRTLYVEC

SEQ ID NO: 285713 - protein, 52 aa, Zea mays
  Clone ID: MRT4577_23671C.1.pep
ADSGHAGRSTAYINGALLRIHEKGRLGLCQAPGGTMAWSASNDTDGVSDCGA

SEQ ID NO: 285714 - protein, 168 aa, Zea mays
  Clone ID: MRT4577_23672C.1.pep
ISSEAEAFEEILNDCGDVCAFSSARGIAAILEKAGCEHVKTLAQAEAALCIDDTKDPSAEASLVGGKFFTDIWENGGRGMAHEIIKKSEKDTHDAKEATKAAEKAVELERRIEPFESLVDPEAKESTEIINMAESIMDEVVTQLLTEAADKVLKEEDRYCKNIARILM

SEQ ID NO: 285715 - protein, 52 aa, Zea mays
  Clone ID: MRT4577_23673C.1.pep
KDTAIKKKKKKKKKKKKKKKKKKKKKKKKKKTKKKKKKKKKKSFGWYPLLKG

SEQ ID NO: 285716 - protein, 70 aa, Zea mays
  Clone ID: MRT4577_23674C.1.pep
MFTVLLVHVKKKGEKNHIKKKKKKKKKKKKKKRKKKILKKKKKKTQKKKKKNQKKKKRGGRFKESKLTYA

SEQ ID NO: 285717 - protein, 87 aa, Zea mays
  Clone ID: MRT4577_23675C.1.pep
ISCDIPPINQHISTTANGRVFTGNYNNPSIIHPSTKKKNKSRHGSGWPEEGSKLGEERIGSDHWGWGPGGPSPMTIRHRVCLQGPAA

SEQ ID NO: 285718 - protein, 64 aa, Zea mays
  Clone ID: MRT4577_23676C.1.pep
KGSPKLNSMAIFLKSRDWKNPGVTHLKPLEKNPPFATWVNTKDASTIRPSKKLPTLNGKWNSPC

SEQ ID NO: 285719 - protein, 62 aa, Zea mays
  Clone ID: MRT4577_23677C.1.pep
PIGAFHKGLWSTKIPTPFLSNSPKTLYTVPKKKSHQQTPIPPPPGNKKKPTHPLGATTLPYT

SEQ ID NO: 285720 - protein, 236 aa, Zea mays
  Clone ID: MRT4577_23678C.1.pep
QLIFLNSLFGYLSLLILIKWCTGSKADLYHVMIYMFLDPAGDLGENQLFWGQKELQILLLLLALVAVPWMLFPKPFILKKLHKERFQGHSYRFLGTSEMDPDSEPDSARARHDDFNFGEVFVHQMIHSIEFVLGAVSNTASYLRLWALSLAHSELSTVFYEKLLLLAWGYDSLIVKFVGLIVFSFATAFILLMMETLSAFLHALRLHWVEFMNKFYHGDGYKFKPFSFALLADDED

SEQ ID NO: 285721 - protein, 144 aa, Zea mays
  unsure (1)..(144): unsure at all Xaa locations
  Clone ID: MRT4577_23679C.1.pep
MSDVNISDVGVSAVFFASCSLVSMDPKLLICSSRSSSRSLLRIVATVVSPKTLTXEAVGDMALVLFGATHQKTDDVILLPSTVLSKPPRGEAGAVVHGTALCDRKISVDIXDCDYIXYSKNGGTEVEFSDTMHLILKEYLIIEI

SEQ ID NO: 285722 - protein, 83 aa, Zea mays
  Clone ID: MRT4577_2367C.1.pep
IRLELGRPAHFRADAFSLKRWDYSCNGPDRLLSQNESVGHESTQLGLECSTPGVYSDNREIHDVKQGKRLPIQAARGRTSYGA

SEQ ID NO: 285723 - protein, 118 aa, Zea mays
  Clone ID: MRT4577_23680C.1.pep
MPEQEAPYDPYIPSGQAGAQQQQGTGGNARTQALQAQIDDTVGVMRDNINKVSQRGERLDALQDKTDNLAVSAQGFRRGANRVRKQMWWKDMKMRMCLIIGIIILLVIIIVPSVVATR

SEQ ID NO: 285724 - protein, 97 aa, Zea mays
  Clone ID: MRT4577_23681C.1.pep
VCSPLGPPARRLNAKPLSRDDLVLCCLLPRPAPPPCALCLPLPKPILLRAVRSPAPSPEASPPSCDLHLYREAAPPLSHQSAACSHRRSVRSLSLSR

SEQ ID NO: 285725 - protein, 50 aa, Zea mays
  Clone ID: MRT4577_23682C.1.pep
NIIISQLLLISITFPFIHLAQFVNMFLPIYTSYQFLNSEWLFFINPLILH

SEQ ID NO: 285726 - protein, 53 aa, Zea mays
  Clone ID: MRT4577_23683C.1.pep
ERIRLTARRVDRIRAPLVSIWLEAAGRHGRRGAGLRTRSRAPRGQRQRGGERS

SEQ ID NO: 285727 - protein, 56 aa, Zea mays
  unsure (1)..(56): unsure at all Xaa locations
  Clone ID: MRT4577_23684C.1.pep
GVNKVVLGSDCGLFGGFSRIHPAPELLTAYCSHHKRPYSCPFYTXSRTCVVYAPVE

SEQ ID NO: 285728 - protein, 146 aa, Zea mays
  unsure (1)..(146): unsure at all Xaa locations
  Clone ID: MRT4577_23685C.1.pep
HGPAGAGKRRRRTAXAPEPEXXXXNEKXPRPXDEDDXAPXKTEXRGEKLFFFKKXEXENKERAGKXXDPXPXKEXXTGXXPPSQXEKKKEKQXXXEEQPXQXARGTKXXSXXTXEXKXXXXGKQXAKXXXGXGXKGXPPXXEEGTR

SEQ ID NO: 285729 - protein, 40 aa, Zea mays
  Clone ID: MRT4577_23686C.1.pep
TSCLLTLEHLGAGCTLILARIFSRGVGFYLVRFLVTQHCT

SEQ ID NO: 285730 - protein, 279 aa, Zea mays
  Clone ID: MRT4577_23687C.1.pep
PDGCISLPLTGLKTAHIEVSSFHHCVQASEPTANKQTLVLQPRLGNFVLMHYQAPCNIAPPVKGFYQLSMVSENEGAFLFKLTLMEGYKSPFIMDFCMITMPFPRRRVASYDGNPSIGTVSMTEHSIEWRIVSSGRGLSGRSIDATFPGTVKFQPRTTQRINSSSRFISSTGYTEDSDSEQDNVKNGASLDDYIMEKINKDLQAVDLEEPLSWQAYNYAKVSFKVTGGTLSGLAIDPKSVNIYPSAKAPAEYSMQASSGDYILWNTLGKCPTAALPREL

SEQ ID NO: 285731 - protein, 93 aa, Zea mays
  unsure (1)..(93): unsure at all Xaa locations
  Clone ID: MRT4577_23688C.1.pep
RGXGRARDSHDPYGSRAPALAAVTRLYSQTWRNHIHTSLLTPIRVQSHFPTTMDPETTRVNTGVTNDGDSANSYHLWSLAVYHWRHRPPQECY

SEQ ID NO: 285732 - protein, 48 aa, Zea mays
  Clone ID: MRT4577_23689C.1.pep
QELHRVSLFINEPPRQQLHRVHKVTFTYVRERRQRERAPEERLLKISE

SEQ ID NO: 285733 - protein, 89 aa, Zea mays
  Clone ID: MRT4577_2368C.1.pep
GGIPGHNLWKLPRREQGLPFVTRWRSRSRITYKFYRVFPNGKVHYFNPRAGFYPEKVNPGGGGVGQNFRRIGRNVNPINVKLTGRATFN

SEQ ID NO: 285734 - protein, 38 aa, Zea mays
  Clone ID: MRT4577_23690C.1.pep
NFWHTQGFLKIWKLVMSHLVLMELFLACTFLPIRLDLS

SEQ ID NO: 285735 - protein, 89 aa, Zea mays
  Clone ID: MRT4577_23691C.1.pep
MEAVGVTPAPVAAPEKKKLLDLKDPFPAAANSGAKASSASKWATKKKLVGGDAGYVLEDVPHLTDYMPQLPVRSRVPHPLGVSRWVPDG

SEQ ID NO: 285736 - protein, 123 aa, Zea mays
  Clone ID: MRT4577_23692C.1.pep
QPGPVPPLSLTLGTHRAALSSSSRRKRVGHYRGQINYVSFRICLPNQFASTLYNFAIFLAPLFCLDTRLGSPSSRLGSHRVTKLAAAVALASRGCSAEIELLTSFVLRLRTSLHSPSPFSSSL

SEQ ID NO: 285737 - protein, 394 aa, Zea mays
  Clone ID: MRT4577_23693C.1.pep
MAGGMQAADAAGRLSALLSLLALRRLLAVLQPLALLLLLPFRWRARPAGAVAAAVASDAATASAPGASGRKGKASSSSSVVLRVPAGSPMVAARRQASARREIAVRRAREAGREYELVPTARGETLFTQCWWPHPPSTVKPRALVVVMHGLNEHSGRYDHLARRLNDIGIKVYGMDWTGHGGSDGLHGYVQSLDHAVNDLKMYLKKVLAENPGLPCFCFGHSTGGGIILKAALDPEVETLLRGIVLTSPAVRVQPTHPIIAVMAPIFALIAPRYQFTASHRNGPPVSRDPEALRAKYTDPLVFTGAIRVRTGYEILRLTSYLQQHLHRIAVPLLVLHGADDLVTDPRGSRALYERASSADKSLKLYDGLLHDLLIEPEKDRVMDDIVAWLSPRV

SEQ ID NO: 285738 - protein, 75 aa, Zea mays
  Clone ID: MRT4577_23694C.1.pep
PLIGLGSSYITFKRTMILQFTPVFTPNGYPNMKAFQYQPDREETICSTLFPIRVNLNIRKPRYEMDVQNTGREPL

SEQ ID NO: 285739 - protein, 45 aa, Zea mays
  Clone ID: MRT4577_23695C.1.pep
RCLCGSHALLNVSDYLQPWSYDFEASSRTDHGVPFRVCRNLYSTR

SEQ ID NO: 285740 - protein, 68 aa, Zea mays
  Clone ID: MRT4577_23696C.1.pep
LLPSAVLYGAGDFLKPLPLYLSRWLYLPRLPPHPEAQATLRPDRLHRRKWWAKPHCIITTTCCTSRLN

SEQ ID NO: 285741 - protein, 363 aa, Zea mays
  unsure (1)..(363): unsure at all Xaa locations
  Clone ID: MRT4577_23697C.1.pep
MGREWDSDESSIDSSSDEDAANIAVNKGLLFSNVGHKCLMDKENKKKKVHSSYTPKYTTSDDEGNSSDGNDDLTALFANLTKDQKKKINQLIETINKKDELLESQEDLLVKENEKFFXLKDAYALEXLIVKIKELSACNISTSTIEHVTICTRCRDVNIDAMNDHLAMIKEQNDHITKLNVRIAEHEKNEKFKFARSMLYNGRHPGIKDSIGFQQGSQSNIKLNAPKNRLSNFVKGKALMVQDREGYILYSENYPEHKIRKIHARKSHTVSHNAYMYSNEASSSKHSTHIKMPKNKIVDASNEYNISFKIFDASFVLTNKSGKVVAKYVGGKHKSPKTCVWVPKMLISNVKGPKTVWVPKNKA

SEQ ID NO: 285742 - protein, 72 aa, Zea mays
  Clone ID: MRT4577_23698C.1.pep
INLARYETAYYHTKLWINLARIIPLSSGLAAFYDILTVPYRLRFYSSVLVILDEPVSHGVKAGAVLRLFAVT

SEQ ID NO: 285743 - protein, 84 aa, Zea mays
  Clone ID: MRT4577_23699C.1.pep
TECKLRSHGGTAKTQKDYLKPRGHPQKNNKGGKKPNKTGPRLLGLRHPPNQPYPNQQTPWEVNPKEIPPDFKTAKHNSEKFAPN

SEQ ID NO: 285744 - protein, 101 aa, Zea mays
  Clone ID: MRT4577_2369C.1.pep
KGGEEKEEGGEAVPARGPRRRNELVAILQTSAVFCYLFDPPQCQCLDFWPGGSHPERNQCIRFPSDGGVDIPPGHAHRGAAILFNFCERLCTPTPVGASPK
